United States Patent Application Publication US 2005/0228172 A9 - sequence listing, part 148

SEQ ID NO: 686407 - DNA, 2275 bp, Homo sapiens
tgacccaaataatcatttatgcaataaaatgattgttcagacccaccaaaaaggtagtttgttatgctgcttcaggtaattagaacacccttccttttccatttttaatataagctggttcatatatgtgtgtrtcctgtctctgtattagataaatggtagcatattagagtcacttccctacctcacacttttcactagacaatatgttctggccatcactccagagagattttattttatcttattttatttattctttatctgagacaaggtcttactctgtcacccaggctggagtatagtagtgtgatcatagcttactgcagcctcaaccccctgggctcaaacaatccctcctgagcctcctgagtagctgggaccacaggtgtgcaccattgcactgggctaattttttttttttatatagcgctttcctatgttgcccaggctgttctcaaactcctgggctcaagcaatcctcctgccttggccccccaaagcgttgggattacaggtgtgagcctccatctcagcctccagagaaattttaaaggacaggtttgaattttgttttgttagccaatatagaaatcttttttctgctaataggtgaattaagaccatataatcagtatgtttaacctcagttctgtcatattgttttatgttacatttatacttacgtaaatcttttaaacaaattgtttttcagtgtggcttttatttttctctatctcttattgtttttttttttggtactaaggaagggtcatatttttgctgaaatgattacctttatactaatatctgcacataatgctttcagttccctcttttttgtctgttggtttcctactatgaacaatattgaaatgtgctagtatcctcttccctttcctttcccacagcacctgatttgaattaatatccttttactcctagttattaactataaggcagtcaacaagcttattctacttttcatatgctcttcccattttccctcaaatatctcataattgtactgtaacagctgtactttattccttacaaccattgtttactcctaatcgtacaagtaagtatatgctgtatatgttgaatacgcaccatcagaccttatgtttatgtttctctagtcactttggttgcctgacgcttgttttctaatagggtcctcagtaggtgctcccaggaataatactcttggagttcttgcatgttggtaattgtttatgacccttatacttgaacatcagtttggctggagacatatctttcttggattgtactttacccctttaataatgtggccatactagtcccttgtcttctggcatgaagtattgatgtaggtaagtctgatgacagtctgattttcctgataagtgacttaatctttttctttctcttttttccttttgtcatgccgtcttgtctaagagtgacttgatcttttcccagattctcaatggcatccatagaatatgtcatagaatatgattctctgttggatgtgccgggtcactttttttttaggtacacaatgttgtttcaagtttttatctatctcaggaaagtgtttttaaattgtagtgtttactctttctttgattatctagctttggttttctttttcagcagctactattatacatatgttagatcatttgcctgtcatctacatagtcactttctctcaatcctagttctctgtcttccatttttttgttttagaaatgttcatcattttatcttctttgtgttcatttggtcttgtgttccttctagtttagtcgtcattctgaaatagggtttttcttttatttctaattatttcttcagttctagcacatctttcctgaagtcttccaaattttgttattcttttataacttttgttactttcttaacttctgttggctcatttttaaatgagtttctacactttggggcatgtattttggggcatgtgtttctggaatgccttcattatctgtgggggcatcattcatcattctcatttttcttacaataattttgtatggggtttaaccacaatcattttgtgttgctcattttttaatgaaatgagttttctaaactctgaagaagagggtgggtcagagccacttttctaacttcacggctctatagtttcctcttctgttgcttttgtgaagtgttaaaaaataggatcttgtactttattttataccccttttccttcctacctaaaccttttctcccttcttccctccctccctctctt

SEQ ID NO: 686408 - DNA, 2275 bp, Homo sapiens
tgacccaaataatcatttatgcaataaaatgattgttcagacccaccaaaaaggtagtttgttatgctgcttcaggtaattagaacacccttccttttccatttttaatataagctggttcatatatgtgtgtatcctgtctctgtattagataaatggtagcatattagagtcacttccctacctcacacttttcactagacaatatgttctggccatcactccagagagattttattttatcttattttatttattytttatctgagacaaggtcttactctgtcacccaggctggagtatagtagtgtgatcatagcttactgcagcctcaaccccctgggctcaaacaatccctcctgagcctcctgagtagctgggaccacaggtgtgcaccattgcactgggctaattttttttttttatatagcgctttcctatgttgcccaggctgttctcaaactcctgggctcaagcaatcctcctgccttggccccccaaagcgttgggattacaggtgtgagcctccatctcagcctccagagaaattttaaaggacaggtttgaattttgttttgttagccaatatagaaatcttttttctgctaataggtgaattaagaccatataatcagtatgtttaacctcagttctgtcatattgttttatgttacatttatacttacgtaaatcttttaaacaaattgtttttcagtgtggcttttatttttctctatctcttattgtttttttttttggtactaaggaagggtcatatttttgctgaaatgattacctttatactaatatctgcacataatgctttcagttccctcttttttgtctgttggtttcctactatgaacaatattgaaatgtgctagtatcctcttccctttcctttcccacagcacctgatttgaattaatatccttttactcctagttattaactataaggcagtcaacaagcttattctacttttcatatgctcttcccattttccctcaaatatctcataattgtactgtaacagctgtactttattccttacaaccattgtttactcctaatcgtacaagtaagtatatgctgtatatgttgaatacgcaccatcagaccttatgtttatgtttctctagtcactttggttgcctgacgcttgttttctaatagggtcctcagtaggtgctcccaggaataatactcttggagttcttgcatgttggtaattgtttatgacccttatacttgaacatcagtttggctggagacatatctttcttggattgtactttacccctttaataatgtggccatactagtcccttgtcttctggcatgaagtattgatgtaggtaagtctgatgacagtctgattttcctgataagtgacttaatctttttctttctcttttttccttttgtcatgccgtcttgtctaagagtgacttgatcttttcccagattctcaatggcatccatagaatatgtcatagaatatgattctctgttggatgtgccgggtcactttttttttaggtacacaatgttgtttcaagtttttatctatctcaggaaagtgtttttaaattgtagtgtttactctttctttgattatctagctttggttttctttttcagcagctactattatacatatgttagatcatttgcctgtcatctacatagtcactttctctcaatcctagttctctgtcttccatttttttgttttagaaatgttcatcattttatcttctttgtgttcatttggtcttgtgttccttctagtttagtcgtcattctgaaatagggtttttcttttatttctaattatttcttcagttctagcacatctttcctgaagtcttccaaattttgttattcttttataacttttgttactttcttaacttctgttggctcatttttaaatgagtttctacactttggggcatgtattttggggcatgtgtttctggaatgccttcattatctgtgggggcatcattcatcattctcatttttcttacaataattttgtatggggtttaaccacaatcattttgtgttgctcattttttaatgaaatgagttttctaaactctgaagaagagggtgggtcagagccacttttctaacttcacggctctatagtttcctcttctgttgcttttgtgaagtgttaaaaaataggatcttgtactttattttataccccttttccttcctacctaaaccttttctcccttcttccctccctccctctctt

SEQ ID NO: 686409 - DNA, 2275 bp, Homo sapiens
tgacccaaataatcatttatgcaataaaatgattgttcagacccaccaaaaaggtagtttgttatgctgcttcaggtaattagaacacccttccttttccatttttaatataagctggttcatatatgtgtgtatcctgtctctgtattagataaatggtagcatattagagtcacttccctacctcacacttttcactagacaatatgttctggccatcactccagagagattttattttatcttattttatttattctttatctgagacaaggtcttactctgtcacccaggctggagtatagtagtgtgatcatagcttactgcagcctcaaccccctgggctcaaacaatccctcctgagcctcctgagtagctgggaccacaggtgtgcaccattgcactgggctaattttttttttttatatagmgctttcctatgttgcccaggctgttctcaaactcctgggctcaagcaatcctcctgccttggccccccaaagcgttgggattacaggtgtgagcctccatctcagcctccagagaaattttaaaggacaggtttgaattttgttttgttagccaatatagaaatcttttttctgctaataggtgaattaagaccatataatcagtatgtttaacctcagttctgtcatattgttttatgttacatttatacttacgtaaatcttttaaacaaattgtttttcagtgtggcttttatttttctctatctcttattgtttttttttttggtactaaggaagggtcatatttttgctgaaatgattacctttatactaatatctgcacataatgctttcagttccctcttttttgtctgttggtttcctactatgaacaatattgaaatgtgctagtatcctcttccctttcctttcccacagcacctgatttgaattaatatccttttactcctagttattaactataaggcagtcaacaagcttattctacttttcatatgctcttcccattttccctcaaatatctcataattgtactgtaacagctgtactttattccttacaaccattgtttactcctaatcgtacaagtaagtatatgctgtatatgttgaatacgcaccatcagaccttatgtttatgtttctctagtcactttggttgcctgacgcttgttttctaatagggtcctcagtaggtgctcccaggaataatactcttggagttcttgcatgttggtaattgtttatgacccttatacttgaacatcagtttggctggagacatatctttcttggattgtactttacccctttaataatgtggccatactagtcccttgtcttctggcatgaagtattgatgtaggtaagtctgatgacagtctgattttcctgataagtgacttaatctttttctttctcttttttccttttgtcatgccgtcttgtctaagagtgacttgatcttttcccagattctcaatggcatccatagaatatgtcatagaatatgattctctgttggatgtgccgggtcactttttttttaggtacacaatgttgtttcaagtttttatctatctcaggaaagtgtttttaaattgtagtgtttactctttctttgattatctagctttggttttctttttcagcagctactattatacatatgttagatcatttgcctgtcatctacatagtcactttctctcaatcctagttctctgtcttccatttttttgttttagaaatgttcatcattttatcttctttgtgttcatttggtcttgtgttccttctagtttagtcgtcattctgaaatagggtttttcttttatttctaattatttcttcagttctagcacatctttcctgaagtcttccaaattttgttattcttttataacttttgttactttcttaacttctgttggctcatttttaaatgagtttctacactttggggcatgtattttggggcatgtgtttctggaatgccttcattatctgtgggggcatcattcatcattctcatttttcttacaataattttgtatggggtttaaccacaatcattttgtgttgctcattttttaatgaaatgagttttctaaactctgaagaagagggtgggtcagagccacttttctaacttcacggctctatagtttcctcttctgttgcttttgtgaagtgttaaaaaataggatcttgtactttattttataccccttttccttcctacctaaaccttttctcccttcttccctccctccctctctt

SEQ ID NO: 686410 - DNA, 2275 bp, Homo sapiens
tgacccaaataatcatttatgcaataaaatgattgttcagacccaccaaaaaggtagtttgttatgctgcttcaggtaattagaacacccttccttttccatttttaatataagctggttcatatatgtgtgtatcctgtctctgtattagataaatggtagcatattagagtcacttccctacctcacacttttcactagacaatatgttctggccatcactccagagagattttattttatcttattttatttattctttatctgagacaaggtcttactctgtcacccaggctggagtatagtagtgtgatcatagcttactgcagcctcaaccccctgggctcaaacaatccctcctgagcctcctgagtagctgggaccacaggtgtgcaccattgcactgggctaattttttttttttatatagcgctttcctatgttgcccaggctgktctcaaactcctgggctcaagcaatcctcctgccttggccccccaaagcgttgggattacaggtgtgagcctccatctcagcctccagagaaattttaaaggacaggtttgaattttgttttgttagccaatatagaaatcttttttctgctaataggtgaattaagaccatataatcagtatgtttaacctcagttctgtcatattgttttatgttacatttatacttacgtaaatcttttaaacaaattgtttttcagtgtggcttttatttttctctatctcttattgtttttttttttggtactaaggaagggtcatatttttgctgaaatgattacctttatactaatatctgcacataatgctttcagttccctcttttttgtctgttggtttcctactatgaacaatattgaaatgtgctagtatcctcttccctttcctttcccacagcacctgatttgaattaatatccttttactcctagttattaactataaggcagtcaacaagcttattctacttttcatatgctcttcccattttccctcaaatatctcataattgtactgtaacagctgtactttattccttacaaccattgtttactcctaatcgtacaagtaagtatatgctgtatatgttgaatacgcaccatcagaccttatgtttatgtttctctagtcactttggttgcctgacgcttgttttctaatagggtcctcagtaggtgctcccaggaataatactcttggagttcttgcatgttggtaattgtttatgacccttatacttgaacatcagtttggctggagacatatctttcttggattgtactttacccctttaataatgtggccatactagtcccttgtcttctggcatgaagtattgatgtaggtaagtctgatgacagtctgattttcctgataagtgacttaatctttttctttctcttttttccttttgtcatgccgtcttgtctaagagtgacttgatcttttcccagattctcaatggcatccatagaatatgtcatagaatatgattctctgttggatgtgccgggtcactttttttttaggtacacaatgttgtttcaagtttttatctatctcaggaaagtgtttttaaattgtagtgtttactctttctttgattatctagctttggttttctttttcagcagctactattatacatatgttagatcatttgcctgtcatctacatagtcactttctctcaatcctagttctctgtcttccatttttttgttttagaaatgttcatcattttatcttctttgtgttcatttggtcttgtgttccttctagtttagtcgtcattctgaaatagggtttttcttttatttctaattatttcttcagttctagcacatctttcctgaagtcttccaaattttgttattcttttataacttttgttactttcttaacttctgttggctcatttttaaatgagtttctacactttggggcatgtattttggggcatgtgtttctggaatgccttcattatctgtgggggcatcattcatcattctcatttttcttacaataattttgtatggggtttaaccacaatcattttgtgttgctcattttttaatgaaatgagttttctaaactctgaagaagagggtgggtcagagccacttttctaacttcacggctctatagtttcctcttctgttgcttttgtgaagtgttaaaaaataggatcttgtactttattttataccccttttccttcctacctaaaccttttctcccttcttccctccctccctctctt

SEQ ID NO: 686411 - DNA, 2275 bp, Homo sapiens
tgacccaaataatcatttatgcaataaaatgattgttcagacccaccaaaaaggtagtttgttatgctgcttcaggtaattagaacacccttccttttccatttttaatataagctggttcatatatgtgtgtatcctgtctctgtattagataaatggtagcatattagagtcacttccctacctcacacttttcactagacaatatgttctggccatcactccagagagattttattttatcttattttatttattctttatctgagacaaggtcttactctgtcacccaggctggagtatagtagtgtgatcatagcttactgcagcctcaaccccctgggctcaaacaatccctcctgagcctcctgagtagctgggaccacaggtgtgcaccattgcactgggctaattttttttttttatatagcgctttcctatgttgcccaggctgttctcaaactcctgggctcaagcaatcctcctgccttggccccccaaagcgytgggattacaggtgtgagcctccatctcagcctccagagaaattttaaaggacaggtttgaattttgttttgttagccaatatagaaatcttttttctgctaataggtgaattaagaccatataatcagtatgtttaacctcagttctgtcatattgttttatgttacatttatacttacgtaaatcttttaaacaaattgtttttcagtgtggcttttatttttctctatctcttattgtttttttttttggtactaaggaagggtcatatttttgctgaaatgattacctttatactaatatctgcacataatgctttcagttccctcttttttgtctgttggtttcctactatgaacaatattgaaatgtgctagtatcctcttccctttcctttcccacagcacctgatttgaattaatatccttttactcctagttattaactataaggcagtcaacaagcttattctacttttcatatgctcttcccattttccctcaaatatctcataattgtactgtaacagctgtactttattccttacaaccattgtttactcctaatcgtacaagtaagtatatgctgtatatgttgaatacgcaccatcagaccttatgtttatgtttctctagtcactttggttgcctgacgcttgttttctaatagggtcctcagtaggtgctcccaggaataatactcttggagttcttgcatgttggtaattgtttatgacccttatacttgaacatcagtttggctggagacatatctttcttggattgtactttacccctttaataatgtggccatactagtcccttgtcttctggcatgaagtattgatgtaggtaagtctgatgacagtctgattttcctgataagtgacttaatctttttctttctcttttttccttttgtcatgccgtcttgtctaagagtgacttgatcttttcccagattctcaatggcatccatagaatatgtcatagaatatgattctctgttggatgtgccgggtcactttttttttaggtacacaatgttgtttcaagtttttatctatctcaggaaagtgtttttaaattgtagtgtttactctttctttgattatctagctttggttttctttttcagcagctactattatacatatgttagatcatttgcctgtcatctacatagtcactttctctcaatcctagttctctgtcttccatttttttgttttagaaatgttcatcattttatcttctttgtgttcatttggtcttgtgttccttctagtttagtcgtcattctgaaatagggtttttcttttatttctaattatttcttcagttctagcacatctttcctgaagtcttccaaattttgttattcttttataacttttgttactttcttaacttctgttggctcatttttaaatgagtttctacactttggggcatgtattttggggcatgtgtttctggaatgccttcattatctgtgggggcatcattcatcattctcatttttcttacaataattttgtatggggtttaaccacaatcattttgtgttgctcattttttaatgaaatgagttttctaaactctgaagaagagggtgggtcagagccacttttctaacttcacggctctatagtttcctcttctgttgcttttgtgaagtgttaaaaaataggatcttgtactttattttataccccttttccttcctacctaaaccttttctcccttcttccctccctccctctctt

SEQ ID NO: 686412 - DNA, 2275 bp, Homo sapiens
tgacccaaataatcatttatgcaataaaatgattgttcagacccaccaaaaaggtagtttgttatgctgcttcaggtaattagaacacccttccttttccatttttaatataagctggttcatatatgtgtgtatcctgtctctgtattagataaatggtagcatattagagtcacttccctacctcacacttttcactagacaatatgttctggccatcactccagagagattttattttatcttattttatttattctttatctgagacaaggtcttactctgtcacccaggctggagtatagtagtgtgatcatagcttactgcagcctcaaccccctgggctcaaacaatccctcctgagcctcctgagtagctgggaccacaggtgtgcaccattgcactgggctaattttttttttttatatagcgctttcctatgttgcccaggctgttctcaaactcctgggctcaagcaatcctcctgccttggccccccaaagcgttgggattacaggtgtgagcctccatctcagcctccagagaaattttaaaggacaggtttgaattttgttttgttagccaatatagaaatcttttttctgctaataggtgaattaagaccatataatcagtatgtttaacctcagttctgtcatattgttttatgttacatttatacttacgtaaatcttttaaacaaattgtttttcagtgtggcttttatttttctctatctcttattgtttttttttttggtactaaggaagggtcatatttttgctgaaatgattacctttatactaatatctgcacataatgctttcagttccctcttttttgtctgttggtttcctactatgaacaatattgaaatgtgctagtatcctcttccctttcctttcccacagcacctgatttgaattaatatccttttactcctagttattaactataaggcagtcaacaagcttattctacttttcatatgctcttcccattttccctcaaatatctcataattgtactgtaacagctgtactttattccttacaaccattgtttactcctaatcgtacaagtaagtatatgctgtatatgttgaatacgcaccatcagaccttatgtttatgtttctctagtcactttggttgcctgacgcttgttttctaatagggtcctcagtaggtgctcccaggaataatactcttggagttcttgcatgttggtaattgtttatgacccttatacttgaacatcagtttggctggagacatatctttcttggattgtactttacccctttaataatgtggccatactagtcccttgtcttctggcatgaagtattgatgtaggtaagtctgatgacagtctgattttcctgataagtgacttaatctttttctttctcttttttccttttgtcatgccgtcttgtctaagagtgacttgatcttttcccagattctcaatggcatccatagaatatgtcatagaatatgattctctgttggatgtgccgggtcactttttttttaggtacacaatgttgtttcaagtttttatctatctcaggaaagtgtttttaaattgtagtgtttactctttctttgattatctagctttggttttctttttcagcagctactattatacatatgttagatcatttgcctgtcatctacatagtcactttctctcaatcctagttctctgtcttccatttttttgttttagaaatgttcatcattttatcttctttgtgttcatttggtcttgtgttccttctagtttagtcgtcattctgaaatagggtttttcttttatttctaattatttcttcagttctagcacatctttcctgaagtcttccaaattttgttattcttttataacttttgttactttcttaacttctgttggctcatttttaaatgagtttctacactttggggcatgtattttggggcatgtgtttctggaatgccttcattatctgtgggggcatcattcawcattctcatttttcttacaataattttgtatggggtttaaccacaatcattttgtgttgctcattttttaatgaaatgagttttctaaactctgaagaagagggtgggtcagagccacttttctaacttcacggctctatagtttcctcttctgttgcttttgtgaagtgttaaaaaataggatcttgtactttattttataccccttttccttcctacctaaaccttttctcccttcttccctccctccctctctt

SEQ ID NO: 686413 - DNA, 2275 bp, Homo sapiens
tgacccaaataatcatttatgcaataaaatgattgttcagacccaccaaaaaggtagtttgttatgctgcttcaggtaattagaacacccttccttttccatttttaatataagctggttcatatatgtgtgtatcctgtctctgtattagataaatggtagcatattagagtcacttccctacctcacacttttcactagacaatatgttctggccatcactccagagagattttattttatcttattttatttattctttatctgagacaaggtcttactctgtcacccaggctggagtatagtagtgtgatcatagcttactgcagcctcaaccccctgggctcaaacaatccctcctgagcctcctgagtagctgggaccacaggtgtgcaccattgcactgggctaattttttttttttatatagcgctttcctatgttgcccaggctgttctcaaactcctgggctcaagcaatcctcctgccttggccccccaaagcgttgggattacaggtgtgagcctccatctcagcctccagagaaattttaaaggacaggtttgaattttgttttgttagccaatatagaaatcttttttctgctaataggtgaattaagaccatataatcagtatgtttaacctcagttctgtcatattgttttatgttacatttatacttacgtaaatcttttaaacaaattgtttttcagtgtggcttttatttttctctatctcttattgtttttttttttggtactaaggaagggtcatatttttgctgaaatgattacctttatactaatatctgcacataatgctttcagttccctcttttttgtctgttggtttcctactatgaacaatattgaaatgtgctagtatcctcttccctttcctttcccacagcacctgatttgaattaatatccttttactcctagttattaactataaggcagtcaacaagcttattctacttttcatatgctcttcccattttccctcaaatatctcataattgtactgtaacagctgtactttattccttacaaccattgtttactcctaatcgtacaagtaagtatatgctgtatatgttgaatacgcaccatcagaccttatgtttatgtttctctagtcactttggttgcctgacgcttgttttctaatagggtcctcagtaggtgctcccaggaataatactcttggagttcttgcatgttggtaattgtttatgacccttatacttgaacatcagtttggctggagacatatctttcttggattgtactttacccctttaataatgtggccatactagtcccttgtcttctggcatgaagtattgatgtaggtaagtctgatgacagtctgattttcctgataagtgacttaatctttttctttctcttttttccttttgtcatgccgtcttgtctaagagtgacttgatcttttcccagattctcaatggcatccatagaatatgtcatagaatatgattctctgttggatgtgccgggtcactttttttttaggtacacaatgttgtttcaagtttttatctatctcaggaaagtgtttttaaattgtagtgtttactctttctttgattatctagctttggttttctttttcagcagctactattatacatatgttagatcatttgcctgtcatctacatagtcactttctctcaatcctagttctctgtcttccatttttttgttttagaaatgttcatcattttatcttctttgtgttcatttggtcttgtgttccttctagtttagtcgtcattctgaaatagggtttttcttttatttctaattatttcttcagttctagcacatctttcctgaagtcttccaaattttgttattcttttataacttttgttactttcttaacttctgttggctcatttttaaatgagtttctacactttggggcatgtattttggggcatgtgtttctggaatgccttcattatctgtgggggcatcattcatcattctcatttttcttacaataattttgtatggggtttaaccacaatcattttgtgttgctcattttttaatgaaatgagttttctaaactctgaagaagagggtgggtcagagccacttttctaacttcacrgctctatagtttcctcttctgttgcttttgtgaagtgttaaaaaataggatcttgtactttattttataccccttttccttcctacctaaaccttttctcccttcttccctccctccctctctt

SEQ ID NO: 686414 - DNA, 1131 bp, Homo sapiens
agaaattgacaagtcacctattaggccaccatccaaagaaaaccactgttgatctattttcttgtttcttttgagacaatgtctygctcttgtccccctggctggagtgcagtggtgtgatcttggctcactgcaacctctacctcctaggttcaagcgattctcctgcctcagcctcctgagtagctgggattacaggcgcctgtcaccacacctggctaatttttgtatttttagtagagacggggtttcaccatgttggccaggctggtctgaaactcctgaccttaggtaatccgcccgcctcggcctcccaaagtgctgggattacaggcgtgacgaccgcgcctagcctgatctattttcatgtatagcacctttgatactttgtcttatatatcttgccttaggggtttttaaaattatattattgagacggactctcactttgtcacccaggctggaatgcagtggtgcagtctcggtttactgcagcttctgcctccggggttcaagcgattctcctgcctcagtctcaagtagctgggaccacaggcatgcaccaccacgcccagctaatttttgtatttttagtagggacacagtttcaccacattggccagcctggtcttgaagtcctgacctcaggtgatctgcccacctcagcctcccaaagtgctgggattacaggcgtgagccaccatgcccagccttatcttagattttttaaagttatatgttaaacacatcaaaagttatgtttacaatatgtgaaaagtaataaacatgccacagcatgatggcccttaaaaacataatgcaaaatgaaagaagccagttgttgaagaccacgttacaggattccatttaaatgaaatacccagaattggcatatccagagagttgggaagccgactggtggttgtggagggctggggagatgtgaagggaccactaattggtacagggtttctttctgagatgatgaaaatgcaccaggatcagttgtgctattggttgcacaactttgggaaagccacttcatcgttcacctccgatgggggagttgctctgtgaattctatctcagtaaagctgtgaattctatctcagtaaagctgccattaaaaaa

SEQ ID NO: 686415 - DNA, 610 bp, Homo sapiens
gggcctgctccagctcgtactcaaactggtcttgggcattctcccccattgtagatctcatgcacaatgtagcagtctgtggccgacaagctcacccttttgatggagggggcaggaaagggagagagagagagagacaggatgattaggctgaggagcacttaactgtgtttcagcgctgggggaggtctgagcctgcactgcggagagcacatctcacttgggtcctcatctcctttaaatcccaacacaagataatcagtaaaaaggatttttcctgaaaatagtgaaataaagctgggtgcggtggctcacacctgtaatcctagcactttgggaggccgggggggcggatcatgaggtcaggagttagagaccagcctggccaacatggtgaaaccgtctctactaaagatacaaaaaaaaattagccaggtgtggtggcgcatgcctataatccctgtaatctactcgggaggctgaggcaggagaatcacttgaacctgggaggcggagcttgcagtgagccgagatcgtgccattgcactccagcctgggtgacagggcgagactcagtctcagaaaaaaaaaaaaaaaaaaratataaaaa

SEQ ID NO: 686416 - DNA, 610 bp, Homo sapiens
gggcctgctccagctcgtactcaaactggtcttgggcattctcccccattgtagatctcatgcacaatgtagcagtctgtggccgacaagctcacccttttgatggagggggcaggaaagggagagagagagagagacaggatgattaggctgaggagcacttaactgtgtttcagcgctgggggaggtctgagcctgcactgcggagagcacatctcacttgggtcctcatctcctttaaatcccaacacaagataatcagtaaaaaggatttttcctgaaaatagtgaaataaagctgggtgcggtggctcacacctgtaatcctagcactttgggaggccgggggggcggatcatgaggtcaggagttagagaccagcctggccaacatggtgaaaccgtctctactaaagatacaaaaaaaaattagccaggtgtggtggcgcatgcctataatccctgtaatctactcgggaggctgaggcaggagaatcacttgaacctgggaggcggagcttgcagtgagccgagatcgtgccattgcactccagcctgggtgacagggcgagactcagtctcagaaaaaaaaaaaaaaaaaagawataaaaa

SEQ ID NO: 686417 - DNA, 610 bp, Homo sapiens
gggcctgctccagctcgtactcaaactggtcttgggcattctcccccattgtagatctcatgcacaatgtagcagtctgtggccgacaagctcacccttttgatggagggggcaggaaagggagagagagagagagacaggatgattaggctgaggagcacttaactgtgtttcagcgctgggggaggtctgagcctgcactgcggagagcacatctcacttgggtcctcatctcctttaaatcccaacacaagataatcagtaaaaaggatttttcctgaaaatagtgaaataaagctgggtgcggtggctcacacctgtaatcctagcactttgggaggccgggggggcggatcatgaggtcaggagttagagaccagcctggccaacatggtgaaaccgtctctactaaagatacaaaaaaaaattagccaggtgtggtggcgcatgcctataatccctgtaatctactcgggaggctgaggcaggagaatcacttgaacctgggaggcggagcttgcagtgagccgagatcgtgccattgcactccagcctgggtgacagggcgagactcagtctcagaaaaaaaaaaaaaaaaaagatawaaaaa

SEQ ID NO: 686418 - DNA, 1167 bp, Homo sapiens
tagacagactttttttcttccaaagaagacatataaatcrtcatcagaagtgttaaaaggtgctcaatgtcactaagcatcaaagaaatgctattcaaagctgcaatgagatattaccccacaactgtcagggtggctgatatattctcactgatatatatcagtgatatatatcagtgatatatatcagtgagaatatggggaaattagagccattatacactgttggtggaaacattatacattataaggctgtataatgttgtaggaggcatttttcattcttcaccagcagtgtataatgtatagtgggagctgtcatagattatacactcatggaatggctattaaccaggttgctgtaattcagtttgttgagaataccttatgtaaacacacactttagtaaaataacttggtgagtttcacattaagtctatcttcttagcaggtcatttaaatgataaagagttatcattgaatatgtgccacttgaaacatgatttagcaatttctttcattcacataacttctgtgttaatccacatgctggtaactttttaaaactgtatatttattaattacttttctcctgaattctgtatttctatatccagttgtctctatacatatatgttcatgtcttataggtatcttaaataccatatatcagagcagaggttatcaactattcccaaaatttattcttctccagggtttccaccttaaatgattcaacaaaactttagttaatcaaaatagaattgtaaggataatctgaaatttcctcttctcccctcatattcaatttcaagtttgtcactaagctgcattgtgtttccaaccacttcataagaaatacttgaataaatctttctgtttccattctttcaaccttagtctattatccttttttcgaattactttaattaattaattaattaattttttttttttttttttttttttttttttttttttttgagacggagtctcgctctgtcgcccaggctggagcgcagtggcgcgatctcggctcactgcaagccccgcctcccgggttcccaccattctcctgcctcagcctcccgagtagctgggaccacaggcacccgccactacgcccggctaattttttgtatttttagtagagacggggtttcacca

SEQ ID NO: 686419 - DNA, 1167 bp, Homo sapiens
tagacagactttttttcttccaaagaagacatataaatcatcatcagaagtgttaaaaggtgctcaatgtcactaagcatcaaagaaatgctattcaaagctgcaatgagatattaccccacaactgtcagggtggctgatatattctcactgatatatatcagtgatatatatcastgatatatatcagtgagaatatggggaaattagagccattatacactgttggtggaaacattatacattataaggctgtataatgttgtaggaggcatttttcattcttcaccagcagtgtataatgtatagtgggagctgtcatagattatacactcatggaatggctattaaccaggttgctgtaattcagtttgttgagaataccttatgtaaacacacactttagtaaaataacttggtgagtttcacattaagtctatcttcttagcaggtcatttaaatgataaagagttatcattgaatatgtgccacttgaaacatgatttagcaatttctttcattcacataacttctgtgttaatccacatgctggtaactttttaaaactgtatatttattaattacttttctcctgaattctgtatttctatatccagttgtctctatacatatatgttcatgtcttataggtatcttaaataccatatatcagagcagaggttatcaactattcccaaaatttattcttctccagggtttccaccttaaatgattcaacaaaactttagttaatcaaaatagaattgtaaggataatctgaaatttcctcttctcccctcatattcaatttcaagtttgtcactaagctgcattgtgtttccaaccacttcataagaaatacttgaataaatctttctgtttccattctttcaaccttagtctattatccttttttcgaattactttaattaattaattaattaattttttttttttttttttttttttttttttttttttttgagacggagtctcgctctgtcgcccaggctggagcgcagtggcgcgatctcggctcactgcaagccccgcctcccgggttcccaccattctcctgcctcagcctcccgagtagctgggaccacaggcacccgccactacgcccggctaattttttgtatttttagtagagacggggtttcacca

SEQ ID NO: 686420 - DNA, 611 bp, Homo sapiens
taaactgtgcaataatagtaaccatgtaatattgaatattgatcattgtattccctgtacttagcagaatgcctaacacataataagagcttcaattgaagagaactggtaagagtagaggttgcaaaattggggacatttttttaaaggccagatagcttgcttatctggctgagatataccaagctcaaaaatttaggctgtgtgtaataggaagccactccaagttttgtgaacacctaagttttattaggcacttaaaaatgctttatgacstataggccagttgaacagaatagagagcctagaaataaacacatacctatagataaactgattttcaacccaggtgaaaagaatacataatgagaaaaggagagtttcttcaataaatagtgttgagtaaactggatatctgtatgcaaaagaatgaaattgaacccttatgtcttattcaaaaatgaactcaaaatttattaaagacttaaacataaatgttgaaaccataaaactcctaggagaaaatataggaaaagaaacttcttggtattggccttggtaattgtttcttgaatgtggcactaaaagcacaggggaaaacagaaataaac

SEQ ID NO: 686421 - DNA, 611 bp, Homo sapiens
taaactgtgcaataatagtaaccatgtaatattgaatattgatcattgtattccctgtacttagcagaatgcctaacacataataagagcttcaattgaagagaactggtaagagtagaggttgcaaaattggggacatttttttaaaggccagatagcttgcttatctggctgagatataccaagctcaaaaatttaggctgtgtgtaataggaagccactccaagttttgtgaacacctaagttttattaggcacttaaaaatgctttatgacctataggccagttgaacagaatagagagcctagaaataaacacatacctatagataaactgattttcaacccaggtgaaaagaatacataatgagaaaaggagagtttcttcaataaatagtgttgagtaaactggatatctgtatgcaaaagaatgaaattgaacccttatgtcttattcaaaaatgaactcaaaatttattaaagacttaaacataaatgttgaaaccataaaactcctaggagaaaatataggaaaaraaacttcttggtattggccttggtaattgtttcttgaatgtggcactaaaagcacaggggaaaacagaaataaac

SEQ ID NO: 686422 - DNA, 619 bp, Homo sapiens
gcactggttttaggccgtacctattcatggcctgctgcggctcagggagatttggcttttgtatactcccgctgagcaacctttcaccctgccgcccaatcttcctgttcaatccgtgtgctcggttgtggattgtgacgatcatgtacatagtgttcacttctaatccaggcagggtcataacattgtttcttttcttgtatgattttggctcttcctggatcctggccccctctcctgcccttgcttacttagttttctgtgcctaccgtagctacattttcctacacgtcccctagcctcaaatgtaattccagtgtgggctgggcatggtggcccacacctgtaatcctagcactttgggaggcccagacgggtggatcgcttgagctcaggagttccagaatagcctaagcaacatagtgagacccacgtctctaaaaaattaaaacaaaaattatctggatgtggtkgtttgcccctgtagtcccagctacttgggaggctaaggctggaggattgcttgagcctgggcggtcaaggctgtgctgagctgtgacctcaccagcctgggaaaaagaagaagactctgtctccgaaaaaatataaaagaaagaaa

SEQ ID NO: 686423 - DNA, 663 bp, Homo sapiens
aatgtttatggtagcaagaacattttatattattaaaacataaaaataaaaagactgggtttggtggctcatgtctaatcccagcactttgggaggccaaggagggtgaatcacttgaggtcacaagtttgagacaagcctggccaacatggygaaaccctgtctctactaaaaatacaaaaattagctaggcgtggtggtgcatgcctgtaatcccagctacctgggaggctgaggcaggagaattgcttgaacccgggaggcagaggttgcagtgaaccaagatcatggcactgcactccagcctgggagacagagcgagactctgtctcaaaacaaaaaacaaaaacaaaaaaagaggtggttcctgccctataggcagttaagatctaaaacactgacaaatctaaagtggttaaagtggtacacagaatagctaatacttagatatttgttcatatgtatttgtatatctataaatctacatcacaagaaattaagtagttataatcatcctacttctataagcagaagtcaagaaattccactaaattaacagtcagttcagaccaaaatagtttaattttctactgtcattttgcactagaagattaaagtaaggaagttcatctacacacacaaccatatcattgtctgataaga

SEQ ID NO: 686424 - DNA, 663 bp, Homo sapiens
aatgtttatggtagcaagaacattttatattattaaaacataaaaataaaaagactgggtttggtggctcatgtctaatcccagcactttgggaggccaaggagggtgaatcacttgaggtcacaagtttgagacaagcctggccaacatggcgaaaccctgtctctactaaaaatacaaaaattagctaggcgtggtggtgcatgcctgtaatcccagctacctgggaggctgaggcaggagaattgcttgaacccgggaggcagaggttgcagtgaaccaagatcatggcactgcactccagcctgggagacagagcgagactctgtctcaaaacaaaaaacaaaaacaaaaaaagaggtggttcctgccctataggcagttaagatctaaaacactgacaaatctaaagtggttaaagtggtacamagaatagctaatacttagatatttgttcatatgtatttgtatatctataaatctacatcacaagaaattaagtagttataatcatcctacttctataagcagaagtcaagaaattccactaaattaacagtcagttcagaccaaaatagtttaattttctactgtcattttgcactagaagattaaagtaaggaagttcatctacacacacaaccatatcattgtctgataaga

SEQ ID NO: 686425 - DNA, 1341 bp, Homo sapiens
tcctgggaactcctggttccctttctcattgccatgcatcaattccctcttccacagaaagaactgaagttagaacttaataaggacttcccaacaaaataggaagtaagagaaggaagggcagccaggttaggagggaaacccaaaaagtctattacctgaaacctgggccatgggccctgaggtatttatgggagagaggactgggcagctaagtggtgacaccggcagctctcccacaggggggcttagcccgctggggttgttttacaggttattccttaacacacacttctccccctcccagctctccctgtcagggraataaagccccatcctttccactctcctcactctgcaacaccatcccctcactttctcggagtgcccaattccttgctccttttgctctcccagatctccaaagaaaaagctgggaggtggcaggagcagatggaggtccacggagggttgcacagcagtttcgccagcaggtaggcaccaatttcagggtagggcccaggagttctggattctagccccatgatttgatttacctcaaggaactctgggaacccaaggtttaggggaagggtttgggaaccaggtggctgatagacaaagagaaagcagcaaaagaagaaacagagcaaatgaaagagtccaagacaatcagaagagatatcaccaggtataagagagaggaaacaggaaaacagaagaccagatgtgtggctttaaacaacaacaacaacaacaacaaaaaacagagcaggaaagaaactaaaaagataaagaaacaggcccagaggaacaaagatggggagacaatggcttgggaaggacagagaaaatagcctgaggcatagccaggtccggaggaggaggaggaggaggaggaggaggagggttgtgttgccaggcaggtgggggggcggggaaggagtataaatagcacataattgtgtccgctgattacacgggccaccccacccgtctgcctgagaggaagtgcccgtggtggggtgtccctgtgacctcgcggtctcccccttgttgggggggagtctgagactgaggtgccagatggctttccggggccccgaactcagaagttgagaaagagaagctttagagaaattcctgtatcaccagcagaaaagcccgacccagttagatcaggcaggaaactgaggcagaggaggagaaagtctagattctaaagaagagatagcaggtgaggagggggttgggactcagattagatgagagaagaaaggaagaaactgaaggggaaaaggaggaaggatggaaagataaatggacagacagggctgggga

SEQ ID NO: 686426 - DNA, 613 bp, Homo sapiens
ttttttgtatttttagtatagacagggtttcaccatattggccaggccggtctcgatctcctcaggtgatccacccgcctcagcctcccaaagkgctgggattacaggcgtgagccaccgcacccagctttccgccccgcccccccgccgagatagagtcttgctctgttacccaggctggagtgcagtggcgtgatctcagctcactgcaacctccacctcctgggttcaagcgattctcctggctcactcagcctcctgagtagctgggactacaggcgcataccaccacaccctgctaattttgtattattggtagagatggggtttcactatgttggccaggctgatctcgaactcctgatctcaggtgacccgtctgcctcagcctttcaaagtgctggggttacaggcatgagccactgtgcctggcctataaggccatgtacattcttatttcagggagtttcacaaaattcctgaagctctaccctagactccacattaggaaacaaacaaacaaacaaaaagcctttatacatgctgttaactatgagctattaaaccatatttctagcaggggaagctacctcagccctagatttgagacttg

SEQ ID NO: 686427 - DNA, 613 bp, Homo sapiens
ttttttgtatttttagtatagacagggtttcaccatattggccaggccggtctcgatctcctcaggtgatccacccgcctcagcctcccaaagtgctgggattacaggcgtgagccaccgcacccagctttccgccccgcccccccgccgagatagagtcttgctctgttacccaggctggagtgcagtggcgtgatctcagctcactgcaacctccacctcctgggttcaagcgattctcctggctcactcagcctcctgagtagctgggactacaggcgcataccaccacaccctgctaattttgtattattggtagagatggggtttcactatgttggccaggctgatctcgaactcctgatctcaggtgacccgtctgcctcagcctttcaaagtgctggggttacaggcatgagccactgtgcctggcctataaggccatgtacattyttatttcagggagtttcacaaaattcctgaagctctaccctagactccacattaggaaacaaacaaacaaacaaaaagcctttatacatgctgttaactatgagctattaaaccatatttctagcaggggaagctacctcagccctagatttgagacttg

SEQ ID NO: 686428 - DNA, 1590 bp, Homo sapiens
tgcaccaatcagcactctgtgtctagctcagggtttgtaaatacaccaatcgacactgtgtatctagctaatctagtggggatgtggagaacttttgtgtctagctcagggattgtaaacgcaccaatcagcaccctgtcaaaacggaccaatcagctctctgtaaaacagaccaatgggctctctgtaaaatggaccaatcagcaggatgtgggtggggccagataagagaataaaagcaggctgscggagctagcggtagcaacccgtttggttatctttctgtgctgtggaaggtttgttctttcactctgcactattttgcaataaatattgctattgctcactttgggtttatattgcctttatgagctgtaacactcaccatgaaggtctgcagctttactcttgaagcttagcgagaccactaacccaccagaaggaagaaactccggacacgccgcctttaagaactgtaatactcagtgcgagggttcacggcttcattcttgaggttagtaagaccaagaatccacaaattccagacacaacatggtaatatatggggtcactatccttacagtgagggttaagctttaaatcatcacaatgaaagctttttgtttctctagcgtagcagcaagggagaataaggcctctggagtccaggacttgggttcaaatccaagctccaccgtagctgtgtgacctgggtttatcatttcgcctttttgaatttcggttttcattgaaataatgggaataacattagttcctatatcatggaaagtacctagcacggtccttggtgccttgtaaatgcttggaaaattatcctttctcctgtggtgatggttctaatagactgagttttatgagagcaagagtgggtgtctcccatccactgctttctttttgataccctgaactctgctgatggcagcaaacatttgctgaatcgttgttgaacaaggaatgaatgaacaccgggtttggaatcagggtctttttttgagacagagtctcactctgtctcccaggctggagtgtgggggctccatctcggctcactgcaagctccacctcggagtcacgccgttctcctgcctcagcctcccaagtagctggggctacaggcgcccaccaccatgcctggctgatttttttgtatttttagtagagaccgggtttcaccatgttagctaggatggtctcaatttcctgacctcgtgatctgcctgccttggcctcccagagtgctggaattacaggtgtgagccaccgcacccggccagggtctgtgtttcatttaccgactgtggggccaggccgtacaagacctctgagctccacagatgcaaagtgaagaagtcatggattggccccataagcatgtgacgatgagattaactgagaggccctgagataaagcacgtgaagtgtttagcttggtactcggtgtcaggtcatgtccaattttattaggagcttatattccattctgtagcagcttgctatttttattttcttttactttttttttgagacagtcttgctctgtcgcccaggctggagttcagtggcgccatg

SEQ ID NO: 686429 - DNA, 1590 bp, Homo sapiens
tgcaccaatcagcactctgtgtctagctcagggtttgtaaatacaccaatcgacactgtgtatctagctaatctagtggggatgtggagaacttttgtgtctagctcagggattgtaaacgcaccaatcagcaccctgtcaaaacggaccaatcagctctctgtaaaacagaccaatgggctctctgtaaaatggaccaatcagcaggatgtgggtggggccagataagagaataaaagcaggctgccggagctagcggtagcaacccgtttggttatctttctgtgctgwggaaggtttgttctttcactctgcactattttgcaataaatattgctattgctcactttgggtttatattgcctttatgagctgtaacactcaccatgaaggtctgcagctttactcttgaagcttagcgagaccactaacccaccagaaggaagaaactccggacacgccgcctttaagaactgtaatactcagtgcgagggttcacggcttcattcttgaggttagtaagaccaagaatccacaaattccagacacaacatggtaatatatggggtcactatccttacagtgagggttaagctttaaatcatcacaatgaaagctttttgtttctctagcgtagcagcaagggagaataaggcctctggagtccaggacttgggttcaaatccaagctccaccgtagctgtgtgacctgggtttatcatttcgcctttttgaatttcggttttcattgaaataatgggaataacattagttcctatatcatggaaagtacctagcacggtccttggtgccttgtaaatgcttggaaaattatcctttctcctgtggtgatggttctaatagactgagttttatgagagcaagagtgggtgtctcccatccactgctttctttttgataccctgaactctgctgatggcagcaaacatttgctgaatcgttgttgaacaaggaatgaatgaacaccgggtttggaatcagggtctttttttgagacagagtctcactctgtctcccaggctggagtgtgggggctccatctcggctcactgcaagctccacctcggagtcacgccgttctcctgcctcagcctcccaagtagctggggctacaggcgcccaccaccatgcctggctgatttttttgtatttttagtagagaccgggtttcaccatgttagctaggatggtctcaatttcctgacctcgtgatctgcctgccttggcctcccagagtgctggaattacaggtgtgagccaccgcacccggccagggtctgtgtttcatttaccgactgtggggccaggccgtacaagacctctgagctccacagatgcaaagtgaagaagtcatggattggccccataagcatgtgacgatgagattaactgagaggccctgagataaagcacgtgaagtgtttagcttggtactcggtgtcaggtcatgtccaattttattaggagcttatattccattctgtagcagcttgctatttttattttcttttactttttttttgagacagtcttgctctgtcgcccaggctggagttcagtggcgccatg

SEQ ID NO: 686430 - DNA, 1824 bp, Homo sapiens
tggtccccacacaatgaattctgcatgaatcttaagataaatcgtttggataacttagcggcagctgtactcccctgctgccagctgcctcccagaatcattttgaggcgggtaaggggagaggaggagagtgtgggtgagtggtgggagggccaggagagagccaagtggtgccttttggactcctgcgctcaggcagcagggccaagcagggcatcgagctgagggtgaccagtgagtttcgccaagccttggtcccgcccagttgctgaggctagaaaggcacagggaggagccgcgatggaatctctgcctggccgaggaccccattcttgggtttctccccatgcttgctctgtgcttctcctaagaagcaaaccagcccagctagccctcagctcatgccccaccattttggaggtcagggttttcaaccagggggtactctccccaccaggagatgcttggcaatgtctggagatgatcgtgactgggaaggggtgtttctggcatcaagtgggtagaggccacagatgctgctaaatatcctacagtgtagaagacagccccggccaccccaacagcaaagaatgatctggcccggaataccagtcgtgctgaggctgagaagccctgccctcggggtgcctgccccaccttggcatttttggactcctcggaggcatctagtcttcctcccaacttaccctggggctaaaagtgagtcacccagggccctgggtgggggttgggagtcaggcttttgagcttcagagcatggcaacatcatcgtcatgactgtcgttgtgccaggcagggtcccggcgggaagcagatggtatccttgaggggttccagcaaaggcagtttactaaagaggccatttatagatttgtgagaagagttaaggaaaccagctcccctggtgtaggatccaggggccagcaagagtggggaggctttgccacctttaggtccaaagggacaaggaaaataagtggaggtatcggagcctggagccatggagagggagccacccaacaggaaccatggccctggtagaaacagctgctctcagaacagcagcagggagggagggagagggtggaatcagtacccccatcgctccctcctcctgccctcggtctcctgccagtgcctctgataggccaaacccaattagaaggcaggagacaaaagggcccagctgacacagcctggagaagtcacccttccaaggcacagagcagaggggagaagagagcatggtttggcagggcaatgggaggggacgatgggggagtccagtggagtgcagccagcacagtcatttccatcagyaccaacggaagctgcctacagggcagccccgggaactgctcctaggagctcaataagtggcacagtagttaaaacccatggaacaacccgtgaccaggaacatgagtgggtcagtacaaaatgccttttggaaaattctagagtcttccagcggtagagatagggttaaagtattaggattccctggggagccaacctcagtgagagcttgggtaagccaatggcatgctggggttcaatttacaaaaatgcagtttaagcccaaatttgcaggaacacatccattataaaaggaattccacttagagtgtccaaagaaacggaagtcaaccccagcctgtcagaagaatggacacagactggtgggattgcttctctggaaaggacttggtgatggttggatgtaggggtgagaaaaacaggagtcaagagtgaacacacgagcttcggtcctgaacagttgggtgactgtggtggtgcttc

SEQ ID NO: 686431 - DNA, 603 bp, Homo sapiens
ccgaccatacacaaagtttcatttttttccagtcatatccaaaaaaatttttgatcacaattgtccaattaaccagcattgttaatcagtgaagtcatttcaaaatattacacaacacatacttttttcaggcattataatagaaaactttaacacttcctattaccttgtcaacttgtttctgtcttaaaccatctgtgctwcctcccatgatagaataaacactgatacgcccatcaaacgaagcagctgataagacagcaggatttcggggacaccactgaatatcgaagcaccactgtgtgttggtgggaagttcatataacacctaggccaacaaaaaacaaacaacaaaactcagaaaatggtatggccactttgtaaccaaaacacctgaattaatgtggtcaacaagtatagttaaattgaatatttttttgtagaaagtatctttagccaggaaaaagaatactaagattttttaaagtgcaagaatgatccattacgatgacctattctgattaacaggaatgcagcttaaaatttcaatcagatttgaataaacgcattttaaaaactgaggcttttctgtgttcaaaataa

SEQ ID NO: 686432 - DNA, 603 bp, Homo sapiens
ccgaccatacacaaagtttcatttttttccagtcatatccaaaaaaatttttgatcacaattgtccaattaaccagcattgttaatcagtgaagtcatttcaaaatattacacaacacatacttttttcaggcattataatagaaaactttaacacttcctattaccttgtcaacttgtttctgtcttaaaccatctgtgctacctcccatgatagaataaacactgatacgcccatcaaacgaagcagctgataagacagcaggatttcggggacaccactgaatatcgaagcaccactgtgtgttggtgggaagttcatataacacctaggccaacaaaaaacaaacaacaaaactcagaaaatggtatggccactttgtaaccaaaacacctgaattaatgtggtcaacaagtatagytaaattgaatatttttttgtagaaagtatctttagccaggaaaaagaatactaagattttttaaagtgcaagaatgatccattacgatgacctattctgattaacaggaatgcagcttaaaatttcaatcagatttgaataaacgcattttaaaaactgaggcttttctgtgttcaaaataa

SEQ ID NO: 686433 - DNA, 642 bp, Homo sapiens
gctaggactacagaacacgccaccacacccagctaatttttgtatttgttgtggagatggggtttcaccagcctgccttgcctcccaaagtgctgagattacaggtctgagccaccacaagtggcccacgtgacatttaaaatgtttcattttattaaaaaatagaattaattgaaaaggtatttagcctgctcacgtctttggtatttattttgtttgataagatgtrtggtttgataaaacttagatgatttatctatcctttatttgcatttgaacaaattccaatttttatttatttatttattttttgagatggaatctcactctgtcacccaggctggagtgcagtggtgcgatctgggctcactgcaagctccgcctcccaggttcatcccattctcctgcctcagcctccctagtagctgggactacaggcgcccgccaccacgtccagctaatttttttgtattttttttttttttcagtagagacagggtttcatcgtgttagccaggatggtctcgatctcctgacctcgtgctctgcccgcctcagcctcccaaagtgctgggattacaggcctgagccactgcacccggccaacaaaatccaattttttagttgtagcatgtactaaaa

SEQ ID NO: 686434 - DNA, 642 bp, Homo sapiens
gctaggactacagaacacgccaccacacccagctaatttttgtatttgttgtggagatggggtttcaccagcctgccttgcctcccaaagtgctgagattacaggtctgagccaccacaagtggcccacgtgacatttaaaatgtttcattttattaaaaaatagaattaattgaaaaggtatttagcctgctcacgtctttggtatttattttgtttgataagatgtgtggtttgataaaacttagatgatttatctatcctttatttgcatttgaacaaattccaatttttatttatttatttattttttgagatggaatctcactctgtcacccaggctggagtgcagtggtgcgatctgggctcactgcaagctccgcctcccaggttcatcccattctcctgcctcagcctccctagtagctgggactacaggcgcccgccaccacgtccagctaatttttttgtattttttttttttttcagtagagacagggtttcatcgtgttagccaggatggtctcgatctcctgacctcgtgctctgcccgcctcrgcctcccaaagtgctgggattacaggcctgagccactgcacccggccaacaaaatccaattttttagttgtagcatgtactaaaa

SEQ ID NO: 686435 - DNA, 2052 bp, Homo sapiens
tggccttagtttattttaaacaacaaaacaaaaacaaatgtaaaactactaaattttattgaacagtcttaaacagtagtcttaaaagtaagatatttgaatattttctcaattcatgcagctatttgatacacacaaaaccattctgagtcagaataactgtataccaaaaatgagttttactatcaaaactatataagtttagagaaaacatttcattgtatttatttatttttttgagatggagtctcgctctgtcacccaggctggagtgcagtgtggcacgatctcagctcactgccacctccgcctcccaggttcaagcgattctcccgcttcagcttcccaatagctgggagtacaggcacacaccaccatgcctggctaattttttgtattttagtagagaaggggtttcaccatgttgcccaggatggtcttgaactactgagctcaggcaattcgcccacctcggcctcccaaagtgttaggattgagctactgcgcccggccagtagagaaaacattttatgcacatttaaaatactttcagaaaaacgaaaaacaaaaaacagataaaagattaacacatacaggctgggcgtggtggctcactcctgtaatcccagcactttgggaggccaaggcgggtggatcatgaggtcaggagtttgagaccagtctggccaacatggtaaaacccatctctactaaaaatacaaaaattcgccaggtatggtggcggacgctgtaatcccagctacttaggaggctgaggcaggagaattgcctgaacccaggaggcggaggttgcagtgccatgattgcgcccctacactccagactgggtgacagagtgagagtccctctcaaaaaaaaaaaaacccttaaaaaaattaacacacacacaagacacaaaaaaaccccatacttttcctctattttatcagaaaaatcaaggcaaaatatctgaagcaaaaactaccatttaaattttcatatggaataaattaasattattaggaactatctgcaagttcaaattctattaaatattccacaaaatgactaaaatgcttctggtatggtttattccattgaaacttctgttttaaaactcctgattcacttgaaaacaatactctgaagaagtgttctcccaaatagttttttgttgttattgttgtttttaaactacatatgtatgcctgacttttggcaaacttattttagaaaatgtcaaactatccaatgtactcataaacaaacaaacaaaaaaagctccaaattatatctaaattattttatggcatctaatgacataaaaaaataaagatacctaaaaggttcagaatttaatgtgctctatgggtaagtgccgaaaatatattagctcattttagcagtacctaatcagaggaagagatgaggccaagaagtcaaatattacaagttcacagtgatgaagcttccagcaggaaaaatttttacattctaagaaaagttaaagatgaattaaaaagttgctgcaatggccgggcacagaagctcatgcctgtaatcccagcactttgggaggccgaggcaggcagatcacgaggtcaggagtttgagaccagccagaccaacatggtgaaaccccatctctaccaaaaatacaaaaattagccgggcttgatggtgcatgcctgtaatctcagctactcggaaggctggggcaggagaagtgcttgaacccaggaggcagaggttgcagtgagccgagatcacgccactgtactccagcctgggcgacaaagcgagactccgtctcaagaaaaaaaaaaaaaaagttgctgcaatgttttaaaacagctagcaaagcaaaaccaccagtatatcatggaataagttccttgattaaccaatctctcttcatcattaataatatccaacatatttattgggaattttatgattttcccttagaggaaaaaaaacaaaacattccttctaacatgactgattaataaaaaaacaggatttgacttcacagaaatttgatttgttgtc

SEQ ID NO: 686436 - DNA, 1032 bp, Homo sapiens
gccatgatggcatccctatgcttggtattatttaccccacggaggagatgtgtgtattgcagaacactcatgtttagatcagccaagagaactgcttggaacaatcctagaagcaggcaaagctgcattttatgttcttcatatattatttgaaaattactagtggtcaagaaacattccaactgtttgaattctcctctccaaacaggaaaattctgtaaaattgtttttcatatatatatgtataacacacatacattttataacacatacatacacatataagcatatactaaatgagttagtaaatatacaacactttgaactgttgcctgggatataattactggcataattacatgtgctcgttattatttttctaaatcaaaggtctggttttcataggcttaaaaaataataaaattggatgttaatggtacaagttttgaaaatatttgatattgattcaggagatgaaactgtctagaaattactcttgtctattataattaagtccagagtcttattttcagagataagtacttgatccctacttttgtgtgtcaatttgaatttaattttttaatgcatgtcttttaatactrccctttattatagatgcagacgttaatgaagaatccagtcccatttgtacaaatgccaaggagtttaccctctattgaagggatgaaatgttggtagagcaaatgcaggtgtattattatgattacttttggatactttgtattaacaaattttcagacacattcctaaagattctggggggctggagcaagcaggcaaacagaggtccacatactctatgtgtaaatactaaaagtgatcaatcaagggtgctctccaccctttctgcttcttctggaagctaccaagattcctgggtgcccaaggatacctgttgggtggttgcaggggccacctaaccccaaatttccttgccaccattcccttcatcctctcagcatgacagctggtttcctacttttcctcttcttcccccttttttctgtc

SEQ ID NO: 686437 - DNA, 485 bp, Homo sapiens
cgttgcaaagttaaaaataatgaaaatcgtataagtgagttaaaagggctcatggctcagttgttcaagtagaagaaattatttgaatacacaattaaaatatgatatagaagctacaataaggagcaggaaaagtaaagrgcatcggaagattaaagatcacttggaaaaagcttcatagagaaaggaatatttaaaaggtaccatgattaggagttctgcagccagttcagaaggaacatagattccatataaaccaaatagcatgtgtggtggggtgacagagggaggcatttgatggctactccagttttgaattgctggaactaaagtggcacttgtgaagtaagaggagaataggctccacaggtgatatgggacaagctaatgaaaaagccagagtttgaatattatgtgtaggcaacaaggagctctgaatattttacaagcatgcagtgacacaattagcttcatgtttaagaaga

SEQ ID NO: 686438 - DNA, 529 bp, Homo sapiens
agaactataatctattttttaaaagttcaataattaaagtctccatgtgccagctgctgttgaaatgtaaaatgatgggtaaaaatatctcatagcaatgaaactaaaaagagagattgagaaaactctaggcccatattgttttactgggaaattctattaaacatttgaaaaggaaatagtaccagttctacatgattcatccagaaaattgagaaatactttccaactaattctacraagctaggattagtatgaaatcatgccaaagacattatgagtaaagaaatttacacaacaacagctctcatgaacatagaaacaaataagcttattaaaattatagaaaattctgttgaaaaatgtataaaaatgataatataactcaataaattggtgtttatttcagaaatacaatattggtgtaactaagttgaatcacattattcattgtattacaaagtaaaaacaaaaggcatgtgctcaccccaatagacactgaaggaacaattgacaaaattcaacatcc

SEQ ID NO: 686439 - DNA, 1356 bp, Homo sapiens
aatgtgagagccattgtgcattcccattcccattctgcttgctgcattattaacttaatgtgtaaagatggtctaaacccgggcatgtagttcctgacctactgtgtcagttacaactgagccacctagtggcttgataacattccaaacagagtcccccataatgaagtagaatctgcataattcgtatgcattccacagtgtgagaattgcttccctaaacatctatagccccctgggtcgaaagcatcttgaatcccacctggaaatgactacaaaactggtccataaggcatcaacagcagatgtcctgcattctccaaatgaaactctttctgatacctaaatctatgactaagaattatgtttcttccatttactatgcttttattctgtattgccaggaacagtatgttagtcagcagatgaagagctagatcactcctgctttcttatgtattagcaatagtttactttatccttagaggaatgcacaactgttgcattacttagaacaaaaagaaaattatatcaagcatttcttgctttcattctcctttagggggtgtttgatgaatgattcatagtcatgtatataatacactttgtggctctttatagaattggctattcaaagcataattcttctggtcatatattgtacatcatagagtttaattaaaagtgtatctgcttcactatgtagtaaatgatgcatgcacattactccacagtacatacatatttcatgttataattatgcatttcacartctaaagtatgcatttaattatacagaaaagttataccattttcaaacttggtaaacacagatggaaatggtaaacataattttttaggaaggagtgagggggatgtgaaaacatgggttctcaaacagttcatatttgaaaattaaacctccctcaccccaatcccttttatgtttatgatcattatacttctatctgaaagagcatatgtaatatatcaacaatatagactgttttggatgatgtccaaagtgataatattaaggatcataattttcatctattggaaatccaaattcattttctgttaagaggcatatattttaggcttgtgaaatttgaagtaaatactctgaaatgtgcctttcactgacttttgtattttgaagtttcctaaatgttcagttagtattattgccattactctatcaaaacctgatttctggaacgaacctagaatttggcatttacaaactagtgtaacctgaaattgactatgagtaaatttttcagagcatatccctgttaatatttttctactagaaaggctgtttttctttttttaatacctacattctataaa

SEQ ID NO: 686440 - DNA, 1356 bp, Homo sapiens
aatgtgagagccattgtgcattcccattcccattctgcttgctgcattattaacttaatgtgtaaagatggtctaaacccgggcatgtagttcctgacctactgtgtcagttacaactgagccacctagtggcttgataacattccaaacagagtcccccataatgaagtagaatctgcataattcgtatgcattccacagtgtgagaattgcttccctaaacatctatagccccctgggtcgaaagcatcttgaatcccacctggaaatgactacaaaactggtccataaggcatcaacagcagatgtcctgcattctccaaatgaaactctttctgatacctaaatctatgactaagaattatgtttcttccatttactatgcttttattctgtattgccaggaacagtatgttagtcagcagatgaagagctagatcactcctgctttcttatgtattagcaatagtttactttatccttagaggaatgcacaactgttgcattacttagaacaaaaagaaaattatatcaagcatttcttgctttcattctcctttagggggtgtttgatgaatgattcatagtcatgtatataatacactttgtggctctttatagaattggctattcaaagcataattcttctggtcatatattgtacatcatagagtttaattaaaagtgtatctgcttcactatgtagtaaatgatgcatgcacattactccacagtacatacatatttcatgttataattatgcatttcacagtctaaagtatgcatttaattatacagaaaagttataccattttcaaacttggtaaacacagatggaaatggtaaacataattttttaggaaggagtgagggggatgtgaaaacatgggttctcaaacagttcatatttgaaaattaaacctccctcaccccaatcccttttatgtttatgatcattatacttytatctgaaagagcatatgtaatatatcaacaatatagactgttttggatgatgtccaaagtgataatattaaggatcataattttcatctattggaaatccaaattcattttctgttaagaggcatatattttaggcttgtgaaatttgaagtaaatactctgaaatgtgcctttcactgacttttgtattttgaagtttcctaaatgttcagttagtattattgccattactctatcaaaacctgatttctggaacgaacctagaatttggcatttacaaactagtgtaacctgaaattgactatgagtaaatttttcagagcatatccctgttaatatttttctactagaaaggctgtttttctttttttaatacctacattctataaa

SEQ ID NO: 686441 - DNA, 1154 bp, Homo sapiens
actgtgcaattaattatttgtgacaagtcctgttaaggaggaggctgttttgctcagcattggtttggacagaaagatcataagtcaagattgtactcctgagtccgatagtggcacctttttttctctgcaaatactgtaatagctttacatcctgtgattctgtggagagtgcagagacatgatatattcaaaatgaatcaaactataaaattcacttatttctcacatgataactgttgctgccttcagtaataaaactgaattatgtatacagatctaaaaacaatctrtgagatatgagatcagtttctttcgatagccataggtaaacaatttgtgtgatcattgtttatagtaaacctgttaagattttattcgcttatgtttgaagcaaatttaaggcttaaaacaaacaaacaaaacaccacccaaactagaaactttaaaaaaaatgtaacttgcttatataagttgaatgtcccttctacaaaatgctttggaccagatgtgttttggattttggattttttcagattttgaaatactggcattatataatatacttactggttcagcatcgctaatccaaacatctgaaatttggaatgctccaatgagcgtttcctttgagtgtcatatctgtgataaaaaaatttcagattttagagtggtttggtttttggattttcagattagggatactaacctgtatttgcaaattttttctcatctgttaaattttattttaattttagactggtggataaagctaatttatttttaaacccttgttcattcattcaattttttttaactcggtgaatttattgcagaacaatttatatgccataaacagcatccttttaaagtatacattttgatgggttctgacaattctatacacctctgaaaccattgacgaatacagataaaagaacgttcctgtttcctcaaaagattcctgtgcttttttgcgccccccccctccccttcctggctgccagaaggaaccagagattacttttcgtcactgttaacttatttgctaaaatcatgtggtgtgcacttgtgtataagagtctttttgtgaccagcctgagcaacagagtgagaccctttttttcctttacaaaaaggaaaaaaaaatagct

SEQ ID NO: 686442 - DNA, 628 bp, Homo sapiens
ggtatttgacagtgatgccattacaaatattttaaattcagaactctgtaggtaaattatgtgcaatagccctttctttctaaatgacaactaatggacttctttgaatattatgtttggcataatatgrcagaactaacagtagtgattaaaaggcttatgtttgtatgtgacatctcctagaaggcttgaaataatttggccttgtgtgttaacattcagaaatcttagttatgcctaaatgtattaagctgcttatcatttcagctgaggtgtagtaatttttactttgggacatacagaaaagctatttgaaaagttactttcttatatcaactgaagcttttaaaaatgaatttgaatcgcttattataaagaatattttcttgcctctttttaataatgtagaatagtcataagcagtagcttcatttattgttggaaaaaatgtaattgcaaaaattaacttgtcatacaccatagctcagcaaagtcacttcttataagtctgtggtcacagtatgttttttgcagttcagcatctggctctgtgggatactgatggcttctaggaagcaaagtaccagggtgaacaattaaatgcaaaatgacagcataaaatatgctt

SEQ ID NO: 686443 - DNA, 1354 bp, Homo sapiens
tattattatattgttttcataaacttcacctcaagaggccgaagggggaccttcctttcctgtgtctttccctcacacctcacactccacaacctgcaccgacacacagataaactttcttttcaacattcccctacacttttcaagataaagctcatgttctcttctcagacacgacaaaaaaaaaattagcttccagaagcttacatctcaggaaattgttattcacaaagtgctttgaaatctccagcacgaaaaatacaaagaataaagtgtctgctgatgtacacatattaaaaacatatgccataatataagcccaaggatctcagatccacaaataatgcagaaggcagcatttaatttcctggtggagaggcttcccattattttcttcctctaactcccctttccatcaaagtgaagaataaacacaattgtcctacacaagcaaaatatagggagctaaagccattatttgagaacatttggaatctaaatgtagataaacgtataaacttacaggacctttgcaatcgtgatcaactgtggttaagaattggtggttctgaatgttagaaaagtgctcagtactgcaaagggccatgctcacggcagatctcaactgtagatctgctcaattaacttttttttaaatttaagtaacatatatataacataacatttacattttaagtgtacaattcagtcatattaaacatgttcacattgtagtgcaatctccagaacattttcacctggaaaattgaaattctgtactcgttaaacaataacctcctacttccattttcttccagcctctgggatcacccattcttttctgtctctataaattttactactccagatacttcacataagtggaatcatatgatattggtctttttgtgactggtatatttcacttagcataatgccttcaggttcacccatgtgataacacgcatcaaaagttccttcatttttaaggctgaataatattcagctgtaggtatgtgccacctttttgtttatccaytcatttgtccacggacacttgggtgattcccaccttttggctattataaatactacttctatgaacatgggtgtgcaaatatcgctttgggaccctgttttcaattcttttgggcatataccaacaaggagaattgctggattatatggtaattctatttttaattatttgaggagctgttgaactgctttccatagtgactgtaccactaggaatctggctagtttttcaaatgataatttcccattctttcattattaaaataatatttttacgtatcatttatagagactaattgttttgtgaattatgtac

SEQ ID NO: 686444 - DNA, 555 bp, Homo sapiens
cggacgcgcgccaggcttccaccctgaagacgcgcgcgtcccaggccagaagtgaaaaatctatgggtagaaaattataaacagtgatgaaagaagtggaaaggttacacaaaaaagtaaaggctacccatctttatgggtgggaaaaattaatattgtgtatatgatcatactaccaaatgcaatgtacatattcaacacattctctttcaaaatatcaaaagacattattcacagaaatagaaaaaaatgaatcctacggctgggtgcggtggcttgtgcctgtaattccagcactttgggaggccaagatgggcggatcacctgagctcaggaatttgagaccaacctgggcaacatggcaaaacccatccctacaaaaaatacaaaaattagccaggtgcggtggcatgcacctgtggtcctagctactsaggagactgaggcaggtgaatcgcttgagcctgggaggcagaggttgcagtgagctgaaatcgcactactgcactccaacctgggcaatagagaccttgtctaaaaaaaaaaaaaaaaaaa

SEQ ID NO: 686445 - DNA, 650 bp, Homo sapiens
cacctgaggttgggagttcgagaccagcctgaccaacatggagaaatcctgtgtcttctaaaaatacaaaattagccgggcgtggtgcgcatgcctgtaatcccagttactcgggaggctgaggcaggagaattgcttgaacccaggagttggaagktgcggtgagcagagatcgggccattgccatccagcctgggcaacaagagtgaaattccgtctccaaaaaaacaaaacaaaaaccaaaacaaaaaaaagaaaacacacacacgcacaaaacaaaaacaaactttttttttttaagttgctgaaggggtatcatttcttgagttaaataatacaggattttttttttaatctgtaattgatgtacatttaagaagacactgtttacatcaggtcaccacaaagtagatttacatataaccatcaactgcagaaaaacaaagtttctttgtgatccaaacacaaagaaatgctttttttaaatgatctcttctttgatcataaaaaaaaatgcagtacttttagaaggtaaagctagtaagtttacagaagtgtaaaacaccaaaacactttaagcaaaaactctttgtttttaagaaaaaggtatgacttctcgttttctgttcttggcataaattttaattctt

SEQ ID NO: 686446 - DNA, 650 bp, Homo sapiens
cacctgaggttgggagttcgagaccagcctgaccaacatggagaaatcctgtgtcttctaaaaatacaaaattagccgggcgtggtgcgcatgcctgtaatcccagttactcgggaggctgaggcaggagaattgcttgaacccaggagttggaagttgcggtgagcagagatcgggccattgccatccagcctgggcaacaagagtgaaattccgtctccaaaaaaacaaaacaaaaacmaaaacaaaaaaaagaaaacacacacacgcacaaaacaaaaacaaactttttttttttaagttgctgaaggggtatcatttcttgagttaaataatacaggattttttttttaatctgtaattgatgtacatttaagaagacactgtttacatcaggtcaccacaaagtagatttacatataaccatcaactgcagaaaaacaaagtttctttgtgatccaaacacaaagaaatgctttttttaaatgatctcttctttgatcataaaaaaaaatgcagtacttttagaaggtaaagctagtaagtttacagaagtgtaaaacaccaaaacactttaagcaaaaactctttgtttttaagaaaaaggtatgacttctcgttttctgttcttggcataaattttaattctt

SEQ ID NO: 686447 - DNA, 650 bp, Homo sapiens
cacctgaggttgggagttcgagaccagcctgaccaacatggagaaatcctgtgtcttctaaaaatacaaaattagccgggcgtggtgcgcatgcctgtaatcccagttactcgggaggctgaggcaggagaattgcttgaacccaggagttggaagttgcggtgagcagagatcgggccattgccatccagcctgggcaacaagagtgaaattccgtctccaaaaaaacaaaacaaaaaccaaamcaaaaaaaagaaaacacacacacgcacaaaacaaaaacaaactttttttttttaagttgctgaaggggtatcatttcttgagttaaataatacaggattttttttttaatctgtaattgatgtacatttaagaagacactgtttacatcaggtcaccacaaagtagatttacatataaccatcaactgcagaaaaacaaagtttctttgtgatccaaacacaaagaaatgctttttttaaatgatctcttctttgatcataaaaaaaaatgcagtacttttagaaggtaaagctagtaagtttacagaagtgtaaaacaccaaaacactttaagcaaaaactctttgtttttaagaaaaaggtatgacttctcgttttctgttcttggcataaattttaattctt

SEQ ID NO: 686448 - DNA, 650 bp, Homo sapiens
cacctgaggttgggagttcgagaccagcctgaccaacatggagaaatcctgtgtcttctaaaaatacaaaattagccgggcgtggtgcgcatgcctgtaatcccagttactcgggaggctgaggcaggagaattgcttgaacccaggagttggaagttgcggtgagcagagatcgggccattgccatccagcctgggcaacaagagtgaaattccgtctccaaaaaaacaaaacaaaaaccaaaamaaaaaaaagaaaacacacacacgcacaaaacaaaaacaaactttttttttttaagttgctgaaggggtatcatttcttgagttaaataatacaggattttttttttaatctgtaattgatgtacatttaagaagacactgtttacatcaggtcaccacaaagtagatttacatataaccatcaactgcagaaaaacaaagtttctttgtgatccaaacacaaagaaatgctttttttaaatgatctcttctttgatcataaaaaaaaatgcagtacttttagaaggtaaagctagtaagtttacagaagtgtaaaacaccaaaacactttaagcaaaaactctttgtttttaagaaaaaggtatgacttctcgttttctgttcttggcataaattttaattctt

SEQ ID NO: 686449 - DNA, 650 bp, Homo sapiens
cacctgaggttgggagttcgagaccagcctgaccaacatggagaaatcctgtgtcttctaaaaatacaaaattagccgggcgtggtgcgcatgcctgtaatcccagttactcgggaggctgaggcaggagaattgcttgaacccaggagttggaagttgcggtgagcagagatcgggccattgccatccagcctgggcaacaagagtgaaattccgtctccaaaaaaacaaaacaaaaaccaaaacaaaaaaaagaaaacacacacacgcacaaaacaaaaacaaactttttttttttaagttgctgaaggggtatcatttcttgagttaaataatacaggattttttttttaatctgtaattgatgtacatttaagaagacactgtttacatcaggtcaccacaaagtagatttacawataaccatcaactgcagaaaaacaaagtttctttgtgatccaaacacaaagaaatgctttttttaaatgatctcttctttgatcataaaaaaaaatgcagtacttttagaaggtaaagctagtaagtttacagaagtgtaaaacaccaaaacactttaagcaaaaactctttgtttttaagaaaaaggtatgacttctcgttttctgttcttggcataaattttaattctt

SEQ ID NO: 686450 - DNA, 633 bp, Homo sapiens
tcttatatttttaagtaaaatttaggtaatcagattttaattctatatctgctgaaaatgttttttagaatcaactgaatttaggagaataggatcagttaaatcatatgattcaagaaacaaccataaaaaaacttaccgtaaaaagaagtttaattttcctgaaagatacatttctttaatatctcagagctatgttatgtggcagccttgatgayagaggaagttattgcctaacaccacaatatcctaaaagataaacaacatattaacttgttcgaaaacatattttaggcttcggtgctaaagggatatttctaaatatagcaaatctacctccgcattataattagttcaattttgttataatgttaacactagaatttctttgtaataaataccccatgactactttactagtccctccagattacaaaaaatcttcaaaatagcacattatgtaggaaatgcttcacctgtgaatatgtgaggcaaattgttctacatacacgaaaacctcctggtttcagttcctatgtcctccctcacctatctctgcttttcacctcctacaaacttgcatgcatctccactcccacccatgccacatagaagtctttctagctcaaggaa

SEQ ID NO: 686451 - DNA, 633 bp, Homo sapiens
tcttatatttttaagtaaaatttaggtaatcagattttaattctatatctgctgaaaatgttttttagaatcaactgaatttaggagaataggatcagttaaatcatatgattcaagaaacaaccataaaaaaacttaccgtaaaaagaagtttaattttcctgaaagatacatttctttaatatctcagagctatgttatgtggcagccttgatgacagaggaagttattgcctaacaccacaatatcctaaaagataaacaacatattaacttgttcgaaaacatattttaggcttcggtgctaaagggatatttctaaatatagcaaatctacctccrcattataattagttcaattttgttataatgttaacactagaatttctttgtaataaataccccatgactactttactagtccctccagattacaaaaaatcttcaaaatagcacattatgtaggaaatgcttcacctgtgaatatgtgaggcaaattgttctacatacacgaaaacctcctggtttcagttcctatgtcctccctcacctatctctgcttttcacctcctacaaacttgcatgcatctccactcccacccatgccacatagaagtctttctagctcaaggaa

SEQ ID NO: 686452 - DNA, 1474 bp, Homo sapiens
tgtgctgaaaacataacatccaacaggttagtctttctaaaaagagttcccctgatcaaatagatttgggcaaatgtgcatgctctaggtctctcggataatggacatcacaatattaaatgttctgaaaagtctggaagtaataaaacttaaacttcacttgaaccctgaaaggcagtgacttaaccaaaatgatccctgttgataaaaaaaaaaaaggaagagaatttacttctattttaaattttcattaaaagtgttgtgactcctcttattgacttgatacaataggattatggaaaaataactttgaagaagttgagagatacccttagctcctcttttttactgatacttaccatgtaggaaccagtctataaacactggttaatgtctggattcttgtacataggcagtgaactgcacttggatgtaaatcttaatttcctcatatctaaatttcaagatcattccagtttatatactcatatattcagaagggaagtctagtttccatacctactsacttctcccactataacagctgggcttgacttctgaaatgttcctctgtcttcctcctagaaaactcatatgatgtcctcagtaaacttctcaataaacttttctgttgttgtcccccccaaaactccaatgctttcttttgttgttcatttgccttgatctttctgcagcattacctgtggctcttctcttctctttttagctgaatccttccttatttattttccatatccaggatgggtaattgaaataaagtgagatttgatttaaattatagaacaaggcagtgtcattcttttgctgaactgaaaattgcaatggaaaatctttcttgcaactttttctttttggtatggatctctcttaaatgtgaggttaagacccaggaaacctggaattcaaccctaggccttgctattaagcagtaacatgatcttgaataaaaatcaattcctggccctttgttttttatcatctatggaatgaaggagagaaactttagaatatctatacgtctttcttttactgacatcctgaatgctcagaaaatgcttcttcaccatatttatgtgactttatcaaaatatttgtctcagagcctacataacaacactattttaaagaaaaaatcttaaaatggatagcctagtgtttaactgtgcagaccttcacaccagaatgcctgagttcaaattctactcccaccatttcgtgtctgtgtgatgttggaaaaatcacttaacttgtccgtgcttcagtttcctcatctgaaaaaaaaagaaaaagaaaaaaaaaaaagatacagcagcagtttctccctcagagagttttgaagattaaagaaattaataaacggaaagcactcagaatgctgctgggtatatagggaatgctatgtacatgtggtctttattattaatggatcttgacagtggttgaaaacaaagta

SEQ ID NO: 686453 - DNA, 1474 bp, Homo sapiens
tgtgctgaaaacataacatccaacaggttagtctttctaaaaagagttcccctgatcaaatagatttgggcaaatgtgcatgctctaggtctctcggataatggacatcacaatattaaatgttctgaaaagtctggaagtaataaaacttaaacttcacttgaaccctgaaaggcagtgacttaaccaaaatgatccctgttgataaaaaaaaaaaaggaagagaatttacttctattttaaattttcattaaaagtgttgtgactcctcttattgacttgatacaataggattatggaaaaataactttgaagaagttgagagatacccttagctcctcttttttactgatacttaccatgtaggaaccagtctataaacactggttaatgtctggattcttgtacataggcagtgaactgcacttggatgtaaatcttaatttcctcatatctaaatttcaagatcattccagtttatatactcatatattcagaagggaagtctagtttccatacctactcacttctcccactataacagctgggcttgacttctgaaatgttcctctgtcttcctcctagaaaactcatatgatgtcctcagtaaacttctcaataaacttttctgttgttgtcccccccaaaactccaatgctttcttttgttgttcatttgccttgatctttctgcagcattacctgtggctcttctcttctctttttagctgaatccttccttatttattttccatatccaggatgggtaattgaaataaagtgagatttgatttaaattatagaacaaggcagtgtcattcttttgctgaactgaaaattgcaatggaaaatctttcttgcaactttttctttttggtatggatctctcttaaatgtgaggttaagacccaggaaacctggaattcaaccctaggccttgctattaagcagtaacatgatcttgaataaaaatcaattcctggccctttgttttttatcatctatggaatgaaggagagaaactttagaatatctatacgtctttcttttactgacatcctgaatgctcagaaaatgcttcttcaccatatttatgtgactttatcaaaatatttgtctcagagcctacataacaacactattttaaagaaaaaatcttaaaatggatagcctagtgtttaactgtgcagaccttcacaccagaatgcctgagttcaaattctactcccaccatttygtgtctgtgtgatgttggaaaaatcacttaacttgtccgtgcttcagtttcctcatctgaaaaaaaaagaaaaagaaaaaaaaaaaagatacagcagcagtttctccctcagagagttttgaagattaaagaaattaataaacggaaagcactcagaatgctgctgggtatatagggaatgctatgtacatgtggtctttattattaatggatcttgacagtggttgaaaacaaagta

SEQ ID NO: 686454 - DNA, 606 bp, Homo sapiens
ccagctctaccacttcccagctgtgtgacctagggaaagtcgtttaccctctctgagccttgctttcctcctacgtaaactatctataatatcaaaacctcgcagggctaaaaagatacgctgacttaaccagtgcaaagacacagttcagaatagttagcagttaataaaaggtagcggttacccacatcatttcatgcgaactcctacaacgacttttcatacattcattcacagatatttactgagtgccaagtacatcttaggtgctggggacatgtctgtgaataagacagacagatgcctgctcctatcgagcttatattttaatagcatgagacagacaaccatcctaccaacaactcaataaacagattctatcacaatgttgggcawctgttatctatttttatctattttatttttataatttcaacttttattttagattctggggatcctgtgcaggttagttgcatgtgtgtattgtgtgatgctgaagtatggagtatgattgaccacttcacccaggtagtgagcgtagtacccaatggttagttttctaacccttgtccccctctagaagttctcggtgtctactgtcac

SEQ ID NO: 686455 - DNA, 646 bp, Homo sapiens
aagttcttcttcattgccgcaggtgggtgggtcactacctcttcctttaaggggtattcccattaaggcttttcacttcagaggagtttgacaaggcgagactgggatttccacactgtctactaaatcaaagtcattgccatcatgcaactttctgctaactttcccagcttcaagggaaaagtggagcttcatggagctccacttcatcatctgttggcttcacatcatcccatcagagacaagctccatataacagcatctactgtttacccaagattttgcacgattctcttgtttcatcctcccatttatctttggtggagatattatccgatgagatagaaaagtaaactgtggcacagaaagggggttacatgactcaggcaaagtcgcccaggaagcaaggggcaaggctgggatccatccyaggtctgattctgaagcttgtactcttcactttacagcctcatctatgcacagggaagatcctcctgagctctgcaagtgtccaaacttagaatgggcaaccaaggctgactgtgaacatttccttcctggttgggctttaggaagagaagcgaaatttgcctattacctctacacacctcctgagaccaggagaatcctgggtgacaccaggcat

SEQ ID NO: 686456 - DNA, 1204 bp, Homo sapiens
tttatctcgctttcgagtattggggtttcttttgtgtagagggtgtcagcctaccttgcacgtagtagtagttactcaacaaacagccgaaggctggaatgaataccgtatacaggttagacattggagaaacgacgaatacctgttagccctcgatcaagtgcagggggtcgatattcaccactcagatgccccagggagtaccgtcctagccaatgtccctcttttctttccgataatttgtatcggaaagaagcatttagcagtctcaatgaatgaaaaaaaactgaaggcgccccagtaagagtacgaaaagaaaaggagtaattagagaagtgaatgaccaagaagggcctggacagctgggggtgagggtgacaggggaaagggtgtggacagctgggtgtgggggtgactggggaaagggatgcccaggagtgggccgctccctagtcaaaggagggggcgcgggagggagtgagaaaaaaatgacgtgtctttttggaccggcaacagctacggaggttggccrcggcattgcccgcatccctatcctccacccgtccctggcgagtcactcacccagaagccaggctacgtagggccgcccccaaggccgccgagtttcgattccttagtgtttggaaacggaccgaaaacaaaccgggtcgccaggggtcaccacgggcttccggtttcttcgaagacaccgccgcttccacagcgaagggagctgctccgggcacgtcgcggagggagtcccatttcttctgactcggcaggagcccgggacgttctggaaggagggacgagccgaggcaggaggggccgggccgacgcgagagaaggcccgttacccagcaatacgcgcgcgagacccaggcccgccgtcgggaccagcacgggccggagggaggggaagcactccggaaagtgattggaagtgtggatgagctctcagccggaaaaggggctgccgctgtccgcgggctcggcgccagggacgcgcgaggaaaccggaagtcaggcccgagggagctgggagggcgttagcgaagccaggttcggtcgtgggggtggggaagtgcaggagtggcgcgcggcgtactacatgtcccgtgagcctccgcggcgggacggggcggggccgcgggacccaggaggcggaggcggagtggagttaggtaagagcgttaccagccgt

SEQ ID NO: 686457 - DNA, 1259 bp, Homo sapiens
ttcctcacaacagtgcttggtttgcatagttccatccccattttacatatgaggaaactagattatcattccaccacccagctagttaaaagcttcatcaagacattatagatgataatcaatggcatgggatctggaacctgacagagatgtactcaacttccaggccttctatttactggttatatgacttaagacaagctagtatgtaaaatatgaacccagataggctttacaactcaacatcctatgacacaatatcagaatgctaaggaatacatgaggaaaacaaggaagacagaaatacatacatactttactttgacaaataagatatttcaccgttgtgagtctatctccactctccactctacgtaattatcatagaatctaaaaatacttaaaagaagcaacccactcaatgagtgacacgttggttgtttggtgtcttatttgtttttaatatctagacatgtgctgcctccttgttaaagcaatatgaggcarctcacaataaaattcaccgctgtggtgatgctctcgtgcacttcttctctcctcaagctttggtttttatgtgcttggaatgcccttttccccaccccgtaccaccagaaagagatagagcaggaactaaagataggtgtgaatgcccacacatatctagaaggatatctactaaaactgttcatgagaatccctgaaaaatgatgagtttttactttctatattgttagatttcttataatcaatatgtttaacttctctctatacactttaaattacatttttccatcttcctgatgatacctccaaagacactgattcagcagggaagggtccaggattttgatcttccaaaatctcccagagactctattaagcagtcagttttgggtaccatggttgaaataactgattccagtagaagtagcaagtgaaattttgctttttaggaaaagtttcaactctattaaacaattatttaaaaaattatttccttttattttgtaatagtttgattccactgcaaatatacattctctaagtttattagatttgaattacctctgagaattataatagcttggccagccattttaagttatccatttttgaacaaagggcctaaacaatcattgtaaaacatatgtttgttaggcaaatttcacaaaccatttaaaaattaaggcaaacaagaaatatataaatacaaatatcagggttttttaattctaaatttttaacactaacttaaa

SEQ ID NO: 686458 - DNA, 1199 bp, Homo sapiens
tgtaatcccagcactttgggaggctgaggtgagtggatcacgaggtcaggtgttcaagaccaacctggccaacataatgaaactccatctctactaaaaatacaaaaaattagccaggcatggtggtgggtgcctataatcccagctacttgggaggctaaggcaggagaatcccttgaaactgggaggtggaggttgccgtgagccgagatggtgccactgcactcagccctggcaacagtgcgagactccgaattgaaaaaaaaaaaaaagctattgtttaatttctagttctttccatcactcactattttctgctttattggatagtagggtgtttctggctttgtagaccttaattttttccattgcccctactcaactaaatttattcaatcaaaataatttatcttaaatctcacccactccttggatttaaaaggcccctaaactaatccattcacatgggtacactagcagtatytctacctccaaccataaggctgaatcatggtggttttctattacgctgttgagctgtgtctatgatgtgtttagagaattatgagaaaattcttttttcaagttctccaagttattaatgagaaaaaaagatgagctatttcttaaattaaatatttaattgttgcacaattctagcaaatgaattagtcatactcatgtatagaatgccttttttttaaaaaaaaaaaagccctgagagttagtatgacataagccagagcaggaaaaatacttttttaaaaagttcttcttcttattattatttatttatttatttatttatttatttatttattttaaattctaattgacagaaaataattgtatataattctgggtccatgtgatgttttgatatatgtatacattgtaaaattattaaaccaagtgaatacacatatgctttcaaaatggatgaagcaaaatgaagcagttaaaaatcctggtactagaagtttatgtagatgagtttagtttttccacggttgttcaatctcagaaaaagaaaatagctcatattggtgctaagagtacatgacctgaagtatgccagctggaaaaaccttcctttagaggttattgacctaaatttcaaaattggagttccattttgagacaacttacagacatttgatcccctattaaaataaaatccatcctatttccatcttcat

SEQ ID NO: 686459 - DNA, 2499 bp, Homo sapiens
gcatttttttaactttcttctgatttggaaatataagaaccacaatgatcaattttgtctctcagataaaaagatcaccaaaataattttaaaataatattatattgacagtaaataaataaatgtttacaaataaattcattgtttcagttaaactctttaattctaattccaccatgatcttctattatctccccaagttagtgttggggtggatagggagtgaggtgggagagaattgtctccatctgtgtaatcactgttgacctcacaaaatgtggagggagagagagaaagtggaggaagcaggttcatgtaattcatgaaattaatatcattcataactttccttaaacaattcctttttatgattttcaactccaaaaaatacataaatttgatcatctcatttctatcgctagtgccccactgtctatagggagtcacagcccgaattacagaccccaggagggttaggctgtacctccctctcctatccatagccagggctgcagcagttttaaaacatctgcctggctgcttcaggccctctcacattttcctgcgtctccacagagtagaactattcaagacatctacctttcctaggaaggcttctagccctcacaagcactccctcttctctgcatccttgccagacctctgttattccacagatcatgttgcaagacaaatgtttatttcctgtcacttaatttcagaccgctgaagggaaaaaaaagagtggaaaatgaatcatctgtgtatccttgtgatcaactgcagtgtcctgtataacccaataatactaaaagaatgaagatagcaagtttatgatctacctcacttcacaattaagctgatatgatctaaaccaaacatttattaataattgaaatgtcagtagtcaaagatataaataacactcaaatgtgaagggtaaatgataaaaggaagcaggtcattgatagagagggcacaacgcttctcctgcctttggtcccatatccactgtgatctcccccttagctttttttcttctttgttacccctcagaacagtgtaatactgtgttttcatgtgaccctgagccttcactgagccactggtgagcactgtgttagaagcctcttcctagactctatcatcacctggctatgcattcaccaccactgagtaaggcaactcttggaaccaaaaaccctgagaaataagtcataatataacctttcaattgtattaagtcctcttcacactttattcagatgttgaagaaatcaaaaaacctagagtctgaaaaagtgacactaggacttagagactttcatccctagacttagagagtgatatggtatccccaagcctcctgtgtgatccaacaaggcagattcatattctagttctccatgcaggaggactcagcagggaggcttcatctgacagcctggtacacttttggttacctttgtcctctaaatcttacctgtaggtgtaaaaacaaaggtcttatacattttctcagaagtctgtatccacgtgttctctgcctgaatgtattttctcagtctggccctagatcctcacctctcattctgtctcttgactagctggatggtagaatagattcagctttgtgtgaagcgccatgaacagcctaaccctaaacaccccgctcacataagctcctccaattatgtggaccagggcaatttctaaataatctctgggcttacacatcaccaccacatcagtgaccaatcaaggctatgccacatttcccagacaacacattctgtagttctctattaccttgtcttgcctgattatctgtaacatccacattggcttggaagctctgttccctttgctttctatgtctctttctgctgaatgtgattttattattttgtgcatttaagcaactctgacccttcttgattctctgtggggtgcagaagcaccaccaatgcctcccttcactaccaagagcatagacctcgcaccttgactactcttgtgattgtgattcaccaaactttgacatttactcagttaaccctcaattgtctgagcttagggaaagtgtgggagtatggtaaatatgctcctttacatcagttctttcttttcctgtatatacatactttcttttttactgtgataaaatacatgtggccagatgctgtggctcactcctgtaatcccagcagtttgggaggccaaggcgggcagatcacttgaggtcaagacttcgagaccagcccggttaacatggcaaaaccctgtctctactaaaaagacaaaaaaaaattagccagatgtcgtggtgcacacctaaaatcccagctacttgggaagctgtggcaggagaatcgcttgaacccaggaagcggaggttgcagtgagctgagacagcaccrctgcactccagcctgggcaacaacaacactcagcctaatatataaatatatatattttacatatatatgtgtatatata

SEQ ID NO: 686460 - DNA, 2499 bp, Homo sapiens
gcatttttttaactttcttctgatttggaaatataagaaccacaatgatcaattttgtctctcagataaaaagatcaccaaaataattttaaaataatattatattgacagtaaataaataaatgtttacaaataaattcattgtttcagttaaactctttaattctaattccaccatgatcttctattatctccccaagttagtgttggggtggatagggagtgaggtgggagagaattgtctccatctgtgtaatcactgttgacctcacaaaatgtggagggagagagagaaagtggaggaagcaggttcatgtaattcatgaaattaatatcattcataactttccttaaacaattcctttttatgattttcaactccaaaaaatacataaatttgatcatctcatttctatcgctagtgccccactgtctatagggagtcacagcccgaattacagaccccaggagggttaggctgtacctccctctcctatccatagccagggctgcagcagttttaaaacatctgcctggctgcttcaggccctctcacattttcctgcgtctccacagagtagaactattcaagacatctacctttcctaggaaggcttctagccctcacaagcactccctcttctctgcatccttgccagacctctgttattccacagatcatgttgcaagacaaatgtttatttcctgtcacttaatttcagaccgctgaagggaaaaaaaagagtggaaaatgaatcatctgtgtatccttgtgatcaactgcagtgtcctgtataacccaataatactaaaagaatgaagatagcaagtttatgatctacctcacttcacaattaagctgatatgatctaaaccaaacatttattaataattgaaatgtcagtagtcaaagatataaataacactcaaatgtgaagggtaaatgataaaaggaagcaggtcattgatagagagggcacaacgcttctcctgcctttggtcccatatccactgtgatctcccccttagctttttttcttctttgttacccctcagaacagtgtaatactgtgttttcatgtgaccctgagccttcactgagccactggtgagcactgtgttagaagcctcttcctagactctatcatcacctggctatgcattcaccaccactgagtaaggcaactcttggaaccaaaaaccctgagaaataagtcataatataacctttcaattgtattaagtcctcttcacactttattcagatgttgaagaaatcaaaaaacctagagtctgaaaaagtgacactaggacttagagactttcatccctagacttagagagtgatatggtatccccaagcctcctgtgtgatccaacaaggcagattcatattctagttctccatgcaggaggactcagcagggaggcttcatctgacagcctggtacacttttggttacctttgtcctctaaatcttacctgtaggtgtaaaaacaaaggtcttatacattttctcagaagtctgtatccacgtgttctctgcctgaatgtattttctcagtctggccctagatcctcacctctcattctgtctcttgactagctggatggtagaatagattcagctttgtgtgaagcgccatgaacagcctaaccctaaacaccccgctcacataagctcctccaattatgtggaccagggcaatttctaaataatctctgggcttacacatcaccaccacatcagtgaccaatcaaggctatgccacatttcccagacaacacattctgtagttctctattaccttgtcttgcctgattatctgtaacatccacattggcttggaagctctgttccctttgctttctatgtctctttctgctgaatgtgattttattattttgtgcatttaagcaactctgacccttcttgattctctgtggggtgcagaagcaccaccaatgcctcccttcactaccaagagcatagacctcgcaccttgactactcttgtgattgtgattcaccaaactttgacatttactcagttaaccctcaattgtctgagcttagggaaagtgtgggagtatggtaaatatgctcctttacatcagttctttcttttcctgtatatacatactttcttttttactgtgataaaatacatgtggccagatgctgtggctcactcctgtaatcccagcagtttgggaggccaaggcgggcagatcacttgaggtcaagacttcgagaccagcccggttaacatggcaaaaccctgtctctactaaaaagacaaaaaaaaattagccagatgtcgtggtgcacacctaaaatcccagctacttgggaagctgtggcaggagaatcgcttgaacccaggaagcggaggttgcagtgagctgagacagcaccactgcactccagcctgggcaacaacaacactcagcctaatatataaatatatatattttacatatatatgtgtrtatata

SEQ ID NO: 686461 - DNA, 559 bp, Homo sapiens
gcggttcccgccaaatttcccgcgggcgccctggaccccccccggcgcggaccgaaccatcggggcagagcacggggggagggargggacgggcgcatggcgctggtgggcgcgggcaccggcttggccgcgcatgcgccgacgtgcgggcgtggatcatccgccgggcgccgtcgtgcgtgggactttagcgcggtctccggatcccgcgtgtggctcccacttttcagggcgtgtcagtggggccgctggcttcagggtcagaatgagcgcaatccaggcaaacagcagcgcgcgcctgacaaaaccccggcgctgcccgggggagccgaggacgcgcggcctggggggctgcaggctcgagctggtaaaggcgcttcccccgcgggccgcacgctccttatttctttttttaaaactatttctggctgggcgcggtggctcacgcctgtaatcccagtactttgggaggccgaggcgggcggatcatgaggtcaggagatcgagaccatcctggctaacacggtgaaaccccgtctctactaaaaatacaaaaaat

SEQ ID NO: 686462 - DNA, 559 bp, Homo sapiens
gcggttcccgccaaatttcccgcgggcgccctggaccccccccggcgcggaccgaaccatcggggcagagcacggggggagggaagggacgggcgcatggcgctggtgggcgcgggcaccggcttggccgcgcatgcgccgacgtgcgggcgtggatcatccgccgggcgccgtcgtgcgtgggactttagcgcggtctccggatcccgcgtgtggctcccacttttcagggcgtgtcagtggggccgctggcttcagggtcagaatgagcgcaatccaggcaaacagcagcgcgcgcctgacaaaaccccggcgctgcccgggggagccgaggacgcgcggcctggggggctgcaggctcgagctggtaaaggcgcttcccccgcgggccgcrcgctccttatttctttttttaaaactatttctggctgggcgcggtggctcacgcctgtaatcccagtactttgggaggccgaggcgggcggatcatgaggtcaggagatcgagaccatcctggctaacacggtgaaaccccgtctctactaaaaatacaaaaaat

SEQ ID NO: 686463 - DNA, 559 bp, Homo sapiens
gcggttcccgccaaatttcccgcgggcgccctggaccccccccggcgcggaccgaaccatcggggcagagcacggggggagggaagggacgggcgcatggcgctggtgggcgcgggcaccggcttggccgcgcatgcgccgacgtgcgggcgtggatcatccgccgggcgccgtcgtgcgtgggactttagcgcggtctccggatcccgcgtgtggctcccacttttcagggcgtgtcagtggggccgctggcttcagggtcagaatgagcgcaatccaggcaaacagcagcgcgcgcctgacaaaaccccggcgctgcccgggggagccgaggacgcgcggcctggggggctgcaggctcgagctggtaaaggcgcttcccccgcgggccgcacgctccttatttctttttttaaaactatwtctggctgggcgcggtggctcacgcctgtaatcccagtactttgggaggccgaggcgggcggatcatgaggtcaggagatcgagaccatcctggctaacacggtgaaaccccgtctctactaaaaatacaaaaaat

SEQ ID NO: 686464 - DNA, 790 bp, Homo sapiens
cgagcaccgtgaggaccacaggaggtgctgggtgggaaggcactggctccggctacgtggctgtctccccccgaaacgtggtccaggggactcggcatctgtgttcagtcctcccaaatgtgccctttggtgatctggccccaccaygtgccctcagggtgcagagtggcctgggccctgggcctctccttcgggactcacgacaggcatgggtaatggatcacaatgcttttcctgctgagcacagaggaagcctcagcgtcccccacaggacagtgaccccagcagacacagtggacacagcagcctgggaagtgcattcaccttcgaggctggttcatggcgtctcatgttatttgtggaaaataaatatccattggcaattgatgcttttgtaaaagtaaaaaagtacgagtatgcagtggaaatctccagtgctgagtatcagttactatggagtgggaaagccgagtgctgagtgtcagttactatggagtgggaatgtccagtgctgagggtcggttactatggagtgggaatgcccagcgctgagtgtcggttactatggaatgggaatgcccagtgctgagtgttggttactatgcagtgggaatgtccagtgctgagtgtcggttactatggagtgggaatgtccagccctgagggttggttactatggagtgggaatgcccagtgctgagtgtcggttactatggaatgggaatgcccagtgctgagtgtcggttactatgcagtgggaatgcccagcgctgagtgtcggttactatgg

SEQ ID NO: 686465 - DNA, 1454 bp, Homo sapiens
cccctgtgacgccacctgcgagaaggcacagagggtcgggcaagggccatgcggtccagcttccaaactcggtcaggaaagcagccgaggagcagatgccagcccccgccgcccacgcctggagcgcctctttctcccagggctccgcagcagggtccaccagtaacagacaccaggccaggtggggcagctgcaggttggggtaatggagacagagcctatgggtcccagcctcgcctccctctgccacggtattgtgtgactctagacaaatgctttctgggcctccatgtcccctgctgggaagccccgacctgtggaactaaatgaatgggccatgctgtgaggccagtagaagctccgcgttcctctaccctccaccctccgggagctgctgggctctgagcctgggggagcagggtcatcctgggctcaaagagcagagagccctgagacccctggggaagagcaggcggacacgctgtgtccggggaccggcgggtgggtgaaggtctcccgcccaccctggcacaggccatgagctccgtgtgcgtggggttctcccgtgatgcaggtcttcgccctccgtcacacgcgtgataaacaggctctgactcagtttcctggccattctgtctggaggctctacatggcctcggcgtggggccaggcggctgccctccacggctctcctggcagacaactgacatggagtctttcccaaagcctttgagtctttcccaaagcctcagggagcaggaactcggcaggcctgggggttggcagccctgggcagggtcgggagccctgggtggggtcaggatccttgggtggggtcaggagccttggctggggtcaggagccttgggcggggtcaggagccttggctgrggtcaggagccttgggtggagtcaggagccttgggtgaggtcaggagccttgggcggggtcaggagacttggctggggtcaggagccttgggtggggtcaggagccttgggtgaggtcaggagccttgggtgaggtcaggagccttgggtggggtcaggagtcttggctgaggtcaggagccttgggtggggtcaggagccttgggtggggtcaggagccttggctgaggtcaggagccttggctggggtcaggagccttgggtgaggtcaggagccttgggtggggtcaggagccttgggtggggtcaggagtcttgggtagggtcaggagccttggctgaggtcaggagccttgggtggggtcaggagccttggctgaggtcaggagccttcgctggggtcaggagccttgggtggggtcagggcctttggttgggtcaggagtcttggctgaggtcaggagccttcggtggggtcaggagccttgggtagggtcaggagccttgctgaaggtcaggagccttgggtggagtcaggaacctttgttgaggtcaggagcctt

SEQ ID NO: 686466 - DNA, 1649 bp, Homo sapiens
tggataaataaaatgcggtatatacgtccaacggaatattattcagccttaaaaaagaataaaatcctgacatacactacaacatggatgaaccttgaggacattattctaagtgaaataagccaactgcaaaaacaaatatggcataactcagtgtatatgtggtatctacagtaatcaaactcatacgaatggaaagtagactggtggygtcaaggactgcggtcaggtagaggggagatgtgaagttgtgtgttcaatgagtatagagtttcagtcgtgcaatatgacaaagttccagagacctgctgtacaacaacgtacatcagctaatactgtattatacactttcaaattgtgatgagggtaatcttacacggtttttacaacaatggaaaaaaagtctctaaaataaccatgttaggaaacactatgctgcacaatattgcacactgccacataagttctctagaaataggagctaaatgaataaatcataacagcatctttctaatttcctatataaaagagtaggtttaacttaattcaagtgtcttgaatctgagacagacagctagatgaacaaacaaaaaataatgtaaaaatttcagaaattattaaaaatgtataaacttacccatcttttaacattttattagatatttgcacttgagaattcagattctcaattgggattcagataaaagctttccttctatctacaaatataaactgaatccatcatggagaaaatcatcagcattctaaaatgtccttggtatttgccaacaggacaataattgaaccattttcccatctgtgttcactgttgggaaccttaataatacatctaaaacaactccatatctggcagaatcttacttaacctatttaagattgaaattcacttaaaaattctatactcaagatttattttcagtttgacatgatcaaaatgacacacctcccatcgtgagtataagacatagttgtgttatatatctacaattaggtgtccaagtaccctgtttacctaaaagaaaaaaaaagcaataaacacacatacaaaagcaatctgcatctattttcatatgcttagaagtgaactaataatacatataattgcaatgatcagacacaatgccgtttacaaaaaagcctgaatcctactttccatttttattagtttataaaaagactttgtaaacataccaaattatttcagatcctgaacccagaaacccaggctaatttgcaaagcatcttaccaaacacacaaaacccaaccatgattaaaccccaagggcttgtatatagaataatgtctaagataacagggggaatgagcttcagtagtactatgagagaataagaataaagcaagaaacatgaattcaaagtcctatgaagtcggctactaataagaacctgtaagaagtcaacaaatttaggtaccaccttttgggacctctctatctcattccagttaactataccatcaaagggtataacccgttagaacaaattttggtctaagaggtgtttcctataaaagtgtttggcgtgactcagtttttttaacctcaaatgtattatttaagaacaaaaaacaacctcaaatactgatatggtcaaatgtttaaagaaat

SEQ ID NO: 686467 - DNA, 720 bp, Homo sapiens
cacagactggcaaattggataaagagtcaagacccatcagtgtgctgtattcaggaaacccatctcatgtgcagagacacacataggctcaaaataaaaggatggaggaagatctaccaagcmaatggaaaacaaaaaaaggcaggggttgcaatcctagtctctgataaaacagactttaaaccaaaaaagatcaaaagagacaaagaaggccattacataatggtaaagggatcaattcaacaagaagagctaactatcctaaatatatatgcacccaatacaggagcacccagattcataaagcaagtcctgagtgacctacaaagagacttagactcccacacaataataatgggagactttaacaccccactgtcaacgttagacagatcaacgagacagaaagttaacaagtatacccaggaattaaaatgttatcaaccttttatatatttttcccagtaacctttatttccaaattttctacaattaatgagtattatttttaatgaaaatgttataagataaataaaattaagattacatgatttatccaatatgaattaaaacatactacagattgttaaatataatataactgagcatcaaattaaaataattttagaattataattttatgtgaattaaatgaaaaataatataatgagagtaaactgaaatatttcaagtggttgctatgttctcaatcttctaaaa

SEQ ID NO: 686468 - DNA, 581 bp, Homo sapiens
aagcatgtggagaggtgctagcgagggaatggagcaaggaatcaaattccataggcgattgttttctctatctttgtataaaaatgtccttgccccaattaaagcctccaccaagtacaaggttgaaatgtgctttttattccactcattaaagagaattagctaacctagactataaagtcataataacattcatacaaaggtagattcaaatctgttatttgtccctgatgaaaatgatacttatatttggttttcaaagactatctaaataacaaatgacatttagaagaatcttcatttactaataacttgaatctgctgtatacaaatgaacaaatgaattcattttcaaagagggatatgatatagaatctggaaactatcggtcacacagctttatcagatctttggcagaacaccagaatcaatggctaaatgtgatttttgagcacttagaaaataaaaggttcccaaatgtccaccaatgatagactggattaagaaaacgtggcacrtatacaccatggaatactatacagccataaaaaaggatgagttcacgtcctttgtagagacat

SEQ ID NO: 686469 - DNA, 604 bp, Homo sapiens
tctgactttattaggtcaaataaaggaagagctacccacagaaatctggcggaaacatagcttaggaacacatcaactctgatgctttatctgttttctgtgatatatcaaattggccttcaaaattgtgcatgattctagaaaaaaacatctatctgtttttcagagcttgaactgctgcttcctctatcctccacattagtcagggtttgatcagagaagcaaaaccagtaggagatatatggaataagggatttattatagggatttgaacttacacagtaacacagtacaaatccatctcatcatctcattgctgatcttttaacttatccaatttccaytttttttctaaatagactccctaaacatattaagggaaactaccaaatcaccatccaaaacacattcaggaaaacagaacaataacaccattcaaaatagtatctgaatacaaactcctgtatatttcttccaaattctcagtaaaatagtcataaaaatactttaaaagacaaaatgtttagtatcaaaaattaatagtgatagacaacacaatggcaaaatctgagagaattctgtgcaaaatttaaagcatgtggaa

SEQ ID NO: 686470 - DNA, 807 bp, Homo sapiens
tctattttggggaggggtgctatttctatagaatacaatagaatatgttaggaatctgttgatgccatcagatgtrtgcagttaagtatgatccttaggagccatattgaatgaattcactggcgaaaatacaaaacaaaagagagaaatgcatgaaatgaaaggaaataaaaccatcaatgaaataacttacatttctctcacctgaaagaagatcagatgttgcaaaactcaactccaatgattggtggtacacaactgggtagcttatctagaaggcagtggaacagatgaaaggaatgaaaactgagagagaacaaaaatggggacagttctggtggacatgtaatggtgtctcagactacaaaatgtgtgtgtttccaaaggaaaaataagagaaaatggagtgtaaacaattatcatttatacaatttaaaaaggggggaagcgctctcttaaactgaaataattcaagtttacaagataaaagatttttatatataaaagcaaaacaaacaacaaaaatagctgggcatagaggtgcatgactacaatcccagctacttgggaggctgaggctggaagatcccttgagcccaggagctggagaccagcatgggggaaaaaaaaaaaaaaaagtaacctgttaaaatacggccttgcatagagacatcaaaatcaatagcaacaaagcaaaaaatggcaaatgggatctaattaaacttaagagcttctgcatagcaaaagaaactatcaacagagtaaacagacaaactacagactgggcaaaatttttcgcaaactatt

SEQ ID NO: 686471 - DNA, 807 bp, Homo sapiens
tctattttggggaggggtgctatttctatagaatacaatagaatatgttaggaatctgttgatgccatcagatgtatgcagttaagtatgatccttaggagccatattgaatgaattcactggcgaaaatacaaaacaaaagagagaaatgcatgaaatgaaaggaaataaaaccatcaatgaaataacttacatttctctcacctgaaagaagatcagatgttgcaaaactcaactccaatgattggtggtacacaactgggtagcttatctagaaggcagtggaacagatgaaaggaatgaaaactgagagagaacaaaaatggggacagttctggtggacatgtaatggtgtctcagactacaaaatgtgtgtgtttccaaaggaaaaataagagaaaatggartgtaaacaattatcatttatacaatttaaaaaggggggaagcgctctcttaaactgaaataattcaagtttacaagataaaagatttttatatataaaagcaaaacaaacaacaaaaatagctgggcatagaggtgcatgactacaatcccagctacttgggaggctgaggctggaagatcccttgagcccaggagctggagaccagcatgggggaaaaaaaaaaaaaaaagtaacctgttaaaatacggccttgcatagagacatcaaaatcaatagcaacaaagcaaaaaatggcaaatgggatctaattaaacttaagagcttctgcatagcaaaagaaactatcaacagagtaaacagacaaactacagactgggcaaaatttttcgcaaactatt

SEQ ID NO: 686472 - DNA, 807 bp, Homo sapiens
tctattttggggaggggtgctatttctatagaatacaatagaatatgttaggaatctgttgatgccatcagatgtatgcagttaagtatgatccttaggagccatattgaatgaattcactggcgaaaatacaaaacaaaagagagaaatgcatgaaatgaaaggaaataaaaccatcaatgaaataacttacatttctctcacctgaaagaagatcagatgttgcaaaactcaactccaatgattggtggtacacaactgggtagcttatctagaaggcagtggaacagatgaaaggaatgaaaactgagagagaacaaaaatggggacagttctggtggacatgtaatggtgtctcagactacaaaatgtgtgtgtttccaaaggaaaaataagagaaaatggagtgtaaacaattatcatttatacaatttaaaaaggggggaagcrctctcttaaactgaaataattcaagtttacaagataaaagatttttatatataaaagcaaaacaaacaacaaaaatagctgggcatagaggtgcatgactacaatcccagctacttgggaggctgaggctggaagatcccttgagcccaggagctggagaccagcatgggggaaaaaaaaaaaaaaaagtaacctgttaaaatacggccttgcatagagacatcaaaatcaatagcaacaaagcaaaaaatggcaaatgggatctaattaaacttaagagcttctgcatagcaaaagaaactatcaacagagtaaacagacaaactacagactgggcaaaatttttcgcaaactatt

SEQ ID NO: 686473 - DNA, 679 bp, Homo sapiens
tgcctggagaaacataaagacagatttatcttatacaccaaatttctcacattctattctaacytgatggagttttctttgtttttgtttttgttttcttaaagaaacccgaaagttgaaacacaaaacacttgagaagtattatggaatagcaacacaccttagctagatgagtaatttaaaattttagtctaaatatatttcactgtcaaaataagtccatagtgtgtctcctctaataacataaccaagtacagctgtttcagtaagaaatggtttctttgaatgttttaagataatacagaattgtaaaaggaaagattcctcacttgtcttctatttctacaatagcaggagtcattgtaaaatacagaaggttgaactgcagggtctatgaaaattgagttaatccaaatttcagcagaaggcttgaagaaaagtttattgatgagaaaacacacacacacacacacacacacacacacacacacacacacacaaaacaaaacaaaaaaaacatgggaccaagatcacctaggcccaagttgcaatcagatggaaggcagaggagaatgaggccccatattttaaatgcaaccaagatggatagacatttacagaatagttttcccagagtagagagatttagaaagccctagagaatgcaagtttgaacctt

SEQ ID NO: 686474 - DNA, 1293 bp, Homo sapiens
tgaggctgtaggaagtgggttacgacattgccaaaatgtaacaggtcttaggtctttctgcaaagtgaatcctggtctgatacatcagcactacgtaagagttcatctcacctgatgttatctgcaagtgaggacaatgacagccacctcgggaggtgtgctgagcattcaaccagggggtcccaaactggccagtccaaccacaaatgttttgtaatgcatgacccaaagtgtttttgtgtgtttggttttcaggtgaattcatgctgacattttaaaaataagagatcaggccgggcgcggtggttcacgcctgtagtcccagcactttgggaggctgaggcaaggggactgcttgaggctaggagttcgagaccctctgggcaacacagtgagaccctgtctctagaaaaataaataattagctgggtgtggtggtgcacccctctagtcccagcaactcgggaggctgaggtgggaagatcactcaagcctgggatagaggctgcagtgagctatgattgtgccactgcactccagcctgagcaacagagcaagaccccgtctcaaaagttagtaataagtaaataaataaataacctcacataaaatccagaatctctaaagatctggcagtactgggcttccattcctatatggcagtgatcccctggagctgccccctttagacaagatctgggggcttcagttggccacagtcttcatgwctccctaccaccccacgcgctgcttgctttgttcttgcgcctcgtctgcctgaaactcacagcatctgagttttcaacttttctatccatgttggtatagcactacacctgcagggattcatttttagactttattctgggtgtttctgagcacttactgtatgccagatctgcgttcttctctcttacttcctctctctctctctattttacatctggaatttcaagaagcacttactttgtgccagactctattatttgctggttatgagcacagactcaggagccagcctgcctgggtgagtgccagtcccaatatcactcctttctacctgtgtgacttaagctctctgggcctcagtttcctcctccgtaaaatgggaataatcctggtatccacctcacaggctgcgtgtgatggttagatagggtaataaatacataaatcacctaaaacaagatatggaccatggtcaggctacatagagtgttagctgccattattatatttattattggtatttatttgtttattttgagacagagtctatctctgtcacccagt

SEQ ID NO: 686475 - DNA, 1252 bp, Homo sapiens
tttttccttttttctttaaatttcttgcagtgattttatgcttttatttttaaaaaatccacattttctttctccagatcttccataagtattacatttcaggggtttgaaaatgttaaagtactgacaggtacactgtgaagtcaaggaccccaccaggcccctggctgcccaccctcccccacttttctgccccgctagccactggtgtgcagtgactgtcaccccgcctcaccgctgctgcaaggtcaaaccaaacactccccccaccctgccccccacctgaagcacttcctgccctgctccctgggagaccaaaccacacacactcctgtctgcacgtggctgccccgggccgtgggaacagccggtcctgccctcccctcccctacctgaccggtcctccctgcccccaaccatctcctcccgttccttcccccgcagagagctgggcaggctggaggaccgggagggttgaagagtgacccccgcagcccccatacctctagataaatctgagcctccaataccactcacacctcaaaatgtctcccgaggggacttttacatcctttaatctctagaacatggaagtaaggggtctagaagacagaagtaaggggtcccatttcacagaggggacactgaagcccagagaagctcagaggtttgtctaggcagacggaggtgctggggtaaggaaaggggaagtgaggaccccagacagcagctgaggaggagtccatgggcacctggtcccccgggcttgcagygatgtccttcaagtctctgcagtgggggtggcggcagggacttggccccaggctgtgttccccaggactgtggggggaggagggggagaaggcagctatgaggcagagacagccctgaaagtggggaaaggtgacaggctcacacccctagaaaggagaaagggagagggtggggggtccctaaagcactgttcaacttccttctccccataaagtgacatcctcacttctgccccctcctcacccacttggccccaaatgactgagtcctgaggctcctggggctctttggggtctgctgggtaagtgtgaggtatcctgaagggggccaaggccaatgggggacctggaaactagcatcagagaaagtaacaagtctaggcctgctgggggtgggaggggagagataaggagaccagactttggaggagggaggggacttggctgccctaaagggagggtcagttgtcagtgtttcg

SEQ ID NO: 686476 - DNA, 620 bp, Homo sapiens
ttgctccttactttgtatttggagataaagggggaccattgcagcatgggctgtatctgccatgttggctcattagtcctggaattccttaccagtcttctcattgtctgcttaacaatgagaacacacatcacaggcttctggcctggacccatccctaaccagcttgtgactgtgggcctcatcttcaggtctgcattctgtaggagttagaggaaggaatgggaacgatggggagggcaggaygacagcagcaggatgccagggagcagtgacacccacactgtttcagcagggtctggaatttcatccttaacgagaagataccctccaccacttcacacgtgcaggagcaacaggcagcctgatgccatggagagagtggagaattccaaatcagacataatggggttccagttccagctttgtgtcttttgtctggctgtgtggccgtgagcaagctttaaccccctgggcttcagtttcctcattagtgacgtgggacagctgtgtttgtcccccagtgagggagggggggatgttgccaggcacttgtaagatagtgaggatgaaaagcactttcaaccttaagttctgtgtgcatgcaaaatgttatttgg

SEQ ID NO: 686477 - DNA, 1049 bp, Homo sapiens
tagtttctatggtaataatttcttcatttacactgttgcatattattcctttttatgagtatggcacaatttatgcattccactgttgaagggcatttgcgttgtttccctttgagrctactgggaataaggctgctgcaaacagtctcacagaacacttttgacagatacatgtactcatttctgatgtgtatataactaggagtagattcatgggtcatgagaaatgcatatgctcccttttaatagataatgccagctaatttttagtggcaatatcagcattattgttccacattaagataatggaattataaaaataattgttttacaatacattagattttgaattaaatatagtggtacttttaatctctagaaaagctgtcttcagttccagaagatggtggtggatgctaatatagtgaattgtagatgctaaaggaagctgtaaaaagaataagacaaagactgtcttccaaggtttactttccttttgtcaaaggtctcttgacaaaagaggctgtgtagatacatgtaaccctgtgttgactagaaacttttaatgagccatgactattatatatcctgaaaatacatacttttcagttgctattaaaactcaggcaaactatgtacttccactgctacaaatttggatatatttggatataaaattggatgtattagcatgatacatacaaagatatatgtatatgcaacattgtttatcatgttaattcttagaattagcctaagatgaccatcatagggaactggttaaattgtgaatacatacattggaatacatttcaagagtttacttaaaaggaaactgcacatttacgtgctgatgttgaaaaagtttcaaaatatagtaagtgaaaaccagtagcagcatagtatttttatataatgtaatcctgtttccttcaaatataagaatataagtatgcatacgtattcatatatatttttgtaaacatatgggatatttgaggaaagatacatacacaaaaatattaacagtggaattttggatcaggcaa

SEQ ID NO: 686478 - DNA, 1059 bp, Homo sapiens
tgtgaaatgtccttgccagtcacccaatgcaagtgaagttatactatcccaaagagccaacagtaccactacaattggtactgacagagaagctgcagaacagtgtcggcagtgtgaacccaaaagaatgaagcctctatacagatcaggccatgtgacagtcaacaatcagcaaccctttacaaagattccaggtgcaaaccaatcaaaccagatcaaaagcatcaaatgcagtccaacaaaaaaatacccctttgataagaagtttcaaaggtgaaagttttttattccaaaggtgtaacatatattcctcaccgatgaatggaaaaaatgaaaatttatttatacccaatacctggctaatagctgcacaggaagtagagacaggtagaagataagcacaatttctcttccattccataccatgattaaaagtagtttaataacaaatcatggttctttgtraagacttgcatgaggacccactttagacatcatttaagcaaccaattgtaaattcaagagccaaaaacaaaatctacacccttttaaaaatactgatttttttcactttggtgcatcaataaaaatatatggagttcacccaattatggataccttttccagttatataactaataataggcaggaaacaatgtgccaatcacttgtaaaaataagaaacttataagataattcagcctcaaaacagaaaaatgtaattattcaaaaggtctacattcaaaatcctctttccattatttgcactgaaaaatttacacaataatcatctgcatttatttgcacagtttagttatattaaatcttcatttgtgagctgtaaatttaaagataataatcaccaataaataaatgtacattaaaaaactgagaatttttacttgcaaatgagtcattatttcattaaaattagtcactctggagggccataagcgaatttcaataatactgccactgatcaagatatttttaaactcttttggaattaaaatactatatatttgtgaacttctggttctagtcctgacaaaaactttg

SEQ ID NO: 686479 - DNA, 1059 bp, Homo sapiens
tgtgaaatgtccttgccagtcacccaatgcaagtgaagttatactatcccaaagagccaacagtaccactacaattggtactgacagagaagctgcagaacagtgtcggcagtgtgaacccaaaagaatgaagcctctatacagatcaggccatgtgacagtcaacaatcagcaaccctttacaaagattccaggtgcaaaccaatcaaaccagatcaaaagcatcaaatgcagtccaacaaaaaaatacccctttgataagaagtttcaaaggtgaaagttttttattccaaaggtgtaacatatattcctcaccgatgaatggaaaaaatgaaaatttatttatacccaatacctggctaatagctgcacaggaagtagagacaggtagaagataagcacaatttctcttccattccataccatgattaaaagtagtttaataacaaatcatggttctttgtgaagacttgcatgaggacccactttagacatcatttaagcaaccaattgtaaattcaagagccaaaaacaaaatctacacccttttaaaaatactgatttttttcactttggtgcatcaataaaaatatatggagttcacccaattatggatmccttttccagttatataactaataataggcaggaaacaatgtgccaatcacttgtaaaaataagaaacttataagataattcagcctcaaaacagaaaaatgtaattattcaaaaggtctacattcaaaatcctctttccattatttgcactgaaaaatttacacaataatcatctgcatttatttgcacagtttagttatattaaatcttcatttgtgagctgtaaatttaaagataataatcaccaataaataaatgtacattaaaaaactgagaatttttacttgcaaatgagtcattatttcattaaaattagtcactctggagggccataagcgaatttcaataatactgccactgatcaagatatttttaaactcttttggaattaaaatactatatatttgtgaacttctggttctagtcctgacaaaaactttg

SEQ ID NO: 686480 - DNA, 609 bp, Homo sapiens
tgggtgggtttggaagcaacatgataatcagtcccatgcttcttcttttgtttgtagcgatccccatgccggagacctttcttttctgtggctaagcaatcttctccctgggcttctggatgctcatttcaagagcactccatttcagtgactcatagctaatttactgaaccttggatgaggttctgggctctgtacaaagtgttctggaaacacagtccttgtccttaagttcccttcagtattctatttattagtaaaattgtacttctccttgtctccaaacatacctggctccttcctgcttctrtacttttgctcataatgtttacttccaggaataccatctccattccctaccctccctccctactcacatcatctctacttctcaatattcttcttatctgttttagctcaattcaaatacctccttgcagcttttctcctgctttcccatatccctctttctcctccaaagtctcatcttagagtccttatcttattcaaattgtcattttggagtgtcattttctatttacacatttgtcttccctaattcaggataatataccaaagagagaaatctgttattcccttttgggtctc

SEQ ID NO: 686481 - DNA, 654 bp, Homo sapiens
gaatgtattctaatttgaagatgtctcccaggcaattctaatgaraaggaatgcccttctccagcctgacagcctcctcccactgtcataatattgagaatcacagtgtttccccaaatcaaaagacctgttttaatgagcattattaagctcatttgtaattggaaaataatgcaaaaccaatgaaaactgagctctgcctcatttcaaaaacacacatagctctgcctcgctgttgccttcttcatgaaaaacattaaagaaaactcaaccctctctcagagaaagcagaggattccagagattatgtgagcacctcagcttagccttctgccgtgcatggcagctcatctaggtccttgctaagaggtatgggggaaagagcaaaagaggcacacatgtggtgccacagattacctttcttgctcacaatgccattttagatggctcagtatttgaaagatgctgactgtggtcactgttttcctgtactctgagatgatccaatagagattgtcagtagttggcacggtttacgtggagtagcatttcaccttttcataccacaatgtaaagcttatgtagagtaatcagaagtgaggatgattataccacctttatcaattgaatagtgggcttagctgagtgattaca

SEQ ID NO: 686482 - DNA, 866 bp, Homo sapiens
aaagtggcagctcctccagaacttcctttgactccggtggcatccatcctgggctctggctccatgcttggctcaggaataactgccaggaccaaccagctgtgctaagactctgaagctgccactcactcatggaaggggaaggaaagtgaggtccatcccatgtaggtggacgaagatagggcaagaggaggaaccactgccttttatgcggggtatggtagctgaggcattttacttaggcaagacttgaagaaagcaagcccaggtgagcctttgcttcagaaatatataaagtagaggggaaattcttttgtcccatttcagccacatccaagcattttccttagaagcagggcagatccaggttttgagtagcctggattttataccatttgggggagggtccctcttttacaaaagcatacaaaattaagtacagagctttaaaaaaaaaaaagaaagaaaagctctgaaagcttaagtttcattgcctttgtggcaaatcagcctttatttagaagtaggtttatttcctgttgctctgcctctctctcacctcatttctctacctgtgtctctcttgccatgattttgggttcatttgccctaggaggacctaaaacagcacaggttatataaatatttgtctgcgtcttctggagtgtcctcagcatctgtccctctgaaatgctccagtagcataatgaagttgtactgaggttaagggatggactcaaggcagaggcccacacttcactgaaaattgcctgtcattcctgccaggctggctttagaactctgggtctgcatccactcagctagcaattctcagggtcaccgttataagtgrccttgtgtccccc

SEQ ID NO: 686483 - DNA, 678 bp, Homo sapiens
cagacattggggatacagagatgtatccatgagtagggcaaaattgaaacaaaggaaactgtttgtttttaatagctcttttaatctgccccaacttccttatctcctcattctccctcccattccttttttcacaacacaactgagtactatcagattatgtagaccatctctccacattagtcaataagatgaccttgtcctataaaaatgcctgtctagtgtcaaaattccctcggatcctgatagytgctacttgatgagatacagtattgtctcctgagatgtttataggtcttactgtgttagcacattgatatggtttagctgtatgtccccacccaaatatcatgatgaattgtaatcctcaatgttgggggagggccctggtgggaggtgattgggtcatgggggcagttttccccttgctgttcttataatagtgagtgagttctcatgagatctggttgtttaaaagtgcttagcacttctccccttgctctctctctctctcctgctccaccatgtgaagtttgtgcctgcttcctcttcaccttctgccattattgtaagtttcctgaggcctcccatacagtcttttttatacagcctgtgaaactgtgagtcaattaaaacacttttcttcataaatttctcagtcttatgtagttctttata

SEQ ID NO: 686484 - DNA, 652 bp, Homo sapiens
tggggcaacagtccattcatccaaaggaatgtgagtgaggaagtagggatctaagaacaagttaccatgtagttcagtaaagaatactaattaatcaacttcctatttttctttaatattaactcagtaatacattgtaaaagkctgtgaatcactcaatattttattttatttttaattattattgttttcaaaactttggtgcaaaactacaaagtatatgaatgtatcagtgatcacatcgtaaattttatttctatgtcatttagaattttggtttgataatttaagccttgagtttttctgtaaaaataaaagtagcacacattttacttagataagccaaaatgcttagcacttggaagactctaaaatcttgtatagaatgtcatctgggatcatctggataaagccatacttttatagttttatttataaaactataaaaccatatatatattttatttataaaactataaaagttcatggtatttcagatatttgcttgaaaatcaatgtatatttgaacatctttctagactggaaattattctgagttattcgatttagcatagctttttaattaactcaaatatgaatggagagtaaaagcaatctggaacatctgatacagttgatctctacgtataaa

SEQ ID NO: 686485 - DNA, 1605 bp, Homo sapiens
aacataccacctttcatttaatttccttgcatgcctacctcacttctctttgtacttcattctttctcccctgtaattatacctcacaaaagattagcaagtaagttttgcttcagactctggaagaaacccaaacacaaatatttaattttatttggaattgatttttcatgtgtattttaatagtatggccatctctcttttaggctgaacttatcaaagttgtctcactgtacttttcgcacttctttgcatttcagtggagaacaatgcacctctattagtgagttttgactgtgaaccatgttgtctccacctcccaataaatattatttttaactcattggtagataaataaagtgtctttagaaaatggttattgatgacaatttggggatcagtttaaggtctgtagtgctcggatgcccagcaacagtaaatgcatttttcagtgtttcatgaatgatttcctaatatagtccattcccctcccccccaccaatttaatatgagagtgaagaggaaaagtgagctctgtatgtataatgtattttcataggataattgacttagtagcaattaaaatagtgatgtatagacatcaaaagggtatctgtggattcaaaggggtttccagcaatgcacgrgtgaggaattctctgaaagataaatcaaaggtagatgtttaggtagtgatcttaaacttacttggttagaaacataaattatagaaaatcttatgcaagttagagaccattatggtttttgtcactcaaggcagtccttgcatgttaggtgagcaatcagaatttatactgatatttgatatataaaaatattttatatatctgcaaaaataaagcagaatgctaaaaatttaagaattatctttcttattctctgaatattgtgccagctactgtacagccaactcaaatcatgagcaagaagggctttgaaatgagttttgtgtatgtaactaaacatttttttgaagaactcagagaattacaaataattttcaagggactggttgcattatgcactccattgacaaaaacactgaggcttctttcataatagtgctaatgtgtgtggtgtgtgcaaatagtagtaataatcatagacttttcattaatttccagtgttaggcatcatataaataggggtggaccttagaagaatagggaagcattacattgagttttggaatattctttaatttaaataatgtataatttaatttgatttctacaaacaacatctaaatcttgtttttaccaagaaacagagataaatataacacagaatgtttccaatgtaattctttatattagttaagaaagacttaaaatttttaactacacaataattaagattgtagaaataatagaaatcacagagaagcaatacacacaagaaataattattcgaatctctctactttggtaatattttggtgtatattatttatgatgttcccgccatgattttactctctgtcatagaaatgtgactctgccatatctactcttcaataaatttttctcacaattgtattgagctaatatgtattttgcatatacttatatgtatatctgataa

SEQ ID NO: 686486 - DNA, 617 bp, Homo sapiens
tattaactgtgggaccaaataatagttgtttttgtaagcaaaatgtctgataatttacagtatgttttcacttatacctgctcatttacatcttatttactttgtataacacctgtaagagtaaatcaaacatacttgttaatgtaatgattgataatgtcataattccaaaaagtatttagagggacttataaaaatatatatgatataagatggagaccaggattatttcaagcataaagtcaagggaataataaagaaactatatactagtaacaggtaaatttaataattgaaatccatatcagaaagcacaaaacacctagtaaaaattaggcacacattttagaaaaaaaaatttaaaaaataaagyggaggtaaacacaattaatatatgattaagagaatataagagaaaatagcaaaccaattattcaatataaattcattagttttgaaaacaaaaaagaaaaaaaatattctccataccttctcaaataggagaccaagtaaagcagtaaacaacaatctcaaaagataccattcatcagatccaaattgggtttcttagagctatttctcataatgctcctcaatgtaagaagattctgtatccc

SEQ ID NO: 686487 - DNA, 669 bp, Homo sapiens
aagtcatggtagacttcaaaaacgttttcagagtagaaaagccagaagacagatgacagaaagttaaggtatctgtagccaagaagagggagtagagagtatacttttaagaagtttggtggaggctgggcacagtggctcacgcctgtgatcccagcacattgggaggctgaggcaggtggatcacttgaggtcagcagctcgagaccagcctggccaacatggcaaaaccatctctctaccaaaataataataataataataataataataataataataataataataaagtttggtggagaaatgatgataaaagataagagagaagtactctcttctatagaaacactatacaagtgtttgttttttcaatttgttgcttttcttttattaataatagattataacaattactttaatgctmtgtctttcgggagatatttaaatattaagagactgtaatataaaatgaacaaagagcaaagatgttacaactggatgcaatagctgatgcattaaactggataccgtgttgaaggtaaacaaataccataaagaatgttattgggtacacaattgacaaaattgtgacaaaaatggtacattagtaagtgctatatcaattttaaatttactgaagttgataattatattgaggttatatga

SEQ ID NO: 686488 - DNA, 645 bp, Homo sapiens
ggtcatagcaatctaagaaggaaaagtatcccaaatacattatgcattttgagtgcaaataaattaagccttaaaaaccccatgccacataaattacagtgataacatttgataagtaaaacatagatgggtttagaaaaatctagctacctacagaaatttcttaaaggcccaatgtgagtagtcaataccaagggaggaatctctgagaatttgtgttttatctgtatgatcttaagacagaattatttgtttattttaaagagataaamcaaacaaaataaactaaaaacaagcacagtgtcctgaacaactaaaccaaaaatgaaaaaaaaatgacttcagcaatgtaagacagtttacaagtagtaaaagaaaaggcgtcccaagcacaggaccctgaatgtcaagcgttggcctctagtgaatggaatgttcttggctgttctgagataaggttttgactactttgttcttccttttcctctgctaactctggcaagtcagagccacatagctccttaagcatctggcagacaatttgcctgaactgctttatctggatttagtttaacttcataaattggtcaatgggagtatagacacacacctacaaactgtcatcagaatagtccagtatttttt

SEQ ID NO: 686489 - DNA, 1007 bp, Homo sapiens
taatgtgtattagaaacagaaagaagatgccactcaagacttgcaacaggagagaggggccgaattccacttaaataaaagaagggccagcagagatgtatgatgggcagagaggggaagggagacagaaaaccaccaggaagaacttggccagataccaagagtgcaggaggaaaggcctggccggatgtcrctgtgggggatccttcctaggctggcttaggatttttgctaacactgggctcagctgaccaaggacaagtcctcatggagaagatggctcagaggagcctcatgaatgtctggtctaaggagtccttgtcccattggttagggggtctgcatctgtgagcttttacatttgaaggcctattgttgcataattatcaatcacacctcttctcttctcagtcctcaaaagggatgaatcccacaatccccagaccacagatggatctcccataaggagaggaactctcagggaaggtggtattggataggacaggtttccccattttgccatccctcagtattcacctatccactggggcacgttttagttcattgagccagaggtccggttagggcagccttcaaatgcctccatttaattaactagcacattggacatgggaagtttcaggcaacagttggtaaagaaaggaaatgtaaatttccatcaaaacagagctgagtgttaagtccagggaagcaagtagagaatgcccactcaagtataaacacacatgcattgtatgcaaatgtgtgtgactaaatgtaatcatacaaatatgcaaattctgagatttaaaaagattgctcacacatttctttttgttcagtccaggcagagttttcttttctctcactcctgtgatttcatacaagagcaatcatattcctacacatcttttacttcttaaagacgcttccaggatctttctctgtgaggcagctttcttggtttttctccacgctacctagtatttcactgtggaaatgaatca

SEQ ID NO: 686490 - DNA, 1007 bp, Homo sapiens
taatgtgtattagaaacagaaagaagatgccactcaagacttgcaacaggagagaggggccgaattccacttaaataaaagaagggccagcagagatgtatgatgggcagagaggggaagggagacagaaaaccaccaggaagaacttggccagataccaagagtgcaggaggaaaggcctggccggatgtcactgtgggggatccttcctaggctggcttaggatttttgctaacactgggctcagctgaccaaggacaagtcctcatggagaagatggctcagaggagcctcatgaatgtctkgtctaaggagtccttgtcccattggttagggggtctgcatctgtgagcttttacatttgaaggcctattgttgcataattatcaatcacacctcttctcttctcagtcctcaaaagggatgaatcccacaatccccagaccacagatggatctcccataaggagaggaactctcagggaaggtggtattggataggacaggtttccccattttgccatccctcagtattcacctatccactggggcacgttttagttcattgagccagaggtccggttagggcagccttcaaatgcctccatttaattaactagcacattggacatgggaagtttcaggcaacagttggtaaagaaaggaaatgtaaatttccatcaaaacagagctgagtgttaagtccagggaagcaagtagagaatgcccactcaagtataaacacacatgcattgtatgcaaatgtgtgtgactaaatgtaatcatacaaatatgcaaattctgagatttaaaaagattgctcacacatttctttttgttcagtccaggcagagttttcttttctctcactcctgtgatttcatacaagagcaatcatattcctacacatcttttacttcttaaagacgcttccaggatctttctctgtgaggcagctttcttggtttttctccacgctacctagtatttcactgtggaaatgaatca

SEQ ID NO: 686491 - DNA, 1007 bp, Homo sapiens
taatgtgtattagaaacagaaagaagatgccactcaagacttgcaacaggagagaggggccgaattccacttaaataaaagaagggccagcagagatgtatgatgggcagagaggggaagggagacagaaaaccaccaggaagaacttggccagataccaagagtgcaggaggaaaggcctggccggatgtcactgtgggggatccttcctaggctggcttaggatttttgctaacactgggctcagctgaccaaggacaagtcctcatggagaagatggctcagaggagcctcatgaatgtctggtctaaggagtccttgtcccattggttagggggtctgcatctgtgagcttttacatttgaaggcctattgttgcataattatcaatcacacctcttctcttctcagtcctcaaaagggatgaatcccacaatccccagaccacagatggatctcccataaggagaggaactctcagggaaggtggtattggataggacaggtttccccattttgccatccctcagtattcacctatccactggggcacgttttagttcattgagccagaggtccggttagggcagccttcaaatgcctccatttaattractagcacattggacatgggaagtttcaggcaacagttggtaaagaaaggaaatgtaaatttccatcaaaacagagctgagtgttaagtccagggaagcaagtagagaatgcccactcaagtataaacacacatgcattgtatgcaaatgtgtgtgactaaatgtaatcatacaaatatgcaaattctgagatttaaaaagattgctcacacatttctttttgttcagtccaggcagagttttcttttctctcactcctgtgatttcatacaagagcaatcatattcctacacatcttttacttcttaaagacgcttccaggatctttctctgtgaggcagctttcttggtttttctccacgctacctagtatttcactgtggaaatgaatca

SEQ ID NO: 686492 - DNA, 1148 bp, Homo sapiens
tcactgtaagtatcaatttgctaagcttctagacattctttctacctacaataactttttttacaaaactaatatttttgtagttttcttcacctttatttctagccttgctattcaacatattagttatcctcacctttgtttcaatgatgacgtttatgtgtataagccttctatgtcttaatctaagtcattaataaaaaaagcctaataagtaaataaagagcaataagatacttaatttgtaaccccttttggtattggcatcatttgattaagcaatacccttacaacgattgttcacccaagcccgaatacacctaattgcattatcacctgatcaaattgctccatcttgtccacatacattccatgcagatactatgtccttaattgatttgcaattaaaaaaatgctgacacactggaacattctcccttaygtagttccttgccagaaaaagaaaaaaaaatctattattgaaagcaatcacttgaggccaggtttaacaaccattttaaaagatgcaaaagtttccaaatttgtactctcctgtctctgaatctattttaatggtcctatattccttaatatgttataaatgaaaattcagtataaacaaaaagctggaagattttttcaaaagataacattcaattataaagttcctaatgtttcttagaattgaggtgaggcaatggaaactaaaatttccagaactgtttttgtacctggccccacccttggcaatcttccccttctcaagaattattgacattggtgtttccaggaactcaatttatattatgtatgtcagcttccactttcccctcacattacagagtttataaacagttccacttgttaatccaactcatgagtgcttctcaaaagcactacagaacataaaacgtcataagtgaaagctctcaagtactacatcaacaattacccaaccatgtctacatagtaatcaatattttggatacgttggaaaaattgacattaatttctgagatattttcaaatacccttaggtttgaaatcaagttaccaatcatttgggtggataagtaattttaaaagttttatactggataactagatatgtttcaatctattttagacacacagtctcaacaaaatta

SEQ ID NO: 686493 - DNA, 1148 bp, Homo sapiens
tcactgtaagtatcaatttgctaagcttctagacattctttctacctacaataactttttttacaaaactaatatttttgtagttttcttcacctttatttctagccttgctattcaacatattagttatcctcacctttgtttcaatgatgacgtttatgtgtataagccttctatgtcttaatctaagtcattaataaaaaaagcctaataagtaaataaagagcaataagatacttaatttgtaaccccttttggtattggcatcatttgattaagcaatacccttacaacgattgttcacccaagcccgaatacacctaattgcattatcacctgatcaaattgctccatcttgtccacatacattccatgcagatactatgtccttaattgatttgcaattaaaaaaatgctgacacactggaacattctcccttacgtagttccttgccagaaaaagaaaaaaaaatctattattgaaagcaatcacttgaggccaggtttaacaaccattttaaaagatgcaaaagtttccaaatttgtactctcctgtctctgaatctattttaatggtcctatattccttaatatgttataaatgaaaattcagtataaacaaaaagctggaagattttttcaaaagataacattcaattataaagttcctaatgtttcttagaattgaggtgaggcaatggaaactaaaatttccagaactgtttttgtacctggccccacccttggcaatcttccccttctcaagaattattgacattggtgtttccaggaactcaatttatattatgtatgtcagcttccaytttcccctcacattacagagtttataaacagttccacttgttaatccaactcatgagtgcttctcaaaagcactacagaacataaaacgtcataagtgaaagctctcaagtactacatcaacaattacccaaccatgtctacatagtaatcaatattttggatacgttggaaaaattgacattaatttctgagatattttcaaatacccttaggtttgaaatcaagttaccaatcatttgggtggataagtaattttaaaagttttatactggataactagatatgtttcaatctattttagacacacagtctcaacaaaatta

SEQ ID NO: 686494 - DNA, 746 bp, Homo sapiens
tgagagagtatcgaaactctctcacatttgtaagtttatggatataaaacttctgggcatttattcataatttgtcacctttaatttcatatatacttatctagatagatttgttatttacttgaaagcatgctacttttagaaaaaatcataaaattccataaattccaattataagtgaaagaagtcagaataaaaaagagactgaactctaataagcagtatcactctgtgcccccagagcatatactcatgggggcaaagaaaatagcagtacttgaaaggagatgatacaatgaatactggtgatcacatcgtaatagttgttgctgaaaattcctttgattatttttgtatatacttctagggctcacccctacccacgtctcctgtcttttatgcacataagataattataatttcctaccttctttttctgttggcagtgccatgtaactagtttcggccaatcagttatgattaaaaaatggcacaggttccttctgttttggaacatttaactgcttacctgagaccctacaatgtaactctgttcttagcacatcatcatgtgattgtttaggagcaacgtgactgaaacccagaagattctctggaacattgtcttagtgtttccatatgtaataagttctaatacaaaatggcagagtgaytggagatgtagaccatttcggaataaaagtttgggtcattccatcatataaagaaacaagaatggccaggca

SEQ ID NO: 686495 - DNA, 1318 bp, Homo sapiens
gaaccattgatctctcctgccattttaagccatcacctgccatctctgccccctttagataaaagtctacttcaccaattgccatcagtgccttcaaagcccctatcaagcctccctcatgcctcataaaagcgccccctgccgaatcctataatgccatatacttcagaaactgtagagatagagaggggtttggaaatcagaggccytcattcctggggctcagggtcagctcctagttccactaatggttagacagtgtccaacctaataatggcccatcaatcacatgctgtttccatggacaccactaactaaaagatttacagaaaacaatcaggcaccaacagggaattgcctgtagcacccaagacagcctctctgataacaaagtgtcactctactgaagcagaccctggctggggaaattgccatgagcatatagtgctcttgctatctgaagctgaacttaagataattcattgcatgaagctagaggatttaaaaagcaaatcaatttcctactagttccggttggattctgctgctgaatttcatttagttggtctccctccagaaacagaggcagaaaaggaaccagcacagactccttcatctgtcttcatgaaaataggcttctaaatttttctctaaattgaagttactggtggaaagagaatcaaattctgggcagcggctgagtccccagaggtgaaggctaattcactctgccaggaaggtaggcacaggagaccacagtctgcaccagtcctggaagtttgacctgacacctgagtgcacagcgactgtgggccatgtgctccagggcctctgcttcctggctgtctgggcggtctgctgcttggacagcgctggctgcagagcaagcactgttcttggccaatgtgtttgcatctggcaaaaacatcctgcagctgcagactccctctccaagagtgttccagtttttcttgcccatcctacttggatcatcttgtcaccacgtgcacaggggaaatggcaagacatagggtaacttgtctttgtttctgtccacagcatatttaggaggctggcatttcctttctttcttggctagactggttgtccctttggagctgggcagagaatgcaccggcagggcccggggctggagctgcacaaacagactttccaccctggtctcagagaagtgagaatcttgcaatttcctccaagggttcccctcctcgggtcgtggtcccacaaataagctgataaggcaggggtgagtgtttgttgcatgtccagttggacttgaagcaattttaggagaaaa

SEQ ID NO: 686496 - DNA, 1456 bp, Homo sapiens
tacaggatggtctgagcacagtcctgcacctccactttattaattacagaaagggagaatgaagggctctagaggttaayggagaagtgcctgcaaatgactgggctgtatggagtgacatgccacgtcagcagggatctgaaggccatccagttgcacggacccctggggagtaccccggccatcacagtttctctgagaagctcagtgccacgcatgtggcaggaaatctctaaggagccttcagacagcatctgaaagtcatattccagccctagggtgcagacaggaccctggcattgagtctgcaccatggctcaagtgaagcacagcttgccactttagaggttcttgacttcagagaactgtgaggtccagggcagggacctcaggcctgacctggcctatcatttgtttttgtacatacgagttcatctgcatacagacacacaagtgtgcaggaattgtcactgactactcttgggctacaatggcacggcaaagctaagtagttctaacaggggctataggcccacaaagaaaaagattcacaatctcgcttattccagaaagtgcgccaacctcaggtctaggggatagaacatgggctgggaggcaagacaggtcccttagggaacctggaaccatttagcctcagcgcacctcacctcagctttcttatctgtagaatgggatcaatgatatttaccctaccatgaggtggtggggatgaaatgatatgatttctcggcacatgtgacctattcagtatgaatccttctctctctgcttgctatgaagtggcgtttgtgacggctgctctatctgcttcaaaaagtggttattattttacagtagatatgaaagcactctgaaaagttaaagatgctctgttgtggtaagactctcctacaaatattattcttgagatgagaaatctggagctgccagccaggttaaatcaaaatacagtagctccattttgattgacttgtcatgggatagcctgaggagccatggatttggggggatccagtgctcctttgtggtgagtcatgcacatccccactgggcactctgggaggtggcctgctctcccagcagggctgcagcccatgtgagctgtggggccttaggcatttccttggcttctctgagcctcagtttccccacttgaaaaacagcaatgccaatagaagtgtggtgaagacgtaatgagacatggtgacatagaaaggtggctctaaaaatgtgagctcttattttcatcccaattctggaatgaacagctgagagggtgtgagggacttgcacaaggggtctgagccggaaagacaggagaatgaaaagaaggcaatggtagatagtaatttctaacctggctcctgaaatagatctggcccccagagaggggagcagttctccatttctgggcaaaacctaagtgacccagagc

SEQ ID NO: 686497 - DNA, 1456 bp, Homo sapiens
tacaggatggtctgagcacagtcctgcacctccactttattaattacagaaagggagaatgaagggctctagaggttaatggagaagtgcctgcaaatgactgggctgtatggagtgacatgccacgtcagcagggatctgaaggccatccagttgcacggacccctggggagtaccccggccatcacagtttctctgagaagctcagtgccacgcatgtggcaggaaatctctaaggagccttcagacagcatmtgaaagtcatattccagccctagggtgcagacaggaccctggcattgagtctgcaccatggctcaagtgaagcacagcttgccactttagaggttcttgacttcagagaactgtgaggtccagggcagggacctcaggcctgacctggcctatcatttgtttttgtacatacgagttcatctgcatacagacacacaagtgtgcaggaattgtcactgactactcttgggctacaatggcacggcaaagctaagtagttctaacaggggctataggcccacaaagaaaaagattcacaatctcgcttattccagaaagtgcgccaacctcaggtctaggggatagaacatgggctgggaggcaagacaggtcccttagggaacctggaaccatttagcctcagcgcacctcacctcagctttcttatctgtagaatgggatcaatgatatttaccctaccatgaggtggtggggatgaaatgatatgatttctcggcacatgtgacctattcagtatgaatccttctctctctgcttgctatgaagtggcgtttgtgacggctgctctatctgcttcaaaaagtggttattattttacagtagatatgaaagcactctgaaaagttaaagatgctctgttgtggtaagactctcctacaaatattattcttgagatgagaaatctggagctgccagccaggttaaatcaaaatacagtagctccattttgattgacttgtcatgggatagcctgaggagccatggatttggggggatccagtgctcctttgtggtgagtcatgcacatccccactgggcactctgggaggtggcctgctctcccagcagggctgcagcccatgtgagctgtggggccttaggcatttccttggcttctctgagcctcagtttccccacttgaaaaacagcaatgccaatagaagtgtggtgaagacgtaatgagacatggtgacatagaaaggtggctctaaaaatgtgagctcttattttcatcccaattctggaatgaacagctgagagggtgtgagggacttgcacaaggggtctgagccggaaagacaggagaatgaaaagaaggcaatggtagatagtaatttctaacctggctcctgaaatagatctggcccccagagaggggagcagttctccatttctgggcaaaacctaagtgacccagagc

SEQ ID NO: 686498 - DNA, 1456 bp, Homo sapiens
tacaggatggtctgagcacagtcctgcacctccactttattaattacagaaagggagaatgaagggctctagaggttaatggagaagtgcctgcaaatgactgggctgtatggagtgacatgccacgtcagcagggatctgaaggccatccagttgcacggacccctggggagtaccccggccatcacagtttctctgagaagctcagtgccacgcatgtggcaggaaatctctaaggagccttcagacagcatctgaaagtcatattccagccctagggtgcagacaggaccctggcattgagtctgcaccatggctcaagtgaagcacagcttgccactttagaggttcttgacttcagagaactgtgaggtccagggcagggacctcaggcctgacctggcctatcatttgtttttgtacatacgagttcatctgcatacagacacacaagtgtgcaggaattgtcactgactactcttgggctacaatggcacggcaaagctaagtagttctaacaggggctataggcccacaaagaaaaagattcacaatctcgcttattccagaaagtgcgccaacctcaggtctaggggatagaacatgggctgggaggcaagacaggtcccttagggaacctggaaccatttagcctcagcgcacctcacctcagctttcttatctgtagaatgggatcaatgatatttaccctaccatgaggtggtggggatgaaatgatatgatttctcggcacatgtgacctattcagtatgaatccttctctctctgcttgctatgaagtggcgtttgtgacggctgctctatctgcttcaaaaagtggttattattttacagtagatatgaaagcactctgaaaagttaaagatgctctgttgtggtaagactctcctacaaatattattcttgagatgagaaatctggagctgccagccaggttaaatcaaaatacagtagctccattttgattgacttgtcatgggatagcctgaggagccatggatttggggggatccagtgcycctttgtggtgagtcatgcacatccccactgggcactctgggaggtggcctgctctcccagcagggctgcagcccatgtgagctgtggggccttaggcatttccttggcttctctgagcctcagtttccccacttgaaaaacagcaatgccaatagaagtgtggtgaagacgtaatgagacatggtgacatagaaaggtggctctaaaaatgtgagctcttattttcatcccaattctggaatgaacagctgagagggtgtgagggacttgcacaaggggtctgagccggaaagacaggagaatgaaaagaaggcaatggtagatagtaatttctaacctggctcctgaaatagatctggcccccagagaggggagcagttctccatttctgggcaaaacctaagtgacccagagc

SEQ ID NO: 686499 - DNA, 627 bp, Homo sapiens
gaggcaggagaatggcgtgaaccggggaggcaaagcttgcagtcagccgagatcgtgccactgcactctggcctgggcgacaatgtgagactccgttaaaaaaaaaaaaaaaaaaaaacctttgggctccaaccctctttgagtaggaagaaggccttgagagattgtgcttcagttcccacgaaaaggaatattctccaatkctctttctgatttgtccaaggaggataactggggaaagaagggcctcccagagaatggagtcaatgatcaagatgaacaattgactggggaagctgctcccaagaagtgagactaggacctcatcaaagaagaccttctgtccccagggcaggggctctccacgtatctgcttagtgggacttcagaatccctatgggtcaataggtgttctgtatatccagttgtttctctttcagatggggctttgttgcagatatcctattcctatccagcaggtattcaccattgcatattgggtttgaggagtggctggtaagggacagcctccaaagaaagaggagccatgtctgcacctcttgcaagatcctactaggcaccactcagagactcttggactttgagctggacagtaactgaatggaa

SEQ ID NO: 686500 - DNA, 627 bp, Homo sapiens
gaggcaggagaatggcgtgaaccggggaggcaaagcttgcagtcagccgagatcgtgccactgcactctggcctgggcgacaatgtgagactccgttaaaaaaaaaaaaaaaaaaaaacctttgggctccaaccctctttgagtaggaagaaggccttgagagattgtgcttcagttcccacgaaaaggaatattctccaattctctttctgatttgtccaaggaggataactggggaaagaagggcctcccagagaatggagtcaatgatcaagatgaacaattgactggggaagctgctcccaagaagtgagactaggacctcatcaaagaagaccttctgtccccagggcaggggctctccacrtatctgcttagtgggacttcagaatccctatgggtcaataggtgttctgtatatccagttgtttctctttcagatggggctttgttgcagatatcctattcctatccagcaggtattcaccattgcatattgggtttgaggagtggctggtaagggacagcctccaaagaaagaggagccatgtctgcacctcttgcaagatcctactaggcaccactcagagactcttggactttgagctggacagtaactgaatggaa

SEQ ID NO: 686501 - DNA, 605 bp, Homo sapiens
caaaatctctcagtcacactgaaccaggattagaatgaggtgagagaggcattagcctccagcccaaactgtgattgcgggtctgctttatctaaaaaaaattctaggacatgcctttcaagcttcttatcccaaatggattaaataagtagaaagtggttaaatgtgtaagttaaaatgagataaatatcattagggaatggcaaataagttcctatgggagctcaagaaagtagagattatatatgtggggaattacattaaagattgcatcattggtactattctctacatagctccaatccccatcttgcccaggacatgacagaattgtacatttggttttagttgatgggtacaagggactatttctggtcaatgaattgcaagcagcagtcatgtttgccactttcaggctacagcatttaattgctaaagtgagactgcagagctctcttttttcccctctggcatagtaaggagttaagtttgaaacagtagtcyctgaagagctgtaattaataagccttctctgctgtcccacaaaacacatgtagtaaaagcaggaaataaaactttcttatcttaggccactaatactttgg

SEQ ID NO: 686502 - DNA, 646 bp, Homo sapiens
ttattacatccagatataatatcatacacagaaagaaaattaagttctcttcttgagaactttagaagaatgatttcttcaaaaattttcatggattcttggcctaaaattttattgtttaaattgaacaatttacctacaagagaaatgggatttttcttggaccaatcaggcctaccattgtatgtgggttgggatgagcataatttaagacatacatctgtgtaaaaagaatggtggaaacttcaacaaagttggagattctcttaaaaagaagaaaagtggaaaataataacaatcttccttactttacttattaacacccaacagatgatatttagagacatcaaataccttgtccaataatttgagtggccaggcctaccattgatgcctctctctttttgaatatggaatggccagtgagaayattggttaatcctctcaacttgcacattataatttacacccaggaaaatactgaaggcatgtcctggcatgaaatactaatgaaatagtcaagagactcttctactttcatcacaaccagtgagtcattgtctgactcacagtaagacatgtacatctgtgcttagtaatacaattccactgtaccaaagaaattagcactgatgcatagatttac

SEQ ID NO: 686503 - DNA, 600 bp, Homo sapiens
agtttgggaggctgaggcgggaggatagctagaccccaggagttcaagaccagcctggacaacatagcaagaccttctctctacaaaaactcaaaaaattagccaggtgtggtggtgcatacctgcggtcccggctacttggcaagctgaggtgggtggatcacaggagctcaggtggttgtggctacagtgagctgcgatcacaccaccgaactctagcctgggcaacagagcaagactctgtcacaaaaaaagaaaaaaaaaggattagcttttgtctgtggtgagagacaaatatttgtttcagtttgcaatttgtatttttacctctgcttatcatacttcttactgtgcagacatttttcatttatatatagtctaatttatcaatattttctttttctaacttctggatttagtagaaacattttttttcctctgccaagttttaagggaattctccaaagttttctttgattacttttatggttttattttttatgttaaaatctttgrttcatttattcttgtgtgtctttccagatgtctatctagttgtcgcaacactctgtgaaaaaaatctttaaccaactgatttga

SEQ ID NO: 686504 - DNA, 2035 bp, Homo sapiens
tagggttgagaacaggctttattgctcagtgaacaagctcctggaccagaaaatgtgtgccttgcttttaaatctttcataatgttctttttgctactcctacagctagggtttgctcgttcttttcttaaaatgctgttccctttattgactcaaagattactatctggcgtcacctagaccacttaaccgtatatcataatgcccattaaactatgtttctatgaatgtatgaaaatagtactaaataatgctgggcacagagcctcagtgcacctatgtatcagaataagcaataaaatgttttactgactagagaggtggtacttgaagacagggttatgaaaggtccccagtgccctctttaagagaatatgtcaaatgatttcattggatgctgtttgcatgtgaactaacaaaacaggagatacatctaaacgatccttcctcctgctaatctgtcacccagaaacactgaagtttaagaatttcttaagactctaattgtgtccttctatctttctcaacgagtgagacagcaggggtcagggaatgaatgcaaatatggggtgagtattttaaactatgagagcataactattttagattataacatgagacttttccaagcaggctaccattacttagtagtgaagagcacactgccgctaaaaatcagcgaagagctgatgaatatgcaatgcatgaaatttgaaagctaaacactagttaagatattgttttctaattcttctgcagcattgtcaatattacaaaacagtttaaratctttacaattaaaaaaaactaagtaaacagttaccacctacatttgaatatttaacaaccccctgaacagaaaggcaatttcaaacatactctaaatgttctgtcttaatttgagtgataaaattgctaatatcatgcacaaatttgtgtaattattcacatatatgagagcatttacttagcattgaatattaggagatagtagtaaataaaatacaattccaagtttaaaagtactttaaaaccagtaattattgaaattgttattctggtagtcatttaattaaagtctccaagtacacggtagaattatccttttctaccactttaaagttacatgtgactatatgacgtgttttggtcaatgaaccatgagaaaagtgatgtgtactacctctagacagaggttttaagagctaaagggggattttctagagtctccttcctcctactttagtgccttacaaggcttcagatatagcccctccatctttctgcgccatgtgggaagacatggagtagaatggagaccccagtcaacccaagatttgcataaagcatgagcaagaaataaggctttgctggggtttctttggtgctacagcataacctggactgtcttgaccgataccattaaagagatgctgctaaagaaaatgtgacattgtcttactcctaaattggaaagcagggaataaacagatgttgcaaaatggaatgcgatgatacatatggcagaagatttgtttaatttgttgccttcattcatttgtgaagcagacaatatacctaaaggattgcagctgtagagaaagaggttgcaaagtagaatgttatttctgtgtattgattgataggactgcattggataaggcagtataaaaagagggaatctaagaaagaagaggttggtttaataaaataaataaagaagaataaagtacagaaatttagagatttgcctgactagaaggggtaaggattctttaaccccaaatgataaatgatgaaatggaaaagtttaaaagtcaaagccatttaaaattcagccttgtggcaaatatttaatcaatgctaaagttaatagacccatcgttaaaatatctaaatgaattaagatgtttcagagcagaaaccaaattcagaaacctagtaaatcctttcaatgaaagaggtaaggtagagaaagactcaatatgggactctcaaatccaaatcttaaaagtcaagccacctccaattaagt

SEQ ID NO: 686505 - DNA, 600 bp, Homo sapiens
ggtactttttwatatacttcaagcacaccaggctgagagcaacagacttgttaaatgaatgattttcggggacttaatctgagcatcattaagggtaggaatagacttctaactgtggcttgcaatcttatttcccagaggcatgtgtggatgtaatgaactgacttgaatgtttccaggagtgcctgttacgtgccaaactgttaggcttagcattttcatgtacatacattctcattcgcttgtcggaacaacacagtgaagcagaagtgttgggcagctatgaggttcagtgaaggtaagcaacttgcagaaactcatgcactggggaggagggaagaggtagcctagctagaggctggattttaatccagatggtcaggccaagtctagcatgcttaccactttactgccttgtaatgggagcctctgagactttaagaggcctatctggagctagaattctgactttggtgaaagatttcctgtactttaagaaagtagaaatactaaatcttgttctgggaacattgttcccagttcaggatgtgtttgccatgtgcgcaagttatttaatctgttaatcttaggttccccaat

SEQ ID NO: 686506 - DNA, 602 bp, Homo sapiens
tgcctgtggaatggataaccaaatgaagggaggtacatgaattgttgttcacttatctgaggcctaatgtattttgatcatgtagaacttgcatgtaggttaataatattgagtgaatgcatgatattaaaagtagaatttatttagtaaatataccctaacttccatgaatacacatttgtcaaatgggtcatgaagttttggaagaaaaatgtttcaaaactagaccacaaagaatacctcaataaatagaaatttttttataaagtcatcttagttgtatgtattaataaatctatactgtgtaacaaaatgagaagcaaacagaaatgaaatcactagcagtatttttaactaataatcaattctcaattcaaagataaaatctaaaaagaaggacagactatttttcaattacactagattctaaatcctaaaaaamaaaatcccccaaacaatacactgaggggaattagtgacctttgaccctgtaatgggtgccaaatggaatttaaattttatatttttaccttgtacaaaaaatagttcccaagaggtaactgctaactgaagtactttttaaaaatgagtgagtgaatcat

SEQ ID NO: 686507 - DNA, 613 bp, Homo sapiens
taaatgaacataatatataaatgcaaaccatgttagcaattataaatagtataatggaaaacatatttttcactcaactatttttaaagrtattttaatgggagaaaatttttagtaaagatgcagttgaataagagtctaattttatttcattaagatttttttctaaaggcataatttggatttgaaaaaataaattgctgggtgcattggctcatgcctgtaatcccagcactttgggagactgaggcaggcagaccacgaggtcaggagttcaagaacagcctggccaatatggtgaaaccccattaaaaaattacaaaaattagccaggcgtggtggtgcacacctgtagtcccagctactggggaggctgaagcaggagaatcacttgaaactggtaggcagaggttgcagtgagccgagatcacgccactgcgctcctgcctgggtgacaaagtgacacttcatctcaaaaaaaaaagagaaaaagtaatagaaaaagaaaaaataaattaactgtaaaagtacatataaacatggagatatattacatcataaaaggagggagatcaatcttctttgaacgtttctctgttatacaaaaaaaaaa

SEQ ID NO: 686508 - DNA, 653 bp, Homo sapiens
tgccttgagaaggaatcccatgtgccatccttcctccctataggcatgagcaattcacaactttacagagcaaaagatggaagcaggcatggtgcgtttcagccaacctctgaatccaaggatctactcatcaataccgctgtgcatttctgaaagaaaaaaaaaatgtatataaaatgagaacaaagagaaaaagggtgttctaagagacataaatttaacatctagacatgaaactagttcagggaaaatctgaatatgtgttgttggctcatggatacaactgttcccaactctcttcccttcatgcacttcaaagtggatattacactctatacatattgctgggtgctagcaaatcttctcaatggagttcaaactaagatttcctctttaattataattatggcacttagcrtgaattacggaaggggcatatccaccgttgccatggcatctggctatacatggtttgtgctccaagtgaagaatcttccaaacctgccctgctaattggaatgtttggtctttacaaagttggtgtcacgtaatcatttgaaagctccatgtttaaagcagctatataacacaatgacagataagaatttaaaatgttgtgcttataacaaatacatgtgtattactataacatg

SEQ ID NO: 686509 - DNA, 332 bp, Homo sapiens
agcacagtcacaaacatttggactaagaagaccatggctgacctcccttgatttaaaaaaatgttaaaagttcacatttccaaagtatattcctaaaaaggcatctctcaggattttgttctatgatatagtcatttgtcattggtaagaagtttcaaaaacaggtcagtgaagaagagttgaagggatatttgagtctagagagaagattcatttagtgggaaggaaagagaacatgtgagttatcttgacatttctggaaggctattaatgggaggaagagtccaaatgtyaaatatggttccaggaaatttccaccaaatatgtggaat

SEQ ID NO: 686510 - DNA, 1307 bp, Homo sapiens
actcaagttttgttaagaaagcttccacatctatatcagattgaattatactttcaaagaaaactgtagatatgcaggggcattttcaaaggataaaattcatttagacaaacctgaaaacatatcataaactctatgccaggttgcttttggtttctagggaaaacaaatttataatggagcaaataaatcctgtgattggagcagaatataaacaaagatacaaaacaaatgtgtaataatgactttttcagaagtaaaaacaagacaaacaatactttaaaacaaaaccaacatgaaaggaaaatcattttccaagaaagcattttacaatttttaaaaagtaatgtttttccattgtgtatatatgttaagtgaaataaaccaggcacaggaagacaaacatcacgtgttctcacttatttgtgggatctaaaaatcagaacaattgaactcatggacatagagagtagaagaatagttaccagaggctgggaaggatggtgggggaattgaaggaagatggggatggtgaatgggttaaaaaaaaaaatgcataggaagaatgaataagacccattatttgggcttatgcctgtaattccagcactttgggaagcagaggtgggaggatcttttgaactcaggagtttgagatcggcccgagcaacatagtgagaccttgtctctacacacaaaaataattcaaaagacttactatttgatagcaccacagggtgactgtagtcaataataacttaattttacattttaaaaccatttaaacagtgtaattggattgcttataactcaaaggataaatgcttgagggggtggatatcccattcttcatgatgtttttatttcatattgcatgactgtatcaaaatgtctctgctaccccataaatatatgcacctactatgtaccaacaaaatttaaaaatataaaattttaaaaaataatgtttttcatttctctaaaatgtsaactgtatctatctaattttcctccagctaaagaaatacaaactatgaaagtcactggtaaattaacataaagtactcaaataacacacttctttccttctgaaataattaccttttcactcactattatgaactaatttcatatacattttagttgcatgaattattatatacaggaaaaagatacagtttacatttattattaacacagtagtatttgaaatatttaattttagaaagacattattgtgagatgatgttaaattttcttattgcaaatgatttcactattggaaaagcaaggaaatattgagtaat

SEQ ID NO: 686511 - DNA, 1307 bp, Homo sapiens
actcaagttttgttaagaaagcttccacatctatatcagattgaattatactttcaaagaaaactgtagatatgcaggggcattttcaaaggataaaattcatttagacaaacctgaaaacatatcataaactctatgccaggttgcttttggtttctagggaaaacaaatttataatggagcaaataaatcctgtgattggagcagaatataaacaaagatacaaaacaaatgtgtaataatgactttttcagaagtaaaaacaagacaaacaatactttaaaacaaaaccaacatgaaaggaaaatcattttccaagaaagcattttacaatttttaaaaagtaatgtttttccattgtgtatatatgttaagtgaaataaaccaggcacaggaagacaaacatcacgtgttctcacttatttgtgggatctaaaaatcagaacaattgaactcatggacatagagagtagaagaatagttaccagaggctgggaaggatggtgggggaattgaaggaagatggggatggtgaatgggttaaaaaaaaaaatgcataggaagaatgaataagacccattatttgggcttatgcctgtaattccagcactttgggaagcagaggtgggaggatcttttgaactcaggagtttgagatcggcccgagcaacatagtgagaccttgtctctacacacaaaaataattcaaaagacttactatttgatagcaccacagggtgactgtagtcaataataacttaattttacattttaaaaccatttaaacagtgtaattggattgcttataactcaaaggataaatgcttgagggggtggatatcccattcttcatgatgtttttatttcatattgcatgactgtatcaaaatgtctctgctaccccataaatatatgcacctactatgtaccaacaaaatttaaaaatataaaattttaaaaaataatgtttttcatttctctaaaatgtgaactgtatctatctaattttcctccagctaaagaaatacaaactatgaaagtcactggtaaattaacataaagtactcaaataacacacttctttccttctgaaataattaccttttcactcactattatgaactaatttcatatacattttagttgcatgaattattatatacaggaaaaagatacagtttacatttattattaacmcagtagtatttgaaatatttaattttagaaagacattattgtgagatgatgttaaattttcttattgcaaatgatttcactattggaaaagcaaggaaatattgagtaat

SEQ ID NO: 686512 - DNA, 1307 bp, Homo sapiens
actcaagttttgttaagaaagcttccacatctatatcagattgaattatactttcaaagaaaactgtagatatgcaggggcattttcaaaggataaaattcatttagacaaacctgaaaacatatcataaactctatgccaggttgcttttggtttctagggaaaacaaatttataatggagcaaataaatcctgtgattggagcagaatataaacaaagatacaaaacaaatgtgtaataatgactttttcagaagtaaaaacaagacaaacaatactttaaaacaaaaccaacatgaaaggaaaatcattttccaagaaagcattttacaatttttaaaaagtaatgtttttccattgtgtatatatgttaagtgaaataaaccaggcacaggaagacaaacatcacgtgttctcacttatttgtgggatctaaaaatcagaacaattgaactcatggacatagagagtagaagaatagttaccagaggctgggaaggatggtgggggaattgaaggaagatggggatggtgaatgggttaaaaaaaaaaatgcataggaagaatgaataagacccattatttgggcttatgcctgtaattccagcactttgggaagcagaggtgggaggatcttttgaactcaggagtttgagatcggcccgagcaacatagtgagaccttgtctctacacacaaaaataattcaaaagacttactatttgatagcaccacagggtgactgtagtcaataataacttaattttacattttaaaaccatttaaacagtgtaattggattgcttataactcaaaggataaatgcttgagggggtggatatcccattcttcatgatgtttttatttcatattgcatgactgtatcaaaatgtctctgctaccccataaatatatgcacctactatgtaccaacaaaatttaaaaatataaaattttaaaaaataatgtttttcatttctctaaaatgtgaactgtatctatctaattttcctccagctaaagaaatacaaactatgaaagtcactggtaaattaacataaagtactcaaataacacacttctttccttctgaaataattaccttttcactcactattatgaactaatttcatatacattttagttgcatgaattattatatacaggaaaaagatacagtttacatttattattaacacagtagtatttgaaayatttaattttagaaagacattattgtgagatgatgttaaattttcttattgcaaatgatttcactattggaaaagcaaggaaatattgagtaat

SEQ ID NO: 686513 - DNA, 619 bp, Homo sapiens
cttgcacctgtagtcccagctactcaggaggctggggcaggatgatggctttagctcagaaggtgaaggctgcagtgaaccatgatcacaccactgcactcyggcctgggtgagaccctgtctcataaataaaagatagtgctactcttagtagtcatatgtttggtgtgagttcttaaatgagagttaagaaatcataaattctcagtatctgagtacatatgaatgcatttcatatgctaagaaaagtgtttattaatatcatttctctaaatgtaacgtgtgcaggctgatgttttttttcccctaaaataacagaaattcctacttttcaatttcctatttgggactgttaaactgactacaactgtatagtatttgtgtcatctatttacttgataatgttgtaaaactgggtatcttttttaaaaattagcatttttaatggcaagagaagtaaaatctttggtgtttttataatgcttttattttttcctttttagtgttctcacatcattttataatgctgaggatgaatcaaatcttctcttacctaaactacctacactgccaaaaaagtatgtatcactggtttctttgaaattaatcttgcagattt

SEQ ID NO: 686514 - DNA, 1436 bp, Homo sapiens
gtttcaccatgttggccaggctggtctcgaactcaacctcaggtgatctgcccaccttggcctcccaaagtgctgggattacaggtgtgagccaccatgcctggccaacttaccctttttgttgttcaatgttatgctttggggatttgcctgttttcatacagagagctgcagttcagtcagttcaagtctgaagtctagagtattccaccaggttaatacaccaccagttatgtattcatttttatgctgtgggcatttaggatgttgcaagtttgtgctgttacttcaattaacactttcctaccagtctgcttgtcttcttgctataatgcgtctagagggtgtatctaggagtggaattcctaggtcaagggatctgcaaatatccagccttactatatgttgccaaactggactccacagtgatcaataccaacataaactctcactagtgttgtggaacagttcctgtggccctgcctgcttaccagacatttagtgttgccaaaatgtgtaacttttggccagtctggtgggtaggaawcttactgttcagtatttgaggactcgagagctaggaaatccttaagagggaaggttactgacagtttttgaggacctactctgggcaaggcactgcaacaccgtctgcttgaattctcctgagaaactctgcgaacttggtattaacatcctcttttcactaaggaggaaactgaggcttgttcagggtcccactgctggtggaagagcagggattggagttcagctctgtctgtccccaaaccctgccctccccttaccaactcctccatagtccaaatgtctcacttctacagagaagaaaatcatgctctagagaggcaaggcagtgggactgtcccacaatgaggaggtggcagagaggactggaagcctgctccataggggtgaccaaactttaagagctctcccttgaagctctcctggctctactggccccgtggcatccacatgccctgagcaggaccacaacatggcaacttcattattgctgccgaggtcctgaacctgcccaatctcctggccttctgggagaggggaatgttagctacaagctgtcactcatgtgccaggaagtgtgctatgtggtgtacttacgtgaccacattgaatcctagataccctcattgtttccattttgcagatgatgaaatgaaactcagagagcttcgttttccctgtgctgttcccactcacacaccctggcctcaagcctcactttctcactctcttttccaaccaggggaatgccagaaatgcgcctggagggaaacagctggggagaagagcctcattttactgcttctgctcaaggctcttccaagctgagtgttaaatgccattccttttttcttttcctaaaatgaaatgtacttaaaaaaaaaaaaaaa

SEQ ID NO: 686515 - DNA, 641 bp, Homo sapiens
tctatcaggaaagcaatcggaagtcaggccggcttttgcttttgttctgccagctactctacggaatcgtaggtgaagccggggtgggcggatgccccgggagggggctgtggcgggagttccaggtgcgtccccgaaatgaccattggaggcggcggctgtttcccgcccctgggtggggaatggattccgatcgctaatcgataccctggagccagcagtgggtcagcagcgtcccgacagagcgcagcggccgcgtactgtcacgcgcctctccagcactctcgaaagcactacctcgagacgtgcatttccattcatggatctgtgcctgggggttgattaatgtcacccctgcctgggttraggagtgtccacaactgctcagtagccatttactgggaggttactgtgtgcaaggcagctatcttaaataaccttaatgtaaaatatacttattgagcacctactatgtgaaaagcaggtatactgcagacttttcaattgaatggatatgtattgagcacctaccccgtgcgaaggtgaagcgtcatgacgttctcaatgtaacagatatttattgagtacctactatgttcaagatagctatgctatgaccttattgtaatatgtatttactg

SEQ ID NO: 686516 - DNA, 641 bp, Homo sapiens
tctatcaggaaagcaatcggaagtcaggccggcttttgcttttgttctgccagctactctacggaatcgtaggtgaagccggggtgggcggatgccccgggagggggctgtggcgggagttccaggtgcgtccccgaaatgaccattggaggcggcggctgtttcccgcccctgggtggggaatggattccgatcgctaatcgataccctggagccagcagtgggtcagcagcgtcccgacagagcgcagcggccgcgtactgtcacgcgcctctccagcactctcgaaagcactacctcgagacgtgcatttccattcatggatctgtgcctgggggttgattaatgtcacccctgcctgggttgaggagtgtccacaactgctcagtagccatttactgggaggttactgtgtgcaaggcagctatcttaaataaccttaatgtaaaatatacttattgagcacctactatgtgaaaagcaggtatactrcagacttttcaattgaatggatatgtattgagcacctaccccgtgcgaaggtgaagcgtcatgacgttctcaatgtaacagatatttattgagtacctactatgttcaagatagctatgctatgaccttattgtaatatgtatttactg

SEQ ID NO: 686517 - DNA, 641 bp, Homo sapiens
tctatcaggaaagcaatcggaagtcaggccggcttttgcttttgttctgccagctactctacggaatcgtaggtgaagccggggtgggcggatgccccgggagggggctgtggcgggagttccaggtgcgtccccgaaatgaccattggaggcggcggctgtttcccgcccctgggtggggaatggattccgatcgctaatcgataccctggagccagcagtgggtcagcagcgtcccgacagagcgcagcggccgcgtactgtcacgcgcctctccagcactctcgaaagcactacctcgagacgtgcatttccattcatggatctgtgcctgggggttgattaatgtcacccctgcctgggttgaggagtgtccacaactgctcagtagccatttactgggaggttactgtgtgcaaggcagctatcttaaataaccttaatgtaaaatatacttattgagcacctactatgtgaaaagcaggtatactgcagacttttcaattgaatggatatgtattgagcacctaccccgtgcgaaggtgaagcgtcatgacgttctcaatgyaacagatatttattgagtacctactatgttcaagatagctatgctatgaccttattgtaatatgtatttactg

SEQ ID NO: 686518 - DNA, 638 bp, Homo sapiens
tatctatatatcatttcacttactcctccacttatccagtaaattaggtattcttactgccccccacctatttttttttttttacaggtgaggaaattcaaagatggaataaaacattgtccaggaccttccgaattttgcgggtgcacagccaggatttgaaacctggactggcagtcttggagaacacacacaccatcaaaacttccgtgcaygagctacatggcaatcactatgcagttttatgttttccatcagctattctgacctccttccatggcacatcagctggaagtgctcctgagggcttacacggcacttgttcatgccctggtgtacctcccagagctctggctcatcttaacaccacttagagatgttgttttgtttctctcctaacctgagcttcacaacagcatcgcttgcagccaagacaaaatggaatggtcagagaggaaaataagaaactggctttcctttcataccatgctgtcccaggggtggttttagatatgtgtgaaagagactcaaagtctgtattctttgagttaacaaaaccatgttactacctgttcagaaggaaatagcagtggtattcataacaacacaaaggaaaaaaaattaaggcaattgtctcg

SEQ ID NO: 686519 - DNA, 638 bp, Homo sapiens
tatctatatatcatttcacttactcctccacttatccagtaaattaggtattcttactgccccccacctatttttttttttttacaggtgaggaaattcaaagatggaataaaacattgtccaggaccttccgaattttgcgggtgcacagccaggatttgaaacctggactggcagtcttggagaacacacacaccatcaaaacttccgtgcacgrgctacatggcaatcactatgcagttttatgttttccatcagctattctgacctccttccatggcacatcagctggaagtgctcctgagggcttacacggcacttgttcatgccctggtgtacctcccagagctctggctcatcttaacaccacttagagatgttgttttgtttctctcctaacctgagcttcacaacagcatcgcttgcagccaagacaaaatggaatggtcagagaggaaaataagaaactggctttcctttcataccatgctgtcccaggggtggttttagatatgtgtgaaagagactcaaagtctgtattctttgagttaacaaaaccatgttactacctgttcagaaggaaatagcagtggtattcataacaacacaaaggaaaaaaaattaaggcaattgtctcg

SEQ ID NO: 686520 - DNA, 638 bp, Homo sapiens
tatctatatatcatttcacttactcctccacttatccagtaaattaggtattcttactgccccccacctatttttttttttttacaggtgaggaaattcaaagatggaataaaacattgtccaggaccttccgaattttgcgggtgcacagccaggatttgaaacctggactggcagtcttggagaacacacacaccatcaaaacttccgtgcacgagctacatggcaatcactatgcagttttatgttttccatcagctattctgacctccttccatggcacatcagctggaagtgctcctgagggcttacacggcacttgttcatgccctggtgtacctcccagagctctggctcatcttaacaccacttagagatgttgttttgtttctctcctaacctgagcttcacaacagcatygcttgcagccaagacaaaatggaatggtcagagaggaaaataagaaactggctttcctttcataccatgctgtcccaggggtggttttagatatgtgtgaaagagactcaaagtctgtattctttgagttaacaaaaccatgttactacctgttcagaaggaaatagcagtggtattcataacaacacaaaggaaaaaaaattaaggcaattgtctcg

SEQ ID NO: 686521 - DNA, 621 bp, Homo sapiens
ttctgcctgcaggtgtctgcggcgaggcctctagggtacagcccgatttggcctcatggtgggtttcggggccaaccggccggctcgccgcctgccttctcttgtgctggtggtgctgctggtagtgaccgtcgtcctcaccttcaactgctggagcatctcttcytgccacgtcctgcttcaggaggaggtggccgagctgcagggccaggtccggcgcaccgaagtggcccgcgagcggctggaaaagggcaattcggacctcttgctgttggtggacacgcacaagaaacagatcaccagaaggaggccgactagggccgcctcaacagccggctgcaggtcagacagggcctggggaagagatgcgaggatgacaaagttaaactacagaacgacatatcatatcagatggcagacatacatcatttaaaggagcaccttgccgagggcttcgtcaggagtttcttcgacaagaagaccagcttcaggactataggaagaacaatacttaccttgtgaagaggttagaatatcaaagttttcagtgtggacagcagatcaaggaattgagagcacagcatgaagaaaacattaaaaagttagtagaccagtttttac

SEQ ID NO: 686522 - DNA, 621 bp, Homo sapiens
ttctgcctgcaggtgtctgcggcgaggcctctagggtacagcccgatttggcctcatggtgggtttcggggccaaccggccggctcgccgcctgccttctcttgtgctggtggtgctgctggtagtgaccgtcgtcctcaccttcaactgctggagcatctcttcttgccacgtcctgcttcaggaggaggtggccgagctgcagggccaggtccggcgcaccgaagtggcccgcgagcggctggaaaagggcaattcggacctcttgctgttggtggacacgcacaagaaacagatcaccagaaggaggccgactagggccgcctcaacagccggctgcaggtcagacagggcctggggaagagatgcgaggatgacaaagttaaactacagaacgacatatcatatcagatggcagacatacatcatttaaaggagcaccttgccgagrgcttcgtcaggagtttcttcgacaagaagaccagcttcaggactataggaagaacaatacttaccttgtgaagaggttagaatatcaaagttttcagtgtggacagcagatcaaggaattgagagcacagcatgaagaaaacattaaaaagttagtagaccagtttttac

SEQ ID NO: 686523 - DNA, 634 bp, Homo sapiens
agagcttctcaggctcaaccaccaktagatgagacaccagtgcattcactgggcctgtcgtctgggggcctccagcgactgccaggggcccagcagggaaggcgcccgggaagggcagcgggtccacctctggcaccgcttgtactcccgcccaccccggacgcggtccaggcgcgctcccgcaggctcttggtgaagcggcaggcctgacaggccttgcgtctccgcttggtgatctcacactcgttggaggccagacagctgtactccatactcccctggatggtcctcttgaagaaggctttgcagtcctcacaggatgacacaccgcagtggtagccggaggccacgtccccacagaccaggcagaggcgcttggacagggagctgagcaccagcttcccaccgccctgctcgccaggcccagccccctccccatcctcctcttccttgtggcctgggaggcagtgggtgggagctggaccaggggccagggccacaggaggctcgggtctctgtctccgaggagccctttggactgtcaggcctggccggctctgccatgatgtagtggctcactgcccaccacctggctggacatggcgctggtcacctgacacgcggctgccctcct

SEQ ID NO: 686524 - DNA, 634 bp, Homo sapiens
agagcttctcaggctcaaccaccattagatgagacaccagtgcattcactgggcctgtcgtctgggggcctccagcgactgccaggggcccagcagggaaggsgcccgggaagggcagcgggtccacctctggcaccgcttgtactcccgcccaccccggacgcggtccaggcgcgctcccgcaggctcttggtgaagcggcaggcctgacaggccttgcgtctccgcttggtgatctcacactcgttggaggccagacagctgtactccatactcccctggatggtcctcttgaagaaggctttgcagtcctcacaggatgacacaccgcagtggtagccggaggccacgtccccacagaccaggcagaggcgcttggacagggagctgagcaccagcttcccaccgccctgctcgccaggcccagccccctccccatcctcctcttccttgtggcctgggaggcagtgggtgggagctggaccaggggccagggccacaggaggctcgggtctctgtctccgaggagccctttggactgtcaggcctggccggctctgccatgatgtagtggctcactgcccaccacctggctggacatggcgctggtcacctgacacgcggctgccctcct

SEQ ID NO: 686525 - DNA, 634 bp, Homo sapiens
agagcttctcaggctcaaccaccattagatgagacaccagtgcattcactgggcctgtcgtctgggggcctccagcgactgccaggggcccagcagggaaggcgcccgggaagggcagcgggtccacctctggcwccgcttgtactcccgcccaccccggacgcggtccaggcgcgctcccgcaggctcttggtgaagcggcaggcctgacaggccttgcgtctccgcttggtgatctcacactcgttggaggccagacagctgtactccatactcccctggatggtcctcttgaagaaggctttgcagtcctcacaggatgacacaccgcagtggtagccggaggccacgtccccacagaccaggcagaggcgcttggacagggagctgagcaccagcttcccaccgccctgctcgccaggcccagccccctccccatcctcctcttccttgtggcctgggaggcagtgggtgggagctggaccaggggccagggccacaggaggctcgggtctctgtctccgaggagccctttggactgtcaggcctggccggctctgccatgatgtagtggctcactgcccaccacctggctggacatggcgctggtcacctgacacgcggctgccctcct

SEQ ID NO: 686526 - DNA, 1375 bp, Homo sapiens
gtgaacgtgagtggcctttacacaggcgctaacagaaattacacaagtgctcatattttatgagtcaattcttaacctacaaagcgatatgaacgaacaaataaatgcatctttctttcttctgcagtttcctctgtttttctgagaggaattttacaagtttcattggaggtttctgtagaatcaaactaaaattactcagagtggtagcacattggatggcacatgcatgtattggctttcctacattccgggcttgtttcaacgcctcacctgttccccattgctgctccttgagatcatattaccagcaaaatccttcacacataagtctttgattcatgcatagtttctgagtaacgtagtctaagacaggtaattttgtggggcctcctagcactccattggctttaagcctacgttagccagatcctatcaatctccacttaaccttttgcttggagtccaatgattcgattatccgtgcttgaggaacattcagaaatttatgtccctagagaatgacctacaggaaacacaaggatagcaaacatctctgtttcatttccacttgtttctgtgtatggccataatcccaaagggaattcagattatttccctaaacctcaaggacattgtttgtgctaatctccagggaatggtgaaatcactgatatgtttctcaggaatagacatcaaagacaatttctcccaagatttatatttgttatttttgttgttgtttctgttctatggttatatatgtacgtaggggaaatatttcctgaaacaatttgctgtggtttattgcaggaagtaataatgttggacagcttcccacccaggaaggcattatgtaaacatttttcactgactaataggatttaattaccaagtagaatactaactgagttgatttatggactaaataaatgttattttattagtaccatcttttgggtgatagtctaaatgctgtgaaaaatttacgacaatcctaagttcttggatcattcaagttttttttttttgcataaagactagtatcaaatagtttaagtaatcaaccatttattctttcaggctacatgatctttaaagtggtatgcactatccatactataaaataatacacagaaaatgtgaaaaaacttatgcattacatatttgtaaaactttgctcttaaaggaccagggaattaagaaaggtgtctaaatattggtaaaaatgacatgttaataagaaatagttttatctgtttaaacatgaaaaaaatcacatactacaaatgtatataagtagttacataatagtacttacattaatatatattcgygttgcagataaaaagagctgcaatgactaattgtaata

SEQ ID NO: 686527 - DNA, 606 bp, Homo sapiens
gtttgtttccattcgaatttgtactgaaaatacttactttgattctctttaatgaggcacattctaaaatgaatttttaacctataatagtcttctcaaaaagattaaatcaatatcaccttgattctatattcactttcctattataaatattaccatttataagaatatagggaccgtgttaaaatttgtgatttactcaataaagtaaacagtttttgtsttattaccagaaaatttaaataggtaaaattatattaaaatgttaaaaactattttttcattctctttggaaaattgcatgagctaatattggtaggctatctggaaattattttattacccatcatatagaaggaggataatttctgacataagtttattgtaaaaccaactaataatacaatttctactttagccaaagtttgccgtcaagtggtgtgataaactttgtggttataaattaaaattttatgtaacttggaacaataatgcagactgaaaatagaaaagtttaatagtcaaccattaaattaaattaaatacttttaaggtggttccatataaaatgtttaagtttcttcaagtaaattttaattaagcttc

SEQ ID NO: 686528 - DNA, 1411 bp, Homo sapiens
tagtgaacattgccagagagtgtatttagaattttaagagagcagtttcaaacaaattatagaacagatattgaattgcagctacaaagttataaagatataagccactcttactttcaagtgctaaatgactagagtcataaagaacttatttaaagaaagacatttaaggaaactgaagttgtaatatagagactttactgagggtctatgattttaaagacatgtatgtatacacatatgacccagattgaatattaaatacaggatatacccttctaataacattgccaagctgtctaaagcctaaaagatttaggaatatgaaatacgttaagctagtatttcctaaagttctatttgaatattaataatgaataaatttggtagaaaaggtattcaatggtagtcagacaaatagatgatttgctgtattactttaactacagaacttggcagaatctctaatattatcatgttttttgtttatcattaaaagtagaaatgtagtatgtaacatagctaccaaaaaaatctcatctagctgaaaattttgaatgatgctggtgtgggctgtgttgtttcaataatcatgtaactattctcatctccagttcattccttctcacatttgatttacatatcactagtatcatagaatatgcttactttaaaacattactttttctattctgcagataattcattgctatatcattcaactcaaaaattgttaacctggcattttggagcctctaaaaattgactctgaactttttttataactttatttcttcttagttccaatcataaacactgttctaaataggtagatatgaccatggttaatatttcctcccaacatgcccctttagtgaaaagaagcccagacttaagaggacctgagttcagtctcctttactgtttatttrtaatatatattaaatttttctttaatttcttttctgtagtagtaattgtactgactacaagtaattaatgctataattttatagatgagaaaacacgtcaagtaaattgcccaagagaacacagcttttatatgtgctggaactgggattcaacccaaaatgtgtgtgatttccagctctatgttattttcactataccgtactgaattaaagagcacaaaacactgaagagtgcagtatatacaaactacgaatatgatgaatttcagttcagcttttcaaaagttcacgtgaagtttatggctcttataaaattacttggaaataagactgtcagtcccagcatacataagatgtttggccttcttagatagggactattcttttctgtgccacctaaaccctaactcagcagtacttatggattttgtctaaagaattttcctgaattaacttttcccttttctgatttgtctttt

SEQ ID NO: 686529 - DNA, 1402 bp, Homo sapiens
  misc_feature 744, 745, 746, 747, 748, 749, 750, 751, 752, 753, 754, 755,756, 757, 758, 759, 760, 761, 762, 763, 764, 765, 766, 767,768, 769, 770, 771, 772, 773, 774, 775, 776, 777, 778, 779,780, 781, 782, 783, 784, 785, 786, 787, 788, 789, 790: n = A,T,C or G
  misc_feature 791, 792, 793, 794, 795, 796, 797, 798, 799, 800, 801, 802,803, 804, 805, 806, 807, 808, 809, 810, 811, 812, 813, 814,815, 816, 817, 818, 819, 820, 821, 822, 823, 824, 825, 826,827, 828, 829, 830, 831, 832, 833, 834, 835, 836, 837: n = A,T,C or G
  misc_feature 838, 839, 840, 841, 842, 843: n = A,T,C or G
tttctgaataagtcacagtgaatgtgtaaactgctaccttaaagttactatttatatttgaggagttaaaattagaatgacaagaactctcattattttacattaaaaataattcgacattttttttatggtcaaattagaacccagtaggttagacttagcaagttccaaaagcctgagctagtgagggggtaaagacagttttgccgtgggaatagaaagtttrcaaactttctatttctaaggggaatctaaaaaataccactagcatctagttgaggagagcaggccccacaggttgcagacaggcatacagaagtacactaaaggtctgggaagatcagcaacaaccttttatgagtcactgggatatgagctaagactgtaaactcttgaagggaaaaattacatcatattcgtccttttatctagggtttagcccaatgtctgcagtgggtacacagtgggtattggctgagtacatgagtggaaggaagaacacactaggataaggcatactagtttaaatgcagtcatgatgcagagcctggaaagctttgtggatgttacacattgtaattacaaatatcatgttgttttcctggactctgacagtggttggagaagtagctagttcctgcaacaagtcttaataaaattcaaaataacagttccagcatctatcctcctatggcatattttgccctctattccttactggctaaaattacagttcccaaagtnnnnnnnnnnnnnnnnnnnnnnnnnnnnnnnnnnnnnnnnnnnnnnnnnnnnnnnnnnnnnnnnnnnnnnnnnnnnnnnnnnnnnnnnnnnnnnnnnnnnttgctttagcattacttttcttggagactttagtagaataatagaaattttttcaatatgtggacaagtcctatcagctgttaaagagcagttttgatagttgctgtttttaagtacaaaatttgggtatattcttctgggaacgttttcatatacacatataataattattattttttattggacttcccgatgggaatttaacttagataactacaacatcttatggaattaaataaatatatgttatgaggtttttatagacattactactgtttattttgacctagtatagtcaattatgccacagtacatttaatggtaatgatcatatcagtaggatattactttggttaataaagttacatgaaattatgctgaattgagattgaatatgatgtagacttttctcctccaacactagagcttaaaagaaactctagtttaacagtttttaaataagtacattatttattattcttaggtttaaggtaagaatggttaattcagcataaaacgtttattttaggtgagcaattttaatccaaagaagcaggaa

SEQ ID NO: 686530 - DNA, 644 bp, Homo sapiens
ctcttcatctcacaaacaaaagcagcccatatgagggaaagagaatttggcaagagaagggttacaatgtgatcytttccaaaaaaggagagatccatcccctctccaccctgctgccagagtgagctcctgctaatatgctaatattaacatcctgtttaaaacccttcaatctttggacaacatgtgcaatctttcatagggctcacaaggtttgatgtaggagggtttgcacctgctctccctccagccacattgactttctttcagttcctccagcctgccacaggatctttgcatatgctgaatgcactcacctccagctacttcttcagatcagagcttaaatgttatatcttgagctccctgtcccactcagatctgctctggttgtcacagcacattttcttcacggcacgtcacagttactatcgttttatgtgggtgttctccagcgcaggtgcaccagaagaaagctcttagtttgatgattatcaaatagctagctctacttctcagttagttcctggcatggagggaataaaggatacactctctcattttagagatgaggaaattgagctggataggaaacaatatttatctgaggtcacatggtttgttggttaattggctgatttttt

SEQ ID NO: 686531 - DNA, 603 bp, Homo sapiens
gctgggattacagacgtgagtcaccgcacctggccagaaagagtatactttggaaaaacagacaaaatctaaaattgttttcartaatattctgcgaggggagtagggaaggtgggaaagggttgaaattacctgttgtgtactatattcattgtttgggtgatgggttcaatagaagctaaaactccagcattatgtaatatgcccacataataaacctgcacatgtaccccctgaatccacaataaaaataaataagtacataaataacattctgaaactaaagttccagatcatttcaacgtaggaaatagcagcagatggctaaggtagagaagtgaaaacatgctgcttgttcttttgctccggatgaaatcctaattaactctatactttgaaagaatagtatgtttcataatgtgtttaaaatgtcaaagataattgccaaagagacagaactagcgtgcatttcttccaaaccactgaagaaaaaaaatgcatcaaggaaaacataaccaatgtaacagggggaaaaaaaagcaggaaagaaaaagaacaaactttaaaacagggtaaatgaacatttctcaaaagaaaacatac

SEQ ID NO: 686532 - DNA, 603 bp, Homo sapiens
gctgggattacagacgtgagtcaccgcacctggccagaaagagtatactttggaaaaacagacaaaatctaaaattgttttcagtaatattctgcgaggggagtagggaaggtgggaaagggttgaaattacctgttgtgtactatattcattgtttgggtgatgggttcaatagaagctaaaactccagcattatgtaatatgcccacataataaacctgcacatgtaccccctgaatccacaataaaaataaataagtacataaataacattctgaaactaaagttccagatcatttcaacgtaggaaatagcagcagatggctaaggtagagaagtgaaaacatgctgcttgttcttttgctccggatgaaatcctaattaactctatactttgaaagaatagtatgtttcataatgtgtttaaaatgtcaaagataattgccaaagagacagaactagcgtgcattwcttccaaaccactgaagaaaaaaaatgcatcaaggaaaacataaccaatgtaacagggggaaaaaaaagcaggaaagaaaaagaacaaactttaaaacagggtaaatgaacatttctcaaaagaaaacatac

SEQ ID NO: 686533 - DNA, 667 bp, Homo sapiens
gaaaataagggagagaagcaccagactttctgtggatctaggacattgttatttcttcttagagaagagtctactgagaattggaggaattaagtgactcttccaagatcagaagatagtggtagcagtagcagcagcagtagtagtaatagataaattttattacatttgctctatgccaggcactagatgaaatatttatttctatcatctcatttaattttcacaacaaatctacaaggtagatatcattattgttattcccattatataaatgccaccgaggatcatagaagtgatatcacttagctaaggtcacacagctaataaaggagaagcagagattcaaatccacgttcattagtctccaggacactataaccattttccagcccatagctgatgaagctgaaatacagagtgaagcctctatctgaaaacccttcttttccaatagaccagtccaaatcccaactttcaatgcagtacccggttctttgattagaccctggcatagggtttgttaggtgggtattgagggcctyctaaataatggagtagtgcatttggatctgtgaccacagacattttgagtcccaccatctctgatttgcacagagaccttcttgtgaccaattattgtgagtcaagagctcaggtgtccaat

SEQ ID NO: 686534 - DNA, 658 bp, Homo sapiens
atatatacatatagatttcatatgtataaatagtatacctatacatatataatctaatcaaagggtgtgtgtatatgtgtgtgtgtatatatatatatatatatatacacacgtatatgccttttaaagatttcaaatttaaccatttaataaatacacactatttaataaatagtgtgtgtatatgtgtatatatatactccttggttattttatattgaaaagctagtattagactattcagtctaattaacgggtatatgattagattgaatggtctgatactagcttttcaaatgtttgccttcgaaaaacgtaggctgtcttttcaccttgtgatattaccatccatctggctaagccccatctctctatttttaaatttttgctagtcagaatcccatttaaaggtattcatttctgagttcattagggtgaacaaattgctataacaaatacatcccaaatgtatattcacttaaattgaatagaagtttatttcttgttcatataacatyactggagccaggcgcagtggctcacgcctataatcccaacactttgggaggctgatgtgggtggatcacttgaggtcaggagtttgagaccagcctggccaacatggtgaaccacatctctactaaaaatacaaaaatta

SEQ ID NO: 686535 - DNA, 596 bp, Homo sapiens
aatctttgctattttaccatgccacttaaccatgagtaaaacccccttcagtaaaatagtcaagaaccattggctcttgacctgcaccggccaatgagtgtcagaagctctggggctaggacaaccacaatgaatgtgggagattggttgcatcctaaagaatgaatcaagtacattgaggataatggcagccagctttctcattgttgaagggaggtacaaatatgcagaagggaagactggaataaattatgtgatgttggactgtcattggaggcaataatgtgaatgcagcatttccaaaatgtgtagatatggataatatatacatgggtgtacacgtgtgtatatagttgtcctcactcagagggtctgggatcaatgacactcttgtagcactgaccacctttaatgcctaatattggtttctaaacaccattctcaactaaaagatawgagcactccttgaggggatggctgactccatggctagggcagggaaaatgcaagctaagcttggaatttctcgtggcaggaagttgttcaagaatgatgaggactgtgaaaagtcacagatgtcagtttgaaaggctgtc

SEQ ID NO: 686536 - DNA, 596 bp, Homo sapiens
aatctttgctattttaccatgccacttaaccatgagtaaaacccccttcagtaaaatagtcaagaaccattggctcttgacctgcaccggccaatgagtgtcagaagctctggggctaggacaaccacaatgaatgtgggagattggttgcatcctaaagaatgaatcaagtacattgaggataatggcagccagctttctcattgttgaagggaggtacaaatatgcagaagggaagactggaataaattatgtgatgttggactgtcattggaggcaataatgtgaatgcagcatttccaaaatgtgtagatatggataatatatacatgggtgtacacgtgtgtatatagttgtcctcactcagagggtctgggatcaatgacactcttgtagcactgaccacctttaatgcctaatattggtttctaaacaccattctcaactaaaagatatgagcactccttgaggggatggctgactccatggctagggcagggaaaatgcaagctaagcttggaatttctcgtggcaggaagttgttcaagaatgatgaggactgtgaaaagtcacagatgtcagtktgaaaggctgtc

SEQ ID NO: 686537 - DNA, 1715 bp, Homo sapiens
actttaaagtagttttttccaattttgtgaagaaagtcattggtagcttgatggggatggcattgaatctataaattaccttgggcagtatggccattttcacgatattgattcttcctacccatgagcatggaatgttcttccatttctttgtatcctcttttatttccttgagcagtggtttgtagttctccttgaagaggtccttcacatcccttttaagttggattcctaggtattttattctctttgaagcaattrtgaatgggagttcactcatgatttggttctctgtttgtctgttatttgtgtataagaatgcttgtgatttttgcacattgatttattatcctgagactttgctgaagttgcttatcagcttaaggagattttgggctgagatgatggggttttctagatatacaatcatgtcacctgcaaacagggacaatttgacttcctcttttcctaattgaatgccctttatttccttctccttgtttcaaacacaaagatatatttaaatcctggatacccgagacaaatttagaaaaaggtacattactactaagaaaataaagagtaagattttgaatttattcattcatggggatgacaagcagttttttttttttgagacggagtctcgctctgttgcccaggcaggagtgcagtggcgggatctcggctcactgcaagctccgcctcctgggttcacgccattctcctgcctcagcctcccaagtagctgggactacaggggcccgccactacgcccggctaattttttgtatttttagtagagacggggtttcaccattttagccgggatggtctcgatctcctgacctcgtgatccgcccgcctcggcctcccaaagtgctgggattacaggcttgagccaccgcgcccggccactgacaagcagttttaaatggtgatagaaaatggccgtagagagtgagtgaagagcaggaggcgtatctgcagtcagcggataattgagagaatcacatttattttttgtttgtttttttgagatggagtttccctcttgttgcccaggctggagtgcaatagtgtgatctcagctcactgcaacctccacctcccaggttcaagcgattctcttgcctcagcctcccaagtagctgggattacaggcatgcaccaccattcctggctaattttgtatttttagtagagacagggtttctctatgttggtcaggctggtctcgaactcctgacctcaggtaatccgcccgcctcggcttcccaaagtgccggtattacaggcgtgagccacagcacccggctgagagagtcacatgtttgaggagatggaacagtacaggtgaaaggttttggtgaaaggtttgcctccctgttgcaaagatacgtgtagttgcctttagggcccacttggataatgcgggataatcccccatctcaggatctttaacataatcatacctgcaaagtctttgccatagaaggtcacatttggagattccagggataaagacatgagactttggggccattatttagctagcctactaaaccccccaaatctatctacagattcagtgaaattctgtattgtaaatatttttaaattttctgtatgttatgatgtcatgacatattttaaaaaaggttcaggcaagggaaagactgactccctcagggccagccaattcttaaaaaata

SEQ ID NO: 686538 - DNA, 1715 bp, Homo sapiens
actttaaagtagttttttccaattttgtgaagaaagtcattggtagcttgatggggatggcattgaatctataaattaccttgggcagtatggccattttcacgatattgattcttcctacccatgagcatggaatgttcttccatttctttgtatcctcttttatttccttgagcagtggtttgtagttctccttgaagaggtccttcacatcccttttaagttggattcctaggtattttattctctttgaagcaattgtgaatgggagttcactcatgatttggytctctgtttgtctgttatttgtgtataagaatgcttgtgatttttgcacattgatttattatcctgagactttgctgaagttgcttatcagcttaaggagattttgggctgagatgatggggttttctagatatacaatcatgtcacctgcaaacagggacaatttgacttcctcttttcctaattgaatgccctttatttccttctccttgtttcaaacacaaagatatatttaaatcctggatacccgagacaaatttagaaaaaggtacattactactaagaaaataaagagtaagattttgaatttattcattcatggggatgacaagcagttttttttttttgagacggagtctcgctctgttgcccaggcaggagtgcagtggcgggatctcggctcactgcaagctccgcctcctgggttcacgccattctcctgcctcagcctcccaagtagctgggactacaggggcccgccactacgcccggctaattttttgtatttttagtagagacggggtttcaccattttagccgggatggtctcgatctcctgacctcgtgatccgcccgcctcggcctcccaaagtgctgggattacaggcttgagccaccgcgcccggccactgacaagcagttttaaatggtgatagaaaatggccgtagagagtgagtgaagagcaggaggcgtatctgcagtcagcggataattgagagaatcacatttattttttgtttgtttttttgagatggagtttccctcttgttgcccaggctggagtgcaatagtgtgatctcagctcactgcaacctccacctcccaggttcaagcgattctcttgcctcagcctcccaagtagctgggattacaggcatgcaccaccattcctggctaattttgtatttttagtagagacagggtttctctatgttggtcaggctggtctcgaactcctgacctcaggtaatccgcccgcctcggcttcccaaagtgccggtattacaggcgtgagccacagcacccggctgagagagtcacatgtttgaggagatggaacagtacaggtgaaaggttttggtgaaaggtttgcctccctgttgcaaagatacgtgtagttgcctttagggcccacttggataatgcgggataatcccccatctcaggatctttaacataatcatacctgcaaagtctttgccatagaaggtcacatttggagattccagggataaagacatgagactttggggccattatttagctagcctactaaaccccccaaatctatctacagattcagtgaaattctgtattgtaaatatttttaaattttctgtatgttatgatgtcatgacatattttaaaaaaggttcaggcaagggaaagactgactccctcagggccagccaattcttaaaaaata

SEQ ID NO: 686539 - DNA, 1715 bp, Homo sapiens
actttaaagtagttttttccaattttgtgaagaaagtcattggtagcttgatggggatggcattgaatctataaattaccttgggcagtatggccattttcacgatattgattcttcctacccatgagcatggaatgttcttccatttctttgtatcctcttttatttccttgagcagtggtttgtagttctccttgaagaggtccttcacatcccttttaagttggattcctaggtattttattctctttgaagcaattgtgaatgggagttcactcatgatttggttctctgtttgtctgttatttgtgtataagaatgcttgtgatttttgcacattgatttattatcctgagactttgctgaagttgcttatcagcttaaggagattttgggctgagatgatggggttttctagatatacaatcatgtcacctgcaaacagggacaatttgacttcctcttttcctaattgaatgccctttatttccttctccttgtttcaaacacaaagatatatttaaatcctggatacccgagacaaatttagaaaaaggtacattactactaagaaaataaagagtaagattttgaatttattcattcatggggatgacaagcagttttttttttttgagacggagtctcgctctgttgcccaggcaggagtgcagtggcgggatctcggctcactgcaagctccgcctcctgggttcacgccattctcctgcctcagcctcccaagtagctgggactacaggggcccgccactacgcccggctaattttttgtatttttagtagagacggggtttcaccattttagccgggatggtctcgatctcctgacctcgtgatccgcccrcctcggcctcccaaagtgctgggattacaggcttgagccaccgcgcccggccactgacaagcagttttaaatggtgatagaaaatggccgtagagagtgagtgaagagcaggaggcgtatctgcagtcagcggataattgagagaatcacatttattttttgtttgtttttttgagatggagtttccctcttgttgcccaggctggagtgcaatagtgtgatctcagctcactgcaacctccacctcccaggttcaagcgattctcttgcctcagcctcccaagtagctgggattacaggcatgcaccaccattcctggctaattttgtatttttagtagagacagggtttctctatgttggtcaggctggtctcgaactcctgacctcaggtaatccgcccgcctcggcttcccaaagtgccggtattacaggcgtgagccacagcacccggctgagagagtcacatgtttgaggagatggaacagtacaggtgaaaggttttggtgaaaggtttgcctccctgttgcaaagatacgtgtagttgcctttagggcccacttggataatgcgggataatcccccatctcaggatctttaacataatcatacctgcaaagtctttgccatagaaggtcacatttggagattccagggataaagacatgagactttggggccattatttagctagcctactaaaccccccaaatctatctacagattcagtgaaattctgtattgtaaatatttttaaattttctgtatgttatgatgtcatgacatattttaaaaaaggttcaggcaagggaaagactgactccctcagggccagccaattcttaaaaaata

SEQ ID NO: 686540 - DNA, 1655 bp, Homo sapiens
ccacttaactgcatgcatctgagcatttttttaatcaagtataggttatctgatcatagggctctcctttaatgaacgtgaactctgacaatctttatgaactatggctcggatctactctgagtcacaccatttggtagataattttagacacatttcatgtatttccctgagattcacattcctttaaaatatcaattaacctaaaagcttcatgtggaagaaaaggcatgtttctagagccaggcagatttttatctcagctttgccacgtattgacctatgaagagttacttaacctctctgcaccttatcctccccatctgtaaaacayagataatatacctatttggaagagttaagagaacgagatatattacatcaaatatataattaaataagtgaatatatgaagtgcaaagaatgcccaacacttagtaaatgctcagcaatagtaacttcctcttctacttcacctgcaagccccatcacccacctcaaaggtagagagtgaagcctcttgggcaaaccagtcctgaatctcaatagcaagggggaagcctatgggtagatatttctggtctggtaggaaggaccattattatcatggagactaaaatataaggcagatttcagacctcccaggtagctcagaacacaataccccaaagtatggtgccttggcatgctgagtactttgaaatgaaggacactggaaggacctcagaagcaaggtatctctgaccttcccctgtcctcctgtctctcacccccttttctccctcagagcaaatcacagaaaccataattcttcttccccaagatggttcatagatactagaactcctccccataaagcgagccataaaacccagaaaagtcactctctcccttctgtctcattccaaggggactctcattccaaagagaccctacctcataccttggaagaagcaatgctacaaagagaagccaagaaaaatctgaacagaccctgctgggtttcctccctcagtctattaccattagatcacacccttttgtccacttacatttctacacagctgttcactcctcattgaacccaagcataaaaataaaaatagttttccctgagtctctgggtttcatttctgaagactcctgcatcacataaaactttaattaagtaaattgtttatgcttttctcttgttagcctgtcttttgttataggagtgttggttgtgaccattatgatggacaaggaatggtatcacacatttccatccctgtaaaagacagctctttgatgaagacctttgttcacttttccttctaaacagcttaaaggtctttctgttagttataaaaagtagtctagatgattatacagaacccaggtggaatcagcggaacattcgctttaggagaagacacttaagaggagagagaccatacaacttttggcaggttgcttccaggtcagagaaaaggatatatccattgtccacaattcatacaagttactgggatgtagtgagaggaatgtgagggcaggcacaggggcaattaggatctgagttcagcccatgcagcgcctagcacagaacagccagctcagagtgtgggctcagacatttggcaacctactagctctgtgtgtgtgtgtgtgtg

SEQ ID NO: 686541 - DNA, 612 bp, Homo sapiens
tttagtcagactagaacattggtgctatgtttagtactaagaacttgcatgatgtttctggatgacttagctccagagttcagctttgctgctgctcattccaaagcagaggcagcagctgagcccaggggcaggtgtgcaagcagaaagcgggttaaaggaaatgagcaggatttgcatcttggagtggcgttttgcctcatgagtgaaagtgattaaccagttcatcttcctgctctattcacccctaacttctttcttccatccctaataaagtaggtggcatcactctcagaatctcaggatcaagtcaaaattaatggactctcacagatttatataaaatctatttttctttttcctcttcagtgagatacttgaacacattacagtgtgtaatagaaaaaccgcaacaggtaaatcctttacttgcatttcttcatacttcatctaaagaagacataatagcractttctcctgatatcttctaagagtattatcatgaaaaaataaaactaaggaaaattgttccagttgcatgttttatttatataagagggaagtagatttctacacatacttgaaagagagaggtatctgtcaaatacaga

SEQ ID NO: 686542 - DNA, 1899 bp, Homo sapiens
acttgtctagggtcacagagctagtcagtggaagaaccagcatatgaacccaattctctctgcctccaaagcccatgtaattacaataatgcctatttctctgtcaaaccctgctaggggcagtaggaagcatgtatcacccttataatacaaggttgaaaggggctaattggacaacaagcggcaggtatagaaagagatcaggtctttctaagcaggatctgggaagacttacagcgtggggtgacaggtaaggtggacctgggagaggaagtagatgagaatataccagaggaggtggcactgggcatctcaggctttgagacaaaagacgaagggtcatacaagcaagaatgcaacatgcatgataaagagtggccaagccagttgcagctggaggtaggcattcaggatgcaagagcccaggaaggcagtggtggcactattggggccttaagtgcctctctctttctggagcctgttgccttcaggactgcccttagactgctgaagttgctgggcacaatagacaaaatcctaaatacggagataggaaattaacyaataaaaaaatgacaagaaaatatttttacaaaagataatttaagaggaaagtaaaagctacttccctctttgtcttgtagcttccttttctatgaaacatgaagcccagggcttcttggactaagtgagagagtgaagaaaatgtaggtattaaaattaacagccagagatggcgttagcaaaatgagaaatggtgtggttggaattaagtgatagaattagcattgccactggattcagactgcctagagttttttgaggtccagttcttctgtttcctggctgtgtgacatcaggcagatatgcattctgagcctcggtttcttcatcttccaaatggggacgatgatatctacctcaggggaatgctgtgatgacgatagacgtgtccagcacacagtaactattcagtagatattatctttgttccttcagcaccaggggaaataagaaaaagcaaagaaagggaagtgctggtataaagggaaggaaggaaaccaagggcatcagtgtggatggggaaggcagaaaatgctctcctggggaatcacaacctttgtattatcaagtgctttttttgacttcaagccatgctatttcttgcagctctgactatgtttcaagttggaatatcaagcatctctgagccttcactacagcaattaagggctcataaagctattcttaggagtacaaaataaactgagatatatttgaggttgccagaaggttgccatgtggagaactgagtgctaaccactggaaaggtgacattaaagacagcaggtgtgcagaatgctgtggccataactctctccagctgagggcagaggccacaaaaaggaccctgctgaggggaggctgccaaggagctccacactctgccaagaggggcctgagttctggcgccatcagcaactgtcttgtctctgtgactcacatcttctcacataaaatgagtagttgaatgagttgattttgaatgttcatttctgttctaatgttgtgtgatccaatatgaattcaactaaagcctgcagattcttccactgctcccatggtggccatctgttgaggtgggagggaaacatgctggccctccccgtctcctaccctaaagaagacactgtgctggactagctctgcttccaatttccactaaggctattattcttcccactcgccatccactcctatagcattatgtctgccaggatgctctgtaagtgttccttggaaaaaaaaaaaaaggatggaaggagagaagaaagaagacaacgaggaaaggagggagagaaaaaagaaatgaaagagagaaggagggaagataatgca

SEQ ID NO: 686543 - DNA, 1531 bp, Homo sapiens
taattttgtattttttgtagagaggggggttcgccatgttgcccaggttagtgtagaagtcctgggctccagcagtccacccaccttggcctcccaaaatgctgggattacaggtgtgagccaccatgcccagccaatttcaagattcttttctatagtatactgtactgcataatgtatgttttaagattgtttccttgcattggtcacatatttggtttcagtaggttttctgcagagcccatatgttcaggcatggtggggggaaaaaagcctgttctaaactctaatttatcctgagatctgagctatcaaacaattttttcttcatccctgttagattgcacttcaagctcttaacagtgcctctgagccatgagaaaaatttacacatgagaaatgttttgaagccattaaagtaagttcagagcttaagagttgctttcacatctcttgagtcagatgaaatgcgggcttacagagagtaataattaggtgatgggcagatgccaagctttgttttttgatacgattatctctgtctttcatttggcaccgttcaagtctgcaggttgggcattctgaaagagagggatcactgagaccacacaggggcacatcagatctgttcctttggtggacgtcaaggcagaattactcagaatataatctgaaatgcatttgatcatacagtagatagtttaataatttatgttcagacttattagcaaagccttgtgtttactctgctgtcaccaaaataagataaaaacccacccgtgatattaagattagacagttcgcatgtgtatgtatgtgtgtgttcaagtttaaaatttttgttcatgattgtaatgacctgatagcaattacacatttggggtgaaaggggtaagggaaaaatgtcgcatgaataatgtctgatgtagaatttctcattcccagaattgaaacagaaaggctgacagtattgcgctctaattgcgtgactgtgtgaccgaggtcttataatggaaatgttcttccaaaagaaatggaaaggagcgattaattccaacttcaatttgttgatcctgttacattccagtgtacctataatgctgatggactatgcatacaacattgttttaactgacttcaagataaaatactggcatttttggtttggagataattgggtacagctacttatatgatattaaagagctcccaatttggggaatgtctagaagaataaaggagaaagatagcttggcacccttaatcccctgtatgtcctggtatctggtaataacatgaagcccagggacagggttgtcttgtcaattcaaggaagggagctggcatgtggaatgtgattgcagggccctggtaacacctgcaggtgtcagggacagaagaactcatttggaagctgcaccgcaagatgggaagacaggtggcaactctcttacagggatatcttttatttgagcagaaccagaccaactgttcctcattaaaacacattttgcaaygtgttctcatgtga

SEQ ID NO: 686544 - DNA, 431 bp, Homo sapiens
aaaattagctaggcgtggtggcatgcacctgtaatcccagctactcgggaggcggaggcaggagaattgcttgaacttgggaggtggaggttgcagtgagccaagatagcactattgcactccagtctgggcgacagagtgaaaccctgtctcaaaaaaaaaaaacaaamaaacaaaaaaaaaggctgcaggagaaatggagatttctcatcttctaaaaactcatttattccaggagtattgatgtaccagctctaaggctggccctggacttttacctatagatgatctttctattgagtgcagtttttaaaatgtagttgaaacacctgtcattccaagaatggacacaggcttagcttgaagactttagaaaaactctttaacaaaagaaaaatattaaattgaaaaagaaaaggataaagtcacac

SEQ ID NO: 686545 - DNA, 431 bp, Homo sapiens
aaaattagctaggcgtggtggcatgcacctgtaatcccagctactcgggaggcggaggcaggagaattgcttgaacttgggaggtggaggttgcagtgagccaagatagcactattgcactccagtctgggcgacagagtgaaaccctgtctcaaaaaaaaaaaacaaacamacaaaaaaaaaggctgcaggagaaatggagatttctcatcttctaaaaactcatttattccaggagtattgatgtaccagctctaaggctggccctggacttttacctatagatgatctttctattgagtgcagtttttaaaatgtagttgaaacacctgtcattccaagaatggacacaggcttagcttgaagactttagaaaaactctttaacaaaagaaaaatattaaattgaaaaagaaaaggataaagtcacac

SEQ ID NO: 686546 - DNA, 431 bp, Homo sapiens
aaaattagctaggcgtggtggcatgcacctgtaatcccagctactcgggaggcggaggcaggagaattgcttgaacttgggaggtggaggttgcagtgagccaagatagcactattgcactccagtctgggcgacagagtgaaaccctgtctcaaaaaaaaaaaacaaacaaamaaaaaaaaaggctgcaggagaaatggagatttctcatcttctaaaaactcatttattccaggagtattgatgtaccagctctaaggctggccctggacttttacctatagatgatctttctattgagtgcagtttttaaaatgtagttgaaacacctgtcattccaagaatggacacaggcttagcttgaagactttagaaaaactctttaacaaaagaaaaatattaaattgaaaaagaaaaggataaagtcacac

SEQ ID NO: 686547 - DNA, 728 bp, Homo sapiens
tcctctgtgtccttccccagattagatctcagaagttgttgtatacttccttctctcctcatatggttcatacaaaagctgggcctgctttttgttatgttcattctcagtccaaatgcttcttctgcctcctcccaaccctacttcagtgaaaatgcccctatattccaccatctagtgctataacaaattttgttgggtcactgctggctgaccttggagctaattaaaatatatcaaagattcggagttttaaagttgtcaggcctcggtttccatgaagaggaactctattttcactcatactccagcaagagattagcagcttgaaatcactttgacagtgtcggttgctctattgcttaccacagggaattttaattccaycctgtgaaattgtaattgcttctcaaggagaagcggggaatcctgggtaatggccacagtcaagctcaatgtcagagctgccagttgctgccacatcagatattacttgctgttattcaaaaatcactccagctttccatatgggaaagttgaactggggagttaaagtaaattaacagaaactgtcagctgttcagaacagcatagacagcagtgtgacagaggtgggtgacttcccatcagaaaaggtaactttttccctttttttattaagataaagagtttcacaaacaaatttcattacttaagatacatggctaaatgacgccattagtaagcaa

SEQ ID NO: 686548 - DNA, 670 bp, Homo sapiens
actgtgcaactgtgactgtcaatttaataagttgtataacactagtcaaaaaaggaattctatttagtaataaccacagtttcaactatttttctctagaaaattcgatcaccagtaaatgcctgtaatcatattataaaattatttccttggattatattttatttaaaaaaaattaaccattaagtctgtgacaaaaagagctaattttcaatcataaaatagtcaaaaattttttcttaattttccacttaactgttttgaggaattaaaaaatttaggggactcacagtcattatcattgaaaatatgatataactataaattataaatgatagatgctatatgtttagttgctataatttgccacccatttcttttttataatagtaataatgaaagaaaattttaaatatttttatttttataaaataaaaatcatattcttgttttaaatgacttaatttctgcatcagtttttacacagttragtgggtcacaagtcaatttttaaatttctccaaggtttattcttgctgcaaggaaagtaatattgtatttccaaaatagcaatacatttacaaacaaatctgtctagaaaactttgtagctagagtttcttatatgtatttacaataatgtcatattttgaattttaattattgattca

SEQ ID NO: 686549 - DNA, 670 bp, Homo sapiens
actgtgcaactgtgactgtcaatttaataagttgtataacactagtcaaaaaaggaattctatttagtaataaccacagtttcaactatttttctctagaaaattcgatcaccagtaaatgcctgtaatcatattataaaattatttccttggattatattttatttaaaaaaaattaaccattaagtctgtgacaaaaagagctaattttcaatcataaaatagtcaaaaattttttcttaattttccacttaactgttttgaggaattaaaaaatttaggggactcacagtcattatcattgaaaatatgatataactataaattataaatgatagatgctatatgtttagttgctataatttgccacccatttcttttttataatagtaataatgaaagaaaattttaaatatttttatttttataaaataaaaatcatattcttgttttaaatgacttaatttctgcatcagtttttacacagttaagtgggtcacaagtcaatttttaaatttctccaaggtttattcttgctgcaaggaaagtaatattgtatttccaaaatagcaatacatttacaaacaaatctgtctagaaaactttgtagctagagtttcttatatgtatttacaataatgtcatattttgaattttarttattgattca

SEQ ID NO: 686550 - DNA, 1742 bp, Homo sapiens
tgagacaaggtttcactcccgtcactcaggctgaagttcagtgggggatctcggctcactgcaacctctgcctcctgggttcaagtgattctccggcctcagccttacaagtagctgggactacaggggtgcaccaccacacccagctaatttttgtatttttatagagatgaggtttcaccatgttgcccaggctggtttagaactcctaaactcaagcgatctgcccgccttggcctcccaaagttctgggtttacagttttgagccactgtgcttacattaagcctttactatcagaaatttccacatcattctcattcatggtctctcagaacggttttaggaatcatttaaaagcaaaaaggaaaattaaaccttatgctgcactggtatctgtttattcctaagtagccagggaatgtccctggaatctgcttctccattacagcgtatgaatgatgcaggaagttatattaaatgcaaacagggagtgacccaaggagtaatagcatttaacatttgtggaacgtttttaaaaaatattaaactccataatcattagttcatgaaacctcataacaccctcacaggagtcataagcagtataaatcagacaacaaaccttgatatcacaaggtaagtctctgttaaacaaggatttgatcatttacacaagagctagatttctgtttcttcataaggggactcttggtggagctgagaaagattttcttcagtgaccttgaactctcatccttaaataaacgaagcagccccaggaaagagggtagagtatacacattcagctcacttagagggagcaacttggggagtggaggagattttcaaaggtgagaacaccagattatattttctttgttggggactttgttatgagaattgtgccatcaagggccaatgaaagactttctcctgagatgaaagatcaatatcttatttgatttgcaggcaagaaacaaacttcaaaatgaagagttctttactgtgttttccttggttagatgcctcttctggtttaggaggctgctggccatatcttaagtgctcagacagagaaactgagatatgtagaagtttcatgtgaattccctggccttcacaacacacgccattcaatagaaggtggcacatctgccctattcccattatacccaggcacctgggaaatcaacagcaagaagccctcttatcagcgacatacatggctgcctaaagaacaggagtggacattagtgagacgactgtctcctctccactgcccatggcagatactgtttgtctgctcagtagacagcagttgtttctccaacctccctccttctttcctggccaaatctcatttttgttcatattaacaggtgctcagagaagctgtgtccctctcttagaccagaggatgacctatggtttgtctaaatatctaataattccatgcacttggttgattgactgatgggtggactgatgactcggctttgtctaataaagcatgagagaaatttgagtgattcttagaataattttartccctgatgaaaaaagagagatgctggaggtagattctcccctgacttgcctttcctggtttgggtgtcactgtggcagagagaggtgcttgaagatgaagcctaatgaaacttcaagggcaaatacggccaacaccaatacagagattctttagtcctcaaaggcattgtgaactattgaaccaagccagaa

SEQ ID NO: 686551 - DNA, 606 bp, Homo sapiens
gagtgagcttcctgcactcctttcttttgtatcttttcttatcttaataccaagccccttccttatttccaaacctcaaccttctattgaaatattcaaatccactggttgtcaaaattgaagataattttttaaattattcaatatcaatccccaatcaaattatgaaccataccacagagaggatttcactggatctttctgaccaatataatgtggacttaagtaatgtatagcacttctgtgcctggacttcaaataacctccctcagtgattctcattctctctctgaaggtgaacttagtaagtatattttgaaaatgattgtgttatgcaatggaagtatccaagtgacagaagaaatccaagtcccttgctaacaatgttaagaaggggtatgagaacttagtaagattaaaatgttaagcctgctctttagaattcatctgttatgaattgttctacctgatttaattcaccctaaatctctgaaggaaaaaaaattgtagctttctctaaaaatgacttttcctcttggatagccttcataaaactggttgtggaaatggagactgtttcctcatyattgtttgtaaaacatatca

SEQ ID NO: 686552 - DNA, 606 bp, Homo sapiens
gagtgagcttcctgcactcctttcttttgtatcttttcttatcttaataccaagccccttccttatttccaaacctcaaccttctattgaaatattcaaatccactggttgtcaaaattgaagataattttttaaattattcaatatcaatccccaatcaaattatgaaccataccacagagaggatttcactggatctttctgaccaatataatgtggacttaagtaatgtatagcacttctgtgcctggacttcaaataacctccctcagtgattctcattctctctctgaaggtgaacttagtaagtatattttgaaaatgattgtgttatgcaatggaagtatccaagtgacagaagaaatccaagtcccttgctaacaatgttaagaaggggtatgagaacttagtaagattaaaatgttaagcctgctctttagaattcatctgttatgaattgttctacctgatttaattcaccctaaatctctgaaggaaaaaaaattgtagctttctctaaaaatgacttttcctcttggatagccttcataaaactggttgtggaaatggagactgtttcctcattaytgtttgtaaaacatatca

SEQ ID NO: 686553 - DNA, 586 bp, Homo sapiens
aaaattaacctataatgtacttaaattttatttttcactcttctggtaaagtcacaactcaagtatttatctatgaaacattttaaaaaatttaaacccttatcaaattaattgctggtgatgtaaaatttacctgctaaataatgtttcagcaatgctattttgtgagagctcacgttttttaataagaacttcaagttacataaaactatgaaacataatgttaacaatatagagatrcctatattttgaatgctggacctccttccattatatatgctccagcaataatacaaaattccctttcctaataggcttgagtccaaaggaactaaacaacaatattctcaaatgcacttcctttgaccacttttcagtttctcagacaaaaatggtgatgatttttcatcttaaatatttttcacccttttagttttctttccttatataatctataattatacctttgaacacactaccataagtctcctgaacccctaaaataggcttccatctaatctacactaatctgttctatctctctgtttggtaaccattgtctttattgtggctgaaggatctcgga

SEQ ID NO: 686554 - DNA, 586 bp, Homo sapiens
aaaattaacctataatgtacttaaattttatttttcactcttctggtaaagtcacaactcaagtatttatctatgaaacattttaaaaaatttaaacccttatcaaattaattgctggtgatgtaaaatttacctgctaaataatgtttcagcaatgctattttgtgagagctcacgttttttaataagaacttcaagttacataaaactatgaaacataatgttaacaatatagagatacctatattttgaatgctggacctccttccattatatatgctccagcaataatacaaaattccctttcctaataggcttgagtccaaaggaactaaacaacaatattctcaaatgcacttcctttgaccacttttcagtttctcagacaaaaatggtgatgatttttcatcttaaatatttttcacccttttagttttctttccttatataatctataattatacctttgaacacactaccataagtctcctgaacccctaaaataggcttccatctaatctacactaatctgttctatctctctgtttggtaaccattgtctttatwgtggctgaaggatctcgga

SEQ ID NO: 686555 - DNA, 645 bp, Homo sapiens
ttccatggaaaggagaataactttttgatatttaaaaacaagtaacatgttatgtgaccttcaggtaactgaacatgagtttttattttcttataaatatttaaaaaaaataatctagactataaatccatgacagtagtcaaagatctattagtttctgtgggtgatatttctatatgctgtcctttcagagaacagcttatctattttgttactaaaatactatatttgaggaataactacaaacagttaaaattcttttcttttctccccaattttcaggtctacttttcttcattcttctttgagatagtttacttggcacttttactatttatagacgaagctaaatatggatggataaaatgttaacacaggaaarcaaaacatttggaagaaaaatagatcagatgtttaaactcatagctaaggaaactatataaagccctgaggttatggacaaaggaaagaaaaaaaaacaaaaacataaacaaaagataaagcatgagcatgatagataaattaactgtaatatttttaaacccccaattttttcttcttcagagttatcatagtaaatatatttataacattattagcccttgatttcacctataatgtgactcacaaacctttaattcacat

SEQ ID NO: 686556 - DNA, 610 bp, Homo sapiens
aacaaatcactttaacaaacaaactataaagtacttaccatacatgccaggcactctgccaggcatcctgggcaattcaaagatgatttgcctctggsctgcttagagtggcttagatggaaaattccatttcatgacctctctttcctccatgtcttctcagacctgtctaaactggtaagcgctgcacccattcaggttgtgggtaacagctgagattgcagtgtgtgtcccacactggcatctacagggctccaagagtctgaggatgtggtgggggccatgagttccgtacaatacatattttttgatgctaatttttaaagatcttaatagaagtgaatgcagcatcatttggtgaccactccaaaactaaatccctgcccaggagtgaggtacctgcatttgtatttacaatctttttgtcaccaaggaacatataattgtcctggtctactgccagaagagtggggtctgaaaaggagagatcttggcagacgaaactgtgacaccaccttgtgccaactgaacacaaagatttcaactagttagagaagaggcaaggaaatcactgagccattagatgccccccaagaatacagggatgtca

SEQ ID NO: 686557 - DNA, 644 bp, Homo sapiens
ataattgacataaaataaaagtaaaatgactgtgtccaggagactataaaagaggtttctctgactcatcttggggcaacttcagcaggcctctgcatctgagctctcctctctttcctgaggaaactgccatctcttcccactcttaccctaatcattcgctaactggtttctactgactgatgttcctctcgtaggccatcctttacctagggattcccaagtcagctttttgtcacacagcttgtattagtcatggttctccagagaaatagaactaagagtatatatatatatagatatttgagaggggatttgttaagggaattaactcacatgagtatggcagctgagaagtcccgcaacaagccatctgcaagctgagatgccagtgttgcaggactttttccttagttcagctaaagacgggggtccttatcacacggccatgaaaatttaggctcacagacaatttgaagggtgaatagaatgggatttattgggcagaaaggaaagaaaggaagaacagggactctccacaaggccagagtccctgctmctgtgcttcctgccttgcagtttgaatcctagcttccacccaggaagaggaggggccaggttcctccccgctgcaaacagcacga

SEQ ID NO: 686558 - DNA, 1563 bp, Homo sapiens
atggatcacatctcttccttgttcctaaatctttgtgccacctcattgctagccccataatattccaattatttagcttaatagacaaagtcagccccattctggcctccatgtctctttcccattgtgtctttctgtcactccttgcctcctaccatgtgggcctttcagacagacactgatgtctcccttcatggccccacatctaacatattctgctctgcgcaggacgacatcttaatagatataaatctattcatctttccatagagctccagtgtgacatcattgaaccttccttgtggcttcattcctatgtattttcagaggtttgttgttgttgttgttgttgttaatagtgctgtaatagcttttatctgctgtgttaaaatatgtcagtttactagttcctctcttccagtggactgtgagaatccttgaggayaagaattgtgtcttatttatccttatccttatttatccttatcttatttatccttatttatccttatccttattttgcccaggttaagtgtttggtaagtgttttgataaatagaaaaatgatgggaaagatgctattttcattgaactttgaaaaacaatgagaaggtaaacaaaatagaacagggaaaatgacattcttcaaatagtgagcagaaagacatggaagaaccaaaggctaagggaagatgcttatgggaatgacaagtgtttagtgagaaggagcctggactactggggcatcaaagtgggacacaatagcgcgacaaggactggctgtccttgcaagttgagaatgaggcatgaaagttcaggttttgtttataagcaaagttatagagctaaggagtttgatttttctctcttgaatgttagtcccattcttccactgaggaataagtaaccaagaatcacattgtcattttagccttgtcagcagcgagtgctccactgcactataagtctgataagaacagtggaagagacattagctataaatgttggcaagaattatcattgttcagacttctgcaactgctctcatcaagatgttgggggaattgccccacttcacagacagtacacctggagcagggtgggaaatggcaggggcaaggggattagagctcctaatgaaaagaaggactcatgagaataaagagggcaaactcatgtgggggacaaggaaaatcgatgaatttaaatcagattatacccctattatctaccaatatgcacttgaattggtctgaaaggaaaaccataagaaataaccttttacatggtgctggcatgttaaaatagaaccatggtttccttcctcctcttaattgcatctcagggcatcccacattgacgcttctcagatgttcattctcagggctgttcaaggccacgcctaactaggactctggtatagcacacactggattccaggcaaacttccaagtgttttggacacattcacttacttccctccgcaacagtcctgtaaagtgaagaaagtgaggctcaacttggttaagtgatatagcaagatcacagatttccttcagagat

SEQ ID NO: 686559 - DNA, 1563 bp, Homo sapiens
atggatcacatctcttccttgttcctaaatctttgtgccacctcattgctagccccataatattccaattatttagcttaatagacaaagtcagccccattctggcctccatgtctctttcccattgtgtctttctgtcactccttgcctcctaccatgtgggcctttcagacagacactgatgtctcccttcatggccccacatctaacatattctgctctgcgcaggacgacatcttaatagatataaatctattcatctttccatagagctccagtgtgacatcattgaaccttccttgtggcttcattcctatgtattttcagaggtttgttgttgttgttgttgttgttaatagtgctgtaatagcttttatctgctgtgttaaaatatgtcagtttactagttcctctcttccagtggactgtgagaatccttgaggataagaattgtgtcttatttatccttatccttatttatccttatcttatttatccttatttatccttatccttattttgcccaggttaagtgtttggtaagtgttttgataaatagaaaaatgatgggaaagatgctattttcattgaactttgaaaaacaatgagaaggtaaacaaaatagaacagggaaaatgacattcttcaaatagtgagcagaaagacatggaagaaccaaaggctaagggaagatgcttatgggaatgacaagtgtttagtgagaaggagcctggactactggggcatcaaagtgggacacaatagcgcgacaaggactggctgtccttgcaagttgagaatgaggcatgaaagttcaggttttgtttataagcaaagttatagagctaaggagtttgatttttctctcttgaatgttagtcccattcttccactgaggaataagtaaccaagaatcacattgtcattttagccttgtcagcagcgagtgctccactgcactataagtctgataagaacagtggaagagacattagctataaatgttggcaagaattatcattgttcagacttctgcaactgctctcatcaagatgttgggggaattgccccacttcacagacagtacacctggagcagggtgggaaatggcaggggcaaggggattagagctcctaatgaaaagaaggactcatgagaataaagagggcaaactcatgtgggggamaaggaaaatcgatgaatttaaatcagattatacccctattatctaccaatatgcacttgaattggtctgaaaggaaaaccataagaaataaccttttacatggtgctggcatgttaaaatagaaccatggtttccttcctcctcttaattgcatctcagggcatcccacattgacgcttctcagatgttcattctcagggctgttcaaggccacgcctaactaggactctggtatagcacacactggattccaggcaaacttccaagtgttttggacacattcacttacttccctccgcaacagtcctgtaaagtgaagaaagtgaggctcaacttggttaagtgatatagcaagatcacagatttccttcagagat

SEQ ID NO: 686560 - DNA, 414 bp, Homo sapiens
cccaggtagctggaactataggcacacaccaccaggcaaagctaatttttaaattttggtacagacagggttttgctgtattctccaagccgttctcaagctcctgggctcatgcagtcctcccaccttggccttycaaagtgctgagattacaggcgtgagccacaatgcccagcctgtttctcagggaaaggaaaatgctattctggaaggaaaaacagtaggtatccagtacctactacaactttccctcagcacctcctcatgcttcaatctcaaggacatgggatcttattctcattgtttcattcagcaaacttagcaaactttaagcacttacctgtgcccatcattaaccgcaatagttaactttctgtataagtgatgaagagcaaggaatttgcggtcagacaa

SEQ ID NO: 686561 - DNA, 579 bp, Homo sapiens
aagtaagtgattattcccaaaactgccttgactgattaaaatagtgtaaagcagagtcatacttcactcaggtaaaattgcagccatgaagataaaggggatataggacccatcatagcccaagaatggctactgcaaaaacaagatggatcagggcagatgagagtcaactacyctaaccctaaccctgtggttgtttcataagcagctgctgtgcatattgtgttaaccttacaggactagatcaacaggctctggcaagtggtatgtgcccatttatctgaagaatgtgttctttttcatctttatcagcaaagatgatcaaaagcgattttcatttacctagataagaaagcaattcatgtttctctccagagatgatggcaaattttctgtactatgtcacaatgtatctgaagggatcctgatcattttgacattttactatactgagaacatcatgctaattgaatctcatggataggaagtagaaagttctctgggtgacatggtatgatgtatgtgtaccagaggatatgataaatgctacaaatcctctttccacttttaaaagattta

SEQ ID NO: 686562 - DNA, 639 bp, Homo sapiens
ggtggggtgcagtctgcgtgggaagggagtcaaaccctagcctggcctcacccagcagcagctccctgaaactttcagcctggaagctggtttgcacccatccagggggcaaattcagttaggttggtcttttgcccacctgggactgtaccttagaatgagtcctggggcctataatgagcatctcaggtgcatgggttggatctttgggcacctacatggctgccaggctgctaattcccatgacagggcctccaaacctctgttctcagccagcctccatccactgtctgcccaattatttgccatgcgactcttctcttgtgcctgggccactcctacctctgcttcttccttagcccccaccccagcccttgccaccagcaggggccagagctggaggcctggccacaagtgggccctctctgagcactgtccagacttttcagtggcttcccctttctcrcagattagccctcatgatgttggcatgggactcccaagagcttttgacttggattgaagaggaatgcagctaattgaggcagcctagggatgctcccatctctccagcactgccttgcctctgcatttccccctctttctttctgcccacccatctccagatacaaatcttta

SEQ ID NO: 686563 - DNA, 609 bp, Homo sapiens
tatcacatgacagtgtaccaagtgtcatttgcagtaatgattttgagccttcaataaaggagtatgtgtgctctccttaagaagaaaaaaatactatatttagaaatagtttcaactcatctggttaatatagcagttgcaacacctgaagtgatgagctcaaattttctgcaaaacacagttatgtgaaacactatgttacctaaatatttattagccaatttgtatttatgcttattatgttgaattgtatatggttgctagttttacaaatattataaaatttggtaaacattttatgaatattaacaattatgtattcaaccaaaataatactgaaaggttttttttgttttttgttttyttttcaagttccaggatacatgtgcaggacgtggaattttgttacttaggtaaataaatgtatgccaggccataccaccctgaacatgccggatcttgtctgaaacttctctaaatgcaagacaatacaaactagcaatgccttcttcaaaagccaaacacacttaaagttttatgaaaataattttcattttgctaatgtttcatcaatgcttccttcttgcgtggatagcttcatgattccag

SEQ ID NO: 686564 - DNA, 2252 bp, Homo sapiens
taagcggccattagattagaaaggagccatctgcaatagcggcaccatgtggtaataatgtgtcatagcagcagtggaccaggattgtagatttctcttcccttggcttttaaaacacctgattaacgctctctgagtcagggctcttgaattacacaggaatgcagaagaaggtggaagaataggaaaactcagatgtcttcctgctaacggagcaggtggtggcctgaacaatacattatttaacaaatgtgagaaagtaattattggggttctacaaggtttattctaggccatcctattttccataagaaggtagcactgcacttggcgtataccgatctcatttactatctcaataataacccttgagacagtttcccttacccactttatgcaagaataactaagggtcagagagttcaaataatttgcacaaggattactcgattgtaagagtttgagctgggactcacatgcaagttcatttgtcttcaaaatcctgggcttccaatctctgttccccttgcctccccacagtcttaaaataaatgtttcccaggcttccctctgctgctatcactgttggcataaagcgaatttcctcgactggtgaacctaaaattttctaacaacaatgatctgcataatttctcatagtttaaaaagttcttatgaaaacaatttccttttcagtcttcccacaatttcataaggtaggtaaaataaagactattattatcatctcattttatatacgaggcagggagggccctaattaatgtacttatttcaaagtctggcatctcttaacaataaacttatttcactctttgttaaactgaccagyatagtcatggactgagagtcagaaagtgtgtgttttatttattcattcattcacttgtgtaattacaaatccattgagtgtctatcacctatcaggcattattttaggtactgaaatatagcagtgatcacaacaaagaccctgtcctcttggggaatgcattctagtgaaagaaacagaaaatgcacaaggaaacaatgatttgagatcaagtgtcaggtagcgatcatggcaatgaagaaaaacaaagagaacacaagaaagggagtcagggaatctctctttgcagagcaacatctgagaagaggtgaggaagagaactagggagaagacttaatgcattaaagctttagaaaggaatttgctttatgaaagaatgagaaggccattataactggagcccaacgagcaaggactagtgataccagaagacactggaggaggagacagtcagatcacacagagcttgaaatgccttgttgaaagtgagggagacttattgcaagaatgatgggaatctatgtgggggttcagagcagggtggggcagagctgatacatgtttaaaggatacttccatggctctgtggaaacttgactcagggatgtggggtggggaggcagtgcagagagaaatcaaggagatggggttaggaagcagatggagtgacaggtgagagaggtcgatggctaagaatagaatggtaacggcagctggctttattgccaattatgcaatacttttaggttctatgaccttgagtttaattaacctctttggggttaattagctttttttagcttatttttatttcaaaatacagttattaaaatccttacaactctgtaatgaaagaaaacttacaaaaaattacatatcctgaaatatataaaacgttaaataactgtttttctcttgccatagagaaaaatatacacagcggggacctaataagcacagaatttgattcagaaatggatttaaaacatacacactactacctgaaagcaagcatcaaatagttgtaagtgccaaagcaaccaaacttaccaccgacatatctatttcagtattgacagagctcttggttctggttaaataaattaaagatgggaaaagtgataaaatgtcaattaagaaagccaacaaaatcccctaaaggaagaagagaagccattcttctaacttcaaaactgatccttgctgaagacaaaacttccaagaatttgctcttattatacacatcattccttaaagggaaattgacagacatggatatcaatctcagttacaccaccaactagtgccgataaaccgccaagcaagagcttctaaatttatgatttgtgattaaaacaaatatttagtaaaataattagatggactaaacagcattttagag

SEQ ID NO: 686565 - DNA, 642 bp, Homo sapiens
gtctcaaaaaaaaaaaaaaaaaaaaaaaagaaatgaacatttgtaaatggagtctaattaaattttgtactttaaaagaaaagttacaagttaatttgttctgttgtttctccttgctatttttataacaattagtatttaggaataacactgtggttcagatatgaactatttcacaaaatcaacttaataatgaagtcaacaattatttctctttattcaatcttgtcacttagctcaaaaaagaactgcactgctctttccttttcagtgatgaaaaggaacagaatgctagaaaaccatcttacagcttggcattttttcatttgtttatttattcatttattcaatgaatgtattccaagctaattccttttgcaacattctttatctgattcatgtctcctctgaaaacttcctccttttatttattttttgcttttatatgttcatcctcatttctattgactgtaaagtagtcaaacctctcattaaaaaggaaagaaagaaatggggagaagagargaaaggggagacaagaaaagaaagagaggaaatatcccttgattttacatttttctctatggcttttgtatttcttctatttaagagccaagattttccaaagaatagttaataata

SEQ ID NO: 686566 - DNA, 1570 bp, Homo sapiens
gagtctcgctctttcgtccagtctggagtgcagtggcgtgatctcggctcactgcaagctccgcctcyccggttcacgccattctcctgcctcagcctcccgagtagacgggactacaggcacccgccactgcacccagctaattttttgtatttttagtagagacggggtttcaccatgttagccaggatggcctcgatctcctgacctcgtgatccgcccgcctgggcctcccaaagtgctgggattacaggcatgagctaccgctcccggccatcctttgccccttttaaaaactggattctttgtctcacaggtttctgaaatactgttaatttttcttaatgtatattatctttttctttttttttggttaacattccaaacatgtataaccaatgaagatggcctaaggttttctttttactggtattcacttcagtaacttgaatccacagatgtaagcagtatataaccagaaagttacaagcaaacacaaattatacatgcaaatttctgttcacaaaggtcacatgtgcaggtacatgaaatagaagcatgcatctaggattatggccaaaatgtttttaaaatgcagaaatgtaaaattacatcttgaaaatatgaaaagatggtctacacacttcaaaaatcaaatgttgcttataccagagatgtgtgacaattacagggttcaagtgacaagcaataagatctcaaaaattaatactggtcaaagagaatgggaatatttttacatttcactgaaaatacattgactactagaatatgaaatctagcaggaactcaggggaaagattacaaattctaaagccaattacttaatatttcttattacctaaacaacagaattaacattaacagaaaactgcacctgcatttgcattgccaatctcacattaatgaagttccccaaaaatgaaatgcaaccaaaacaggttcaaactccaaatgaaagtctgcaaggctcagattaaaacatggaatgtttcagatgaaagtaatgaaaatactattggttttgttatttattgaatggaataaaatgttgacatttctttgaaacttggaactactacatttcatttttccaaatggttctacatttttttcttagtggtgcaagttgtcttaagtagcttaggaagtcaatctctacaaattacttatgtctgttgccattctgataaaacaaaaactattcattaacttaaccatatgtgtattttttttttgctgtaacactgaacacatgaacagacatctattatttctccactaaaacaaaagagtacaatagttttcttctaactatcagtattgtatttaagaaaggttaacattaaaaacaaaggaccattattttctttgaaatcattaaatcttcttacatatcttaagttcccttctgtctgcgtttgtctgcaaatttattcagaaatttctttaatttctgataatgaggaaggctgatacaatgagtattctttgcaacttcttcatttgtataagagtgatcacagcttacagtaaaaccctgttttaggta

SEQ ID NO: 686567 - DNA, 1570 bp, Homo sapiens
gagtctcgctctttcgtccagtctggagtgcagtggcgtgatctcggctcactgcaagctccgcctctccggttcacgccattctcctgcctcagcctcccgagtagacgggactacaggcaccmgccactgcacccagctaattttttgtatttttagtagagacggggtttcaccatgttagccaggatggcctcgatctcctgacctcgtgatccgcccgcctgggcctcccaaagtgctgggattacaggcatgagctaccgctcccggccatcctttgccccttttaaaaactggattctttgtctcacaggtttctgaaatactgttaatttttcttaatgtatattatctttttctttttttttggttaacattccaaacatgtataaccaatgaagatggcctaaggttttctttttactggtattcacttcagtaacttgaatccacagatgtaagcagtatataaccagaaagttacaagcaaacacaaattatacatgcaaatttctgttcacaaaggtcacatgtgcaggtacatgaaatagaagcatgcatctaggattatggccaaaatgtttttaaaatgcagaaatgtaaaattacatcttgaaaatatgaaaagatggtctacacacttcaaaaatcaaatgttgcttataccagagatgtgtgacaattacagggttcaagtgacaagcaataagatctcaaaaattaatactggtcaaagagaatgggaatatttttacatttcactgaaaatacattgactactagaatatgaaatctagcaggaactcaggggaaagattacaaattctaaagccaattacttaatatttcttattacctaaacaacagaattaacattaacagaaaactgcacctgcatttgcattgccaatctcacattaatgaagttccccaaaaatgaaatgcaaccaaaacaggttcaaactccaaatgaaagtctgcaaggctcagattaaaacatggaatgtttcagatgaaagtaatgaaaatactattggttttgttatttattgaatggaataaaatgttgacatttctttgaaacttggaactactacatttcatttttccaaatggttctacatttttttcttagtggtgcaagttgtcttaagtagcttaggaagtcaatctctacaaattacttatgtctgttgccattctgataaaacaaaaactattcattaacttaaccatatgtgtattttttttttgctgtaacactgaacacatgaacagacatctattatttctccactaaaacaaaagagtacaatagttttcttctaactatcagtattgtatttaagaaaggttaacattaaaaacaaaggaccattattttctttgaaatcattaaatcttcttacatatcttaagttcccttctgtctgcgtttgtctgcaaatttattcagaaatttctttaatttctgataatgaggaaggctgatacaatgagtattctttgcaacttcttcatttgtataagagtgatcacagcttacagtaaaaccctgttttaggta

SEQ ID NO: 686568 - DNA, 1570 bp, Homo sapiens
gagtctcgctctttcgtccagtctggagtgcagtggcgtgatctcggctcactgcaagctccgcctctccggttcacgccattctcctgcctcagcctcccgagtagacgggactacaggcacccgccactgcacccagctaattttttgtatttttagtagagacggggtttcaccatgttagccaggatggcctcgatctcctgacctcrtgatccgcccgcctgggcctcccaaagtgctgggattacaggcatgagctaccgctcccggccatcctttgccccttttaaaaactggattctttgtctcacaggtttctgaaatactgttaatttttcttaatgtatattatctttttctttttttttggttaacattccaaacatgtataaccaatgaagatggcctaaggttttctttttactggtattcacttcagtaacttgaatccacagatgtaagcagtatataaccagaaagttacaagcaaacacaaattatacatgcaaatttctgttcacaaaggtcacatgtgcaggtacatgaaatagaagcatgcatctaggattatggccaaaatgtttttaaaatgcagaaatgtaaaattacatcttgaaaatatgaaaagatggtctacacacttcaaaaatcaaatgttgcttataccagagatgtgtgacaattacagggttcaagtgacaagcaataagatctcaaaaattaatactggtcaaagagaatgggaatatttttacatttcactgaaaatacattgactactagaatatgaaatctagcaggaactcaggggaaagattacaaattctaaagccaattacttaatatttcttattacctaaacaacagaattaacattaacagaaaactgcacctgcatttgcattgccaatctcacattaatgaagttccccaaaaatgaaatgcaaccaaaacaggttcaaactccaaatgaaagtctgcaaggctcagattaaaacatggaatgtttcagatgaaagtaatgaaaatactattggttttgttatttattgaatggaataaaatgttgacatttctttgaaacttggaactactacatttcatttttccaaatggttctacatttttttcttagtggtgcaagttgtcttaagtagcttaggaagtcaatctctacaaattacttatgtctgttgccattctgataaaacaaaaactattcattaacttaaccatatgtgtattttttttttgctgtaacactgaacacatgaacagacatctattatttctccactaaaacaaaagagtacaatagttttcttctaactatcagtattgtatttaagaaaggttaacattaaaaacaaaggaccattattttctttgaaatcattaaatcttcttacatatcttaagttcccttctgtctgcgtttgtctgcaaatttattcagaaatttctttaatttctgataatgaggaaggctgatacaatgagtattctttgcaacttcttcatttgtataagagtgatcacagcttacagtaaaaccctgttttaggta

SEQ ID NO: 686569 - DNA, 1570 bp, Homo sapiens
gagtctcgctctttcgtccagtctggagtgcagtggcgtgatctcggctcactgcaagctccgcctctccggttcacgccattctcctgcctcagcctcccgagtagacgggactacaggcacccgccactgcacccagctaattttttgtatttttagtagagacggggtttcaccatgttagccaggatggcctcgatctcctgacctcgtgatccgcccgcctgggcctcccaaagtgctgggattacaggcatgagctaccgctcccggccatcctttgccccttttaaaaactggattctttgtctcacaggtttctgaaatactgttaatttttcttaatgtatattatcttyttctttttttttggttaacattccaaacatgtataaccaatgaagatggcctaaggttttctttttactggtattcacttcagtaacttgaatccacagatgtaagcagtatataaccagaaagttacaagcaaacacaaattatacatgcaaatttctgttcacaaaggtcacatgtgcaggtacatgaaatagaagcatgcatctaggattatggccaaaatgtttttaaaatgcagaaatgtaaaattacatcttgaaaatatgaaaagatggtctacacacttcaaaaatcaaatgttgcttataccagagatgtgtgacaattacagggttcaagtgacaagcaataagatctcaaaaattaatactggtcaaagagaatgggaatatttttacatttcactgaaaatacattgactactagaatatgaaatctagcaggaactcaggggaaagattacaaattctaaagccaattacttaatatttcttattacctaaacaacagaattaacattaacagaaaactgcacctgcatttgcattgccaatctcacattaatgaagttccccaaaaatgaaatgcaaccaaaacaggttcaaactccaaatgaaagtctgcaaggctcagattaaaacatggaatgtttcagatgaaagtaatgaaaatactattggttttgttatttattgaatggaataaaatgttgacatttctttgaaacttggaactactacatttcatttttccaaatggttctacatttttttcttagtggtgcaagttgtcttaagtagcttaggaagtcaatctctacaaattacttatgtctgttgccattctgataaaacaaaaactattcattaacttaaccatatgtgtattttttttttgctgtaacactgaacacatgaacagacatctattatttctccactaaaacaaaagagtacaatagttttcttctaactatcagtattgtatttaagaaaggttaacattaaaaacaaaggaccattattttctttgaaatcattaaatcttcttacatatcttaagttcccttctgtctgcgtttgtctgcaaatttattcagaaatttctttaatttctgataatgaggaaggctgatacaatgagtattctttgcaacttcttcatttgtataagagtgatcacagcttacagtaaaaccctgttttaggta

SEQ ID NO: 686570 - DNA, 825 bp, Homo sapiens
actaccactactgggggaaatacacatttatatgttaattctttagacttttgaaagcgtttgtgcatacattatctcatttgaacttcacagccattcagtgatttgtagggaaggcactctcctcactttgcagaaaaggaaacaaactcaggggagtgaaatgactcctggagttgcataaattcaaatttacacttctgtaagagacacaggtaggggtgggactttctctctgcaatcacagmgctcatgaggcttcgggtccagcagacacttgggcattgatacttgatgaataatgagaagatgaatgagtggataaataagcaaacatctcaaagccatctaacagccccaaatctggattcacacagcaggagagacaggcacaagtcaagaccattttaagaagtcaaggttaccagcctggccaacatgatgaaaccctgtgtctcctaaaaatacaaaaattagccaggtgtggtggtgggagcatgtaattccagctacttgggaggctaaggcaggacaatcacctgaacctgggaggcagacgttgcagtgagctgagatcacgcgactgtactccagcctgggcaaaaagagcaagactccatctcaacaaaaacaaacaaacaaacaaaaaaagtaaaattctgttctgattatttgctgacctgtcaaacacctgagaggttatatttgtttcacagattggaaaactcaagttcagagaggcaaagtgaaaggcccagtttaaccttgagtgagtaggtatatttagatacaaccgccacctccaagtggaagcaaggtgtgggg

SEQ ID NO: 686571 - DNA, 663 bp, Homo sapiens
aatgccaaagaagcatgagttaatttaagccacttcagtttgggtccattcctgtctttctctggttccctgttgtgggagcattctgtccctacagagcacagagctgggggttcattctttcacccgcagtgccygctgtgatgcagcaggtcccatgtggggtctcacagcgggagcaactgccactctctcctctctcttcatcctctcattcattcattcatcaaacattcacacatcaactccgttgtgccagctcctccaccctgaccccctgggacgtaaaggaaggcacgcatctgcagatggatggcgtgccttgctggggagcccctcgcccaggcactgtgcccctgtgtctcactcagatctcacaatgagcctgcaagcagacgttgtttttcccggttcaccaacaaggctcagaggggaattaaagaacccagggaggccaggtatggtggctcacacctgtaatcccagcattttagaaggccaaggctggtggatcactttgagctcaggagttcgagaccagcctgagcaacatgaagaaacaccatctctaaaaaaaatacaaaaattaaccaggagtggtggcacacacctgcagtcccagctactcagggggctgaggctggagaatcgcttcaacctggg

SEQ ID NO: 686572 - DNA, 2367 bp, Homo sapiens
tggtcagacaatggcaggggcaggggcaggggaatgaggggaaagtattccagcccgaaggaacagcaggtgtgtagccttggaggctggactcggcttggtgtacccacaccaaacttcactggggtgaccatcatgcagcaggtactagggataaccagagaggtctccctgcttttaaaaaaaatgttttgtgtgttattctgggggaaaggaaacaccactgggattgtaagcatggaaatgacatcatattttaatctgattgttgtgtagagaatggaatgagagagtgggcaacatccattctcttggaatctatttccattccccctctccttgtagcaaatggtttgtttccctttccctatcaagccaaatattcactctttcctctttgttctccctccccaccacattaattgaaaactttgaatatgtatttggtgtgttatgaattcttgttctaccagttttcccccagcagataatcattttctcaagggcaatgactgcatcagtttgttattttattttatttttttactctttgtgcccttgggacatagcaaagatcctggatctgccatgcaggaagccaataaatatctattagttggttgatccaatgaatgaaatactcaaattgaaggacagttctccagatggccttagagcgacccacttctctactctttcttgcctgtatttttcaagagtaagtgtggaatgttctgggattgctaaacagaacagaatcctgaaataagagggaactggccagaacagtccagactctgttccagttcccatctccctgcagaacaagctgtccttcaacactttagtccagtggctcatggggccccagggtgtgaaactcaggacaggctgctcttcaggtggggcacacaccgctgagactccatctgccccaggcagctttcctaagccttgggggaccagctcacagtgaattctaagcttctgttgtcccttgctgcctgtctatacataataaactcatttcatgtaacattttgtgggtgagtattctgtctcactggactcatacaccttggtaagcagtgcagagtgcacctcctttgcacaaatctccatggagcacctcctgcacgtaacctctctctgcaactgcatctccatacacatatggaaatgtctgtaaaataagccaaatgccctatgatgtcacttacatattaaatcttaaaaagactaattcatagagcaaagagaatggtggttaccaggggcttgggaagatgatgatcaaagggtacaaaatttcagttaggagaagtaagctgaagagatctattataccacacaatgactgtagttaataacaatgtatcgtatatttgaaaattgctgaaagagtagatttaaatgtcattacatataaatacatgaggcagtacatatgataattagctggatttagccattccacaatgtatgcatatttcaaaccatcaggttatacaccataaatatacacaatttttatgtgtcaaataaataaataaatggaaatgcccaaatttttctctcaaaggctgagagagatcctttcatacttgcattgatatattctccatgcaggctagagtccgctgacccggtgaaagagccctgtctcagcggggatgaaggactcagctgtgagtacagcagggaacaggctgatggttttttctgcaactcaaggccaaagaaaaattacgacagtgagactgatattcaatggcaaatgtgtttgggttaaaggagagatgggagcaggaagtctttctaagtggctgtgagcaagaaaaacaaaacagcaggttgcttcagtgtctcccctggatcccaggttcaaggcagacccggccaaggccaaggccagacccatttaactttcagatccttcccactccccacgctctggaccaagagaacaagagccccgcaggttcacctacatgggaaaggaagcaagcctgctgcatttacattgctgtatgcgcatcatgttttcaagtcccsggatgtgatgttgatgaaagacagttaattcaatttctacagagaaattgattaatggactggattaaaagaagtcccctgtgtccgcagccttcgcccagcataccaattctgcgttatctggcctggttttctctttccctcctcacttgacactttgacaatacacactcaggcacagtgggaaggaggagggaggggaggaaagatgagacaccacagattagggctggagcacacctctatatttaattagttctattaatatttaaaaataataataaaagggccccgtggggaacacgctgatct

SEQ ID NO: 686573 - DNA, 998 bp, Homo sapiens
tgatcttagggttgttctagcgattgacagctgttctggagcgggcattctgccagagagtcccaaaaggactcaacattttcttccatgaggagagaaggcgtcctttcctgttcacccgggaataaatcagaagtcacagccaccttgaaatgccaggcggtgtgagggcaaactccaagtgggctgccccttctctccacccggtggcacagagcactcccccaggctgtgctcccgagagcccgtggctcctcaagaagttctgtactcactgcaagaggccagagaggactgttcctggagatccttaggccgggggcaggcaggccacccatgccccagatggtgggtttcttcagtcttgcctggcccctctgacattgccgagaggactggaggaggggacagacaacaaggccgagaagagcccaatctgcccttggcattgatgacctggtatttacggcaaccttcactcttgggctaatatggataatatatgtaagatttttgcacttttcagaggcttccaacttctgcaatcagtttgaatctatattctgaatcagaaaagcaggacttggagaaataattttatccacctaaataaatcaatattctctcctttgtgtatgcatttgacaggcctgactgcatagtgcacctgattgcaaggaggataaccccaggagaagaacaagtgacctgtgcactagcaggccacctgctgactcycccgttcccacccccgattagagatgggatccatcaagtgtccttattaataacctagtgttctgtggctttagttaagagtaatgtcccctagctttcaatccatgttgtttgcagagatttcaccgtgtccctgcactttggtggagagaagggagctgatggagctccaggcaggcacaggctggcgtatcactaaaacccaaaaaattaaaatgctggtgaataatttactcgaatcagcctgtgaatgttaggca

SEQ ID NO: 686574 - DNA, 998 bp, Homo sapiens
tgatcttagggttgttctagcgattgacagctgttctggagcgggcattctgccagagagtcccaaaaggactcaacattttcttccatgaggagagaaggcgtcctttcctgttcacccgggaataaatcagaagtcacagccaccttgaaatgccaggcggtgtgagggcaaactccaagtgggctgccccttctctccacccggtggcacagagcactcccccaggctgtgctcccgagagcccgtggctcctcaagaagttctgtactcactgcaagaggccagagaggactgttcctggagatccttaggccgggggcaggcaggccacccatgccccagatggtgggtttcttcagtcttgcctggcccctctgacattgccgagaggactggaggaggggacagacaacaaggccgagaagagcccaatctgcccttggcattgatgacctggtatttacggcaaccttcactcttgggctaatatggataatatatgtaagatttttgcacttttcagaggcttccaacttctgcaatcagtttgaatctatattctgaatcagaaaagcaggacttggagaaataattttatccacctaaataaatcaatattctctcctttgtgtatgcatttgacaggcctgactgcatagtgcacctgattgcaaggaggataaccccaggagaagaacaagtgacctgtgcactagcaggccacctgctgactctccygttcccacccccgattagagatgggatccatcaagtgtccttattaataacctagtgttctgtggctttagttaagagtaatgtcccctagctttcaatccatgttgtttgcagagatttcaccgtgtccctgcactttggtggagagaagggagctgatggagctccaggcaggcacaggctggcgtatcactaaaacccaaaaaattaaaatgctggtgaataatttactcgaatcagcctgtgaatgttaggca

SEQ ID NO: 686575 - DNA, 1009 bp, Homo sapiens
ggaggttgtgtttgaaaattcagaatgctgctgagcagcctttaagatattgaaagagaaatggcccctggattgaaaacttggggttrttttgatcttagctatagcagtgtcattggggttgtagtgagaagttgcgttttaatgagtgaagagaataggcgaaaaacgagaccaggagttcagacaatattctagctgaagaggcaaataatcaacattggtttgtaattatttgcaattaaataagctggataattatagttagtgatagatattatgaaggaaataatagagagtgatcttggtggggctaatttaaatttgttgcaaactttggactttaaaattaaagtatagttaggagggttcgtttctggagaaagaataatactttccttgttggcagtttggggaagagaaaaaaataaacattcttaaatttgacaatgattgttttgtttctctcatctcactgttcttttggctgtgacagaatcattacttcttgaccactcaaagaccttcagcccttttcagctttccaattccccctactgcacaaaattacatctttgtaatgttatagacaaaaaggaaccaacttataaagaaagtttaaacttgctctcttggttttattaatactttaatctgaggaagcagatcaaagtggattttttctctttatgcaccaagacttcagaataaaagttataaactttccaaattgttctcatataaaaaatttatatatttccgttaaaaatgttatgcaaaatttgacagaaaaataacatccattagtagacatcaaaggcatccaaacagcaaaggtgttccaaattgctttttaaaaatgattattcaactttcaaactaacactataaaaatacttaatgatttactctgagtagaaagtgcagtgatgaagtgatgtcctaggcatcagaagactaatcaacagtgtgttgtcagcccaaatgggatgatgcggagagagaggtg

SEQ ID NO: 686576 - DNA, 1026 bp, Homo sapiens
aatattctgttgcaggtagaagtaaagataatacacacacatacacacagtcatgcacacacaataaaagtgaattagcttaataacagtgctgaaaatgcaaaactgatgaatagaaagaattctatggtattatatatagtttaaaactttatataaaataattataaaaatatagatataaaataattttaacataattaaaattaaacatgtaaaaatatttccccaaaatatgcattttccaaagatatgtaaacgttcacagatatattttaaactcattaraatattggcctgttgctgggagaagaataaatctggaatgaagaaacatgagagtaatgaataagtaaatcatggaggaactgatgattattttgtcttgaactaaagaatatgagtaacttttcatcttcattgtttaaaaagaaaaataaaaaataaatttttctaaatcaacaaaccaaaaacatcaaaaaaatcaaggagatttggctatacacaattctcaacaggctaaagggaagctattttgtgtgtgtgtgacttttttagtgcattttatatttggttccagagtttggttctcttaattaaaatatgttcctgctattttgagtatgttaggtaaagatagtgtgacttattctcaaaatatagttttgtttttttaagcgccaggttcctctaaattattataagcaatagcttctctttgcaaattaaccttggatattattttaaaaacttttttttccacgcagcaatacaaatcactgaacacaatgttcaatcttaagtaattatatttattcagaaggaagttgtgtgaaaattttcctttggcttctcacttgaatgacacagttagaacacagcaactacagttgaggccagaccctcttctttcatatttattaagcagtagccaaacctgccccagtatctctgattatcactgcagtatcaggaccacagcccatagttattttgtgcaggtttcttattgtacaaatgtgcaaa

SEQ ID NO: 686577 - DNA, 1095 bp, Homo sapiens
gttgcagtgagctgagatcgtgccattgtactctagcctgggcaacaagagtgaaattgtaaaaaaaaaaaaaacaaaaaaaagaaagaaagaaagaaaaagaaaaagaaaaaagagaagaaaagaaaatagatatagattataaatgtccttgcaaagttcttctgaggataaaataatagttactttttaaaagcacctagcacggtgtttagcatatagtagacactcagtaaatgttagcttatttgcatagactctttaatttccgtttcgagtagtgaatccaagtcttagctctgctaagccgggccccagttttagcatctgacaaatgggaataataattttgtcttcgggatcaaagcttggtaacttacactgaagagctttgccaatggcagagtatacattaatataagatggtcattatctctcaaagcttggccaggcatagtatttgctggagatgggaaaggacggtaactaaatttcaatggccycattgggcaggatcccatgctgaatggacaagcctaaatacagattttcaccaaaattatattcatctcttggtttgggtatgggtctatgctaggcactgggacacactggtgagcaagaccttgtctgtctggctcagataaggcaacgctggagcccaggcagtggtggtggatgagggccagtcagctccactccctaattctgttggtcctgcttctaaacatccattctgttatttccatctccagcaactccctagtaaaattgcatgtctttacatctttgctacatgtatacatacacacatatttgtacacgtggcacttctcacttatttctaaataacaatcaaaagtaatacggaccaaattaaaagaatgcatttttgttcccacttccaaagattttcttttcctaccccttactgctaattttaaatgttaacatagtacagacagcaagggtggccactgagatttctgctttggggactttattgagatttttattttctgcataattcatgttttgtttttgtgaatgctttatgaatgtttgaagagaatgtgtattccctattttagttta

SEQ ID NO: 686578 - DNA, 1311 bp, Homo sapiens
cttctgcataccatctttttaaagtgtagcagagagaaatgtaaatgcccaagagatacaagcaaggcttttggctgagagaagggggacaaactccttgttcagacgcccaacacagagattgcagggaacgaaagcttcctttgctttggaactcatctctgcctcagttcctgtcttgtgataaggttacagtgaatggggctggcatccttcaaggttactgttccagaaaatatttgcaaataatttgatgtgctgtcagttagcaggctgcagtgaattcttataattcaacatactaatgtggttttttaatgccttaagctataaataagttggatatgcaaaagtttctgtaatgtttatttaataacaatatttaaaaaataaatcttgattattccatmgagcttcaatggaaatcttccactccgacggttggttgtctgtgacctcaggcggttccttccttcctttgtctcatttgatatcactaaagaaacacgcttgtttttcttttcaggctttgggaagcagtactgtgatgcctctgcctacatgctccccatccaagtctctgcttgttaaatgactgaactcaattcaagttgaataatcccagtgggatggcgcctctttgggtgtggggccctgggaagatgaagcgggcacccctggatttaggaagcctgtaggccagttggagcctcaggctccatatcacaaaatcagtgtgcctcgactgtatgagaacacagaagggaatattgatcagtgtgtggaggccgcggccctgagtggggcctgcaaagataatatcaccaggtggaccgcagaagccagggttgcaggcagaatgcaccaagatgggaggtgtcaaaggtgaatctcataatggcaagacaaattgtagtgccgatgtttctactgataattttctggaatgaggtcatttaaactatggatcagccgagggtatgctttgaccccgggtgtgcctcacaggagaccgccaggagcttctgtaagttgcgttcagccaagagccctggggctggggtcagaaggtagcaggatcccagagaactaaagagcagctgtccgggtgggggcgcccttctgagggcccgtgctgctgctgattgtaaagaagcgcctgacaatgcagacacggctgagtgcatcctgtgtaaccggcgcatgcgcgcccagaggcgccccacacgctcttcaaggttagagcgggaatgcagagggcgggcaggtaggaggtggggaacaattttgtggcttcatgatgccccctgg

SEQ ID NO: 686579 - DNA, 646 bp, Homo sapiens
aaaatctttttaaggaattgatctacattgctgcttattcttcaccgcaggatgtgatcctttcatttattacagaataatcgtccttatgccaaagtgtatgatgcaatatgctgaaagcatattctgagctatttatcagaattaatggcagtgaggcacatggaggagatttgagtgtcctgcaaggatagcggacagggaagggcttaggtcagtttagctcctggccactcaaagaaccataatggcatgttgcatttaagcagatcactcagtgagatcaaagaaatggctgccatttcattctccttcatagagtgtttttaatgaggggaactttgttgagagacaaggacgatggaaagagtttgagctttgaagtcagacagacttgggtttgaattcaacccaattatctaccattatctactatggtgtgaccctgggaaaaaacttgagtctgtctttctcagtttgctcacctcctctaaagtgttgggggarcaggggcggcggggagggtggaggtgggcaggaggcaataacacctaccatgaaggattgttctgaaaagttaaatagagactctaggacagagcaggcacaaagctggcatttaataagtaaatattaaaatttttta

SEQ ID NO: 686580 - DNA, 1443 bp, Homo sapiens
ttaaaaaggtatcttttccccagtcagtaggtatagcttttcttcattgtttttgacagttgcataatatttcattatgtggatgtactattatgctcttgtgatactacagacttttgcaatgtaacctaacatgtttacatctagcactaatgcatgattttgaaggaaccatattcccaataaagagctatgggcctagattattggctaagtcaaggaaagtattaaaatgcattcacttgcaaaagatgctttataattgaaaataaaaccttctctccctcccctacctttttaaagcccatgtactgcctattggagattactgtgatatttttacatttatcataaagtctcttctgcggagaacctgttgaagaggaggcgagtctcatgcatttctgtcctccctcttckccttcccaccttcctttccactcattctcagccaaggaaacctaagcataaatctgccttcaatggcccacagaacaggtcatctcaacacatttgagaagacttggtggctggcctggtgaattgtttgggaatttttgagttatgagttcctgacatagacatatatatcaataaattatcaaacaagcaagaagtactcaggattgattgcttgcaggtatatttgtttataaacaattagattcaacacaactacagaaagatattttcatcctcttctagcgaatgtaacaatgaagttttgtggatggagaagttcttgctccatataaaaatacaaaagttcaggccaggcacagtggctcatgcctgtaatcctagcactttgggaggcctcggcaggaggatcacctatgatcaggagttcaagaccagcctggccagcatggcaaaaccccgtctctactaaaaatacaaaaattagccggaaatggtggtgtgcacatgtaatctcagggaacaacctactcaggaggctgaggcaggagaatgatgtgaacccatgaggctgaggttgcagtgagctgagactgcccactgcactccaccccggcaacagagtgagactctgtctcaaagacaaaacagaacaaaacaaaacaaaacaaaaaaaagctcagtgcatcacagcaatatgttcttctgaacaggattcctgggtttgtattatttatgaaaataatctgctgctctcagttcacttgtaaagttgactgaccagtggccatgagaaaaatatttacatacagaatttcaagactgagtttcttttgtggaagataagtgagtgttgttgaatatcagagaccaaaaacaacagatgaattacgtggcacatacagttgagatggtaaatatccaaggaattgggattatgtggtgaaacctaaaggctcttctggccaatctcttcctctcacctccatagtcttcttaacagaacttggtaacttaaataac

SEQ ID NO: 686581 - DNA, 683 bp, Homo sapiens
aataacacccctgttatctaatagaaaaactagaaaatatgagtccgggagccactggtgccctagtttgtctacatgaagaaaaccaatctacagaaataacaaatggatgttgcacaaagacaggaataatgacaaaaggcacaaaaaggcaaggatcactggttatacttctcagatacatacccctccacacttttctgattacatgaggtgttatagctaaaatgtgtttttgttgcttggttttgccaaatgattctctgtttgatgttttgcaaatttcttaaactgtttgggcctaaattccttccagcaaaaatgatattgataatagtgaacttttacaattatcaaaaactcaaagtaaatatttgtagtttctgacacatactgcaggttgaattaagtaagtaagtttttaagactacattcatcaatgcctaaatgaaagtaataatactttaattaataatcatgttataacttgggaaggaaaatctagaatcttggcttattgttgcttcatagcctcagacaaaatatattcctcattggtgccttggctgtctgctatggagaggtcctattcagtgagtgtacttttgcccctacttccagctgagtctccgctggcttcacatttcagtgcctttcatttagataactaygtgctgcctgaa

SEQ ID NO: 686582 - DNA, 586 bp, Homo sapiens
cacaaaacatgtttcttctcatgacacttaaattatttatattcacagacttttgatctcatttgtttcacaccttctttcttgcttaatttttaaacagtgcttggagtctccttaccagctactttcttctttgcattggaagctcaactacaatgtttttggtttatattcatctggactgccactaccacctgagattattttccaatgtgctttctcgtgaaatcttttccaattgatataatctactgatctcttttactgatgaaaaacagaattttagagtcaaatattcaggattcactctaatagttaacargaaacatttttgccaccatttttagggatattatttagtttcctctatgcatccatcttgagggggtgttttctgtcttaaaaggaggaattatattaagtactattcattttacttaatatttgttttttacttgtattaatcaattttcatactgctctgaagaaatacctgagactgggtaattcataaagagaaagatgtttaacataacgtacttactgttccacatggctgaaggggcctcaatattatagtggaagg

SEQ ID NO: 686583 - DNA, 1437 bp, Homo sapiens
tgagaatcatgggattcaccaagtcctgtcactttcatcttataaacacaataattttatatcttctttttttgcattcctgtcttagttcatcacatcttcctgaaattttgcagtaggttttcaactcatcttccaacgttaaattttgctccacttcaatccaccctctacacttcagaaccatcttcgataggtgtgaatctgttcatgcaattctattgacactatttcatgggcccctacaggctttggacaaatattcaattattgagcaagayacaaaaatggtcttcatcttttgatccccacctacggcttcaacaccaaatctaccctttcctcactcccactccagtcttttaaaatgacttccaaatccctaataccatttatttatcctgtgtcacaccctcctctatgttattctttctgcttggaacatctatccacacacttctaacccccttcttcacctgactcgtttccatgtaatatattagtatattcccactatgccctgtgtatatcctctttcaaagcactcatgaccccacattgtgattctttctacacttgttgttccaaatggtgaatgcctgactttgtgcgctatgattctgtgttctatttccccacataaatagtacagtgtgtagcaaataataaattactactatagaagtgaatttttcactcaatacttgtggcattcgcccggggtcaaatatccaaacaaccatttgtatataaagcaaaaccacactgggagagacaccataaccttgtcgtgatgtaatttataaacatgatggaggaagacagaataaatacgtaaaatataaaccatttgaaataccaaatacccagacaagtgacaaaatcaacaagtgacgaaggaacttataggagacaaagaccatgaggcacttacttggctgctaagaaagtcttacagaaaaggaaagacgtaagctaggcataaatacagtaagaatctgatgtaactataagaatagtaaacgcctacctgggcggtggtggctcacgcctataatcccagcactctgggaggccaagggtggggaaatcgcttgagctcaggagtttgaaactagcctgggcaacgtggtgaaaccccatctctattaaaaatacaaaaattagttggtcatggtggcacgtgcctgtagtcccagctactcgggagactgagatgagagaattgcttgggtccaagaggtgaaggttgcagtgagccaagattgtgccactgcactgcccaggcaacaaagcgagacaactgtctcaaaagaaaaaaaaaaaagtaaacacctagataatatatttcatgaggtcaggggatgggttggtctcattcactactctgtccataaggcctaacacatgcttggatcatagtagctgctaaataag

SEQ ID NO: 686584 - DNA, 601 bp, Homo sapiens
agtgctgatttccatagttttgccaagaggcagaatacagtatattttctcaaaaaacttaataccatttttacaaatcaagttgtattttgtacaaaatagtgaaggaaagcagggaagaggggatgcttaactctgaaacagatttttatttttttattttttttggttcattaasctagataaaagcaggcttttaaataggtttaaaaaatgttaactaactcatttatttttagaggtatttaaaaatttaggattctgaccctcctttctggccacagatgaaaagcaaaataaccaatattggaaaaataagttagaaatcatgagatcttctctttcttcaacatctggattgcaacaaagcaatatacgtttagtctgatgaagtcaatgaagtatgactttttctgtctacccacagatgttagtttccaacaaaaaaaaatctccttaagttacaggctgctcttttggagatgaattatccacgggtccacttaataactaccaatgatgctattacaacccccagagattaatagaagatcacattttgttaaatgaagtagttttcttaaaaatgggaaatatttca

SEQ ID NO: 686585 - DNA, 601 bp, Homo sapiens
agtgctgatttccatagttttgccaagaggcagaatacagtatattttctcaaaaaacttaataccatttttacaaatcaagttgtattttgtacaaaatagtgaaggaaagcagggaagaggggatgcttaactctgaaacagatttttatttttttattttttttggttcattaacctagataaaagcaggcttttaaataggtttaaaaaatgttaactaactcatttatttttagaggtatttaaaaatttaggattctgaccctcctttctggccacagatgaaaagcaaaataaccaatattggaaaaataagttagaaatcatgagatcttctctttcttcaacatctggattgcaacaaagcaatatacgtttagtctgatgaagtmaatgaagtatgactttttctgtctacccacagatgttagtttccaacaaaaaaaaatctccttaagttacaggctgctcttttggagatgaattatccacgggtccacttaataactaccaatgatgctattacaacccccagagattaatagaagatcacattttgttaaatgaagtagttttcttaaaaatgggaaatatttca

SEQ ID NO: 686586 - DNA, 608 bp, Homo sapiens
gggaaatactaagttttgagtattacttcgtttgcttattttgtaatttatttaattgtaagtttatataatccaatttttggcaatggctgtatttaacaactggtttccaaatttacaaatgtactcttttargcctacatgaactgggtgtagttcagcactcctgtatatatgatatttgatattgcctattataacacaggttaaaaatagtgaagcttaaactcatttgagacttcctccctccctcttttccttccttccttcctttcctttccctccttccttccttccttccctccatccttaagttcttacagatttgctagacatgtcaaaatgagtagaaatcagtatgaacaaattaaattataaagttacctatttatgctattgatatggggacagacagaaataagaaggttatacttttccaggattctataatatatattttctttatatgtcaggatatatgtacgtatccagttatatatcttgatacagttatttttgtttctatgaaaccatgttgaatgctatgaaaagccttgataatggtaagttactaaaaaaggctctctaggtatgagcaagaaggcgaa

SEQ ID NO: 686587 - DNA, 564 bp, Homo sapiens
tagaacatagaaaatgtaacaatgcataaacgaactttgcaggtgactttggaaaaaactgctagttgttcccaaaaaactagctagttgttgtttactctctatgaagcggctacactgtctggggtatataccctggttctttctcatggttgagaaagaattcaggacagagacacatgtgggtgggttaaggagtggaaagtttaatagaagaaatgagagaagagagaagctccttgcatgagagagaaacctctgaaaaagtgggaggctgtgaatctctgcagattttaaaggcaagctggataaggcagtatctgattacacagggctcacagatttgttccatcaggcatgaagtctacatagtgcttggggaaggctggttgtccygccctaatcttattatgcaagtggactttccagttgattggtgccatcttgtctgcttcttactgtacacttggctaacaaagagaagggaagatggagccgccatcttgaaaacgtctagtccttggttcctgccagcattcactcgtgcaagctcccagcttgcag

SEQ ID NO: 686588 - DNA, 578 bp, Homo sapiens
aaatgtgtaaaaattcatgtctccctgcaaaggggtatttttattatataagaaattaatgagaagaacatagagttttgataaataggcaaaggcagggatatcaatagagaaacccaaaaacatttagttaaacaaaaaataaatatccaagagggccagacatggtgctaagtgctttccatctaatagcaatatgaaagaggaaatgcaactggttgacagacacatggtaaatgttgattccacactagtaatcaaataaatgcaaataaaaattatgagaccccatttctcagctatgaaattgcccacaattaagaaaaaagaacgtgattaaatgaacttgcatatatttctgaatagggtagaaattaaaamaattgttttggaaagagatttggaaaaactatcaaaaccttggaaattcatgtacttttgacattgtaattttgcttctgggaaaatgacctttggaaatatcccaaaatatacaaaagcactgttactctttgcagagctactgaatgataatgaaaattagaaacaacctaaaatatccaaaatcatgcttcaag

SEQ ID NO: 686589 - DNA, 1013 bp, Homo sapiens
catcgtgtcccaccagtaaggaagatctgggtctcagagctgagccaagacctcccgggtcctctgcggttttttgtgtctttcagagtggctggtgctccagacccctcacctggagttccaggagggagaaaccatcgtgctgaggtgccacagctggaaggacaagcctctggtcaaggtcacattcttccagaatggaaaatccaagaaattttcccgttcggatcccaacttctccatcccacaagcaaaccacagtcacagtggtgattaccactgcacaggaaacataggctacacgctgtactcatccaagcctgtgaccatcactgtccaaggtatgcggagtctgccaagatgtaaggaggggagaagaggggatggacaagggctgaggtcacatgggcctacatggaggtctgagaaaggccacagcgcaaaattgggcactggagcaaagaggagtggtgtggaggcctggctaagtattgaccaatgagcaggagtaggggccagagcttggagccctcaggtgataggtgaccaggctgttgttccactttgaaatgcaggccccagactaaggayggcagcgaagcagagctccctcgttggtgcagaggttccctaagctcctgggcattcctaagaactgaggtttgcctttattcttctcatggctcatgttacagccattcactccagaaagcctggcacgtcatggaccgttcaaggctgtgctccatagagtaatgatgcctccagctatgcgaggctttgggcccacccttcccactgcccctgagggctaaggggagcccttccctctgttcctgcctgctcacaaatgtacctttattagtttggtggagaaacctcggtaagcaggaggcataagtccagccacagaaaccctgtgcagatgaggctggggatgtagtgagtgctgcagaagtgagtgactcagacacagaagagcttcgggtgacaagcactaggacatagcattg

SEQ ID NO: 686590 - DNA, 1013 bp, Homo sapiens
catcgtgtcccaccagtaaggaagatctgggtctcagagctgagccaagacctcccgggtcctctgcggttttttgtgtctttcagagtggctggtgctccagacccctcacctggagttccaggagggagaaaccatcgtgctgaggtgccacagctggaaggacaagcctctggtcaaggtcacattcttccagaatggaaaatccaagaaattttcccgttcggatcccaacttctccatcccacaagcaaaccacagtcacagtggtgattaccactgcacaggaaacataggctacacgctgtactcatccaagcctgtgaccatcactgtccaaggtatgcggagtctgccaagatgtaaggaggggagaagaggggatggacaagggctgaggtcacatgggcctacatggaggtctgagaaaggccacagcgcaaaattgggcactggagcaaagaggagtggtgtggaggcctggctaagtattgaccaatgagcaggagtaggggccagagcttggagccctcaggtgataggtgaccaggctgttgttccactttgaaatgcaggccccagactaaggacggcagcgaagcagagctccctcgttggtgcagaggttccctaagctcctgggcattcctaagaactgaggtttgcctttattcttctcatggctcatgttacagccattcactccagaaagcctggcacgtcatggaccgttcaaggctgtgctccatagagtaatgatgcctccagctatgcgaggctttgggcccacccttcccactgcccctgagggctaaggggagcccttccctctgttcctgcctgctcacaaatgtacctttattagtttggtggagaaacctcggtaagcaggaggcataagtccagccacagaaaccctgtgcagatgaggctggggatgtagtgagtgctgcagaagtgagtgrctcagacacagaagagcttcgggtgacaagcactaggacatagcattg

SEQ ID NO: 686591 - DNA, 606 bp, Homo sapiens
atatgtcttttgtcaaatatacctattacaaatattcctcctactctgtggctttcctactaacttttcaaatgatgtcttaattttttctttcttttttttgaggcagagttttgctctgtcgcccaggctggagtacagtggcgcaagcttggctcattgtaacctctatgttccaggttcaagtgattctcatgcctcagcctccagagtagatgggactacaggcacacaccagcatgcctgactaattttttaatttttatttaatagagatggaatttcatcatgtttgtcaggctggaactttttttaatatwatatttcaataatgattataccaaaaatatattttgtattatttgagaaaatctgtaatgtatatttgggagattaatgaatacagttatgaaggtcactgaagcatgactcttctaaaacaagttaataatgcattctacagaaaaccttttagacattacaacctctaacctaaaaaatggaactctaaataccttttcaccatctcagtagtaatttctgacacatcactttcagaaggctcataagccaactcagatacaaccgtaatattaatgaggaaag

SEQ ID NO: 686592 - DNA, 606 bp, Homo sapiens
atatgtcttttgtcaaatatacctattacaaatattcctcctactctgtggctttcctactaacttttcaaatgatgtcttaattttttctttcttttttttgaggcagagttttgctctgtcgcccaggctggagtacagtggcgcaagcttggctcattgtaacctctatgttccaggttcaagtgattctcatgcctcagcctccagagtagatgggactacaggcacacaccagcatgcctgactaattttttaatttttatttaatagagatggaatttcatcatgtttgtcaggctggaactttttttaatattatatttcaataatgattataccaaaartatattttgtattatttgagaaaatctgtaatgtatatttgggagattaatgaatacagttatgaaggtcactgaagcatgactcttctaaaacaagttaataatgcattctacagaaaaccttttagacattacaacctctaacctaaaaaatggaactctaaataccttttcaccatctcagtagtaatttctgacacatcactttcagaaggctcataagccaactcagatacaaccgtaatattaatgaggaaag

SEQ ID NO: 686593 - DNA, 1142 bp, Homo sapiens
  misc_feature 665, 666, 667, 668, 669, 670, 671, 672, 673, 674, 675, 676,677, 678, 679, 680, 681, 682, 683, 684, 685, 686, 687, 688,689, 690, 691, 692, 693, 694, 695, 696, 697, 698, 699, 700,701, 702, 703, 704, 705, 706, 707, 708, 709, 710, 711: n = A,T,C or G
  misc_feature 712, 713, 714, 715, 716, 717, 718, 719, 720, 721, 722, 723,724, 725, 726, 727, 728, 729, 730, 731, 732, 733, 734, 735,736, 737, 738, 739, 740, 741, 742, 743, 744, 745, 746, 747,748, 749, 750, 751, 752, 753, 754, 755, 756, 757, 758: n = A,T,C or G
  misc_feature 759, 760, 761, 762, 763, 764: n = A,T,C or G
ttttttgacagagtcttgctttgctgcccaggctggagtgcagtggcatgatcttggctcactgcaacctccacctcctgggttcaagcaattctcctgcctcagcctcccaagtagctgcgattacaggtgtgtgacaccacagctggctaatttttacatttttagtagagatggggttttactatgctggtcagactggtctcgaactcctgacttcaagtgatctggctgcctcagcctcccaaagtgttgggattacaggcgtgagccaccatgcctggctgacacgatttgtttcaaactggccctggacccggcaccctcccttctgcttctgactcctcacacatcagtccttcttctttggatacctgattaatggacatttccggttctcgacccttctgctttctctccaggggatggcttacatcttccttcctggctagcacctttttagggtggcacttacagtaagctatctctttgtcctcacccttctgtgtgttgccccagagatgagcctgcccaggkgttacctaagatctcaactctcttctgtccctgacaggttgtggcagactgggcaccctcatactgaaaatcatcattgaagagagagtagaatctggagcttcatagaggtggaaagttgtgataannnnnnnnnnnnnnnnnnnnnnnnnnnnnnnnnnnnnnnnnnnnnnnnnnnnnnnnnnnnnnnnnnnnnnnnnnnnnnnnnnnnnnnnnnnnnnnnnnnnagccgagatcatgccattgcactccagcctggggaacagagagagactcggtctcaaaaaaaaaaaaaatagtttgtagagacggggttttgctatgttgtctaggctgatctcaaactgtgagcctcaggcgatcctccccacttagcctcccaaagtggtgggattacaggtgtgagccacggtgcctggccctgacatgctacctaaagtctgaaacttgactcctgatccccagggtcagtttctttactgatagtttttcaataagccatttagatagttggcatgattacgtagccagagggggcataaaaatccctctaggaacttctgctttgagctctcccatagccaagattccttgtatggatcccg

SEQ ID NO: 686594 - DNA, 673 bp, Homo sapiens
ctgaattagagcagaaagtcgtagaattaaaaattgaggctgggcacgatgcctgatgcctgtaatcccagcactttgggaggccgaggcaggtggatcacctcagctcaggagtttgagaccagcctggcaaacatggtgaaaccccatctctactaaaaatacaaaaaattagccaggggttgtggcacgtgcctgtaatcccaactatttggaaggctgagacaggagaattgcttgaacccgggaggtggaggttgtagtgagccgagatcacgccattgcactcctgcctgggtgacagagtaagcgactcagtctcaaaataaataaataaataaataaataaaaattgaggraaagtgtgagtgttagaagaaacaattgattatagagccaaaatatctaatcagaaagattgtgatttcagacatatctgcataatctctcttctttacctcctccccctgtagcccactatcaccctgcattgacagccaagagctgagagcccccggagctgatcagatttcactagcaatcacagcacacaacttggatgagtggcaatatgctttcctctagaatgtgaaggtggaaggcccaagaatcgagcttggagtgatagtcctggcagtaggtctcccctacttggcctcccataggcttttcc

SEQ ID NO: 686595 - DNA, 620 bp, Homo sapiens
ttatgttacctctcttaagggttcaatggacttttctcattcctagctcttcccattgttaggctgcaccaaaccatgtcgattagattcagatgaaaagagctcatgctctgttcttctccctctacactctcatttcaaaacgtctgcttcacagtttcaattccacaaataatttttaaaagttattaaggacttattctggcttaggcagtagagacactactaaaccaagtaaggcatatttcctacctctgaggaatttattgtaaatataaacatctagtatgatatccttagacagcaaacttatctatgtaaaatttattatcatcactcaatcaaactttctaatggaaatctcctttttaagtcaatgactccttaattctctaggtcccactataaaaattttgaagcttggccaggygcggtggctcatgcctgtaatcccagcactttgggaggccaaggcaggcagatcacaaggtcaggagatcgagaccatcctggctaacatggtgaaaccccacctctattaaaaatacaaaaaattagccgggtgtggtggcttctgtagtcctagctactcgggaggctgaggcaggagaatcgcttga

SEQ ID NO: 686596 - DNA, 1289 bp, Homo sapiens
ataaagttactaaagagagttcctttctacctcttaaattttgccttcttgattttcttaagaattgttaaggaaaggaaatcttattattcacaagtattgccaaagagtatctcaggtatcttcactcgtttaaaacatttggaattgttgacactaagtaaatgttggcatcatccagcactacttttcctttaaaagaaaaactagcagatsgacatgtgtaattttcttttttataaaaacttattaagaatatcttaaaaatgaagattttgcaagtatcataatttttttcatctttcccttttgtaagaaagttatctggactttcatatgtaatttgtgagcacttaaaatcctaatggcaggaagaaaatgtagctctaccagcacatctgtgaccaatatgtcactaataatgtcctcctttgccaagttttagactcttttttgtttccttcaacaataccagcaaaaatggaaaaagatcttttctcttaatgaaaacaagtgtaatttatttatttttcaacaagactcttaagtgagcttattaaaaatgcttggaaaagagaaaggcatttgaattgaattgaattgaaatggatgagttgtattctatttttaaaaactccctttattccttaaactttatttccaccctgatttttctgaagtgctcaagaaggtttggctaaattaaatccctagagacacggaagtaatgattcttcctaaaccgacagattctggggcttataggtgagagaagttaagtaatattggaagataaagtaacaaaataaataatgagatggtatattaaaagtgagaaaagggctaggtgcagtggctcaagcttgtaatcccagcactttggacactgaggtgggaggatggcttgagcccaggcattcaaggctgcagtgagctatgattgtaccactgtcctccagtctgggagacggagcgaggccttttctaaaaaaaaaaaaataactacataaaataaaaagagagagagagaaaagaagagagttctgcctttgtcagcatgaagtcaaaaacgaattatctaactctaaggcaaagtcacctatgatacactttgaaagaccaagacagatacaatactattcttgtgcaagtttggaaaagggagagatggggcagcagcaaacaattcaaaggtggtgcatacactcattgggcactaaatgtacgtcaggcacttgccttatttcatttaatccaggtgttcccaaaaggaactatctgtggataca

SEQ ID NO: 686597 - DNA, 1289 bp, Homo sapiens
ataaagttactaaagagagttcctttctacctcttaaattttgccttcttgattttcttaagaattgttaaggaaaggaaatcttattattcacaagtattgccaaagagtatctcaggtatcttcactcgtttaaaacatttggaattgttgacactaagtaaatgttggcatcatccagcactacttttcctttaaaagaaaaactagcagatggacatgtgtaattttcttttttataaaaacttattaagaatatcttaaaaatgaagattttgcaagtatcataatttttttcatctttcccttttgtaagaaagttatctggactttcatatgtaatttgtgagcacttaaaatcctaatggcaggaagaaaatgtagctctaccagcacatctgtgaccaatatgtcactaataatgtcctcctttgccaagttttagactcttttttgtttccttcaacaataccagcaaaaatggaaaaagatcttttctcttaatgaaaacaagtgtaatttatttatttttcaacaagactcttaagtgagcttattaaaaatgcttggaaaagagaaaggcatttgaattgaattgaattgaaatggatgagttgtattctatttttaaaaactccctttattccttaaactttatttccaccctgatttttctgaagtgctcaagaaggtttggctaaattaaatccctagagacacggaagtaatgattcttcctaaaccgacagattctggggcttataggtgagagaagttaagtaatattggaagataaagtaacaaaataaataatgagatggtatattaaaagtgagaaaagggctaggtgcagtggctcaagcttgtaatcccagcactttggacactgaggtgggaggatggcttgagcccaggcattcaaggctgcagtgagctatgattgtaccactgtcctccagtctgggagacggagcgaggccttttctaaaaaaaaaaaaataactacataaaataaaaagagagagagagaaaagaagagagttctgcctttgtcagcatgaagtcaaaaacgaattatctaactctaaggcaaagtcacctatgatacactttgaaagaccaagacagatacaatactattcttgtgcaagtttggaaaagggagagatggggyagcagcaaacaattcaaaggtggtgcatacactcattgggcactaaatgtacgtcaggcacttgccttatttcatttaatccaggtgttcccaaaaggaactatctgtggataca

SEQ ID NO: 686598 - DNA, 638 bp, Homo sapiens
cccagcttgttgaccaggctggtcttgaactgctgacctcaagtaatccacccgcctcggcctcccaaagtgctggattactggcgtgagccaccgtgcccggcctgaacactttcaattttagtgggaagtcttctcttttttttcctaaatctgttgcttttatatcttcaccaatacttggtattattaaacttcttgatttttgtctgtctagggaaatgaaataaaatatcattctgctattaatttgcattttcctgattattaatgatgttagataccttttcactattcttgtttcctctttggggaaatgcctgtagttattttcttcctatttttttttctatggcattatctgcattttactgatttatagaaaatcagtacatttataaattactcgtatattctgtatactgtttattggtagtgtgttgtaaataaattcttacggattgcggcttgttttttcacttcacttatgctgtctttcagtgaatacaaagtattaaaatagtgtggattatcagtctttacttttrtagtaaggttttttgtgttcttgagaaattcttcactactctgagaagactggattttcccacgaccatgttttccttctttttttttct

SEQ ID NO: 686599 - DNA, 602 bp, Homo sapiens
agtcccactaacagtgtaaataaaagtgttcctatttctccacatcctctccagcacctgttgtttcctgactttttaatgatcgccattctaactggtgtgagatgatatcttattgcggttttgatttgcatttctctgatggccagtgatgatgagcattttttcatgcgtcttttggctccacacgtcttcttttcagaagtgtctgttcatatccttcacccacttgttgatggggctgtttgtttttttttktttgtttgttttttttattatactctaagttttagggcacaaaatttgtttgtgttcattgtagattctggatattagccctttgtcagattttagtagcgacggggtttcacggtgttaatccatgatggtctcgatctcctgtccttgtgatccgcctgcctcagcctcccaaagtgttaggattacagacgtgagccaccgcacccggcctgttagttttaataaaagaaaacaaatatttttaatagatcaaataataggaaagtttttataaaggaggtggtatgaagatcagtcttcagggactaatgagtgtgaaaatggaaaatgcagagaattcc

SEQ ID NO: 686600 - DNA, 602 bp, Homo sapiens
agtcccactaacagtgtaaataaaagtgttcctatttctccacatcctctccagcacctgttgtttcctgactttttaatgatcgccattctaactggtgtgagatgatatcttattgcggttttgatttgcatttctctgatggccagtgatgatgagcattttttcatgcgtcttttggctccacacgtcttcttttcagaagtgtctgttcatatccttcacccacttgttgatggggctgtttgtttttttttttttgtttgttttttttattatactctaagttttagggcacaaaatttgtttgtgttcattgtagattctggatattagccctttgtcagattttagtagcgacggggtttcacggtgttaatccakgatggtctcgatctcctgtccttgtgatccgcctgcctcagcctcccaaagtgttaggattacagacgtgagccaccgcacccggcctgttagttttaataaaagaaaacaaatatttttaatagatcaaataataggaaagtttttataaaggaggtggtatgaagatcagtcttcagggactaatgagtgtgaaaatggaaaatgcagagaattcc

SEQ ID NO: 686601 - DNA, 1552 bp, Homo sapiens
ccagtagcctaaggctttgtctctgttcagggatttgggagaaaactgactactgcagaaaatgaatgtgcatttgctcactttactactgaaagtacattagtttcctacagctgccacaggaaaatatcacacgcagggtggcttaaacaacagaaatctcttgtctggagttctggaggctaaaagtccaagatcagggtgttgttagggttcctgctttctgatggctatgagggagaatctgttccatgcctcttgcccaatgtctggtgttttgctgcctatctttggtgttccttggcttgtagaagcatcacccggatctctgattttacattcatatgatgttctgtgtgcatgtctatgtccaaattatccatttgtataatgactggttattgagcttgggcccaccctaccacagtctaaatttctgttaactaattacatctgcaaggactctgtttctcatttggtcacattctgaggtactgggggttaaaacctcaacatatgaatttgggggagatgtgattcaactcataaaaattgggaagaaatagacaaggcctatatcctgtttcatggaatgaacatattatctactgtagaacatttccagaagccaaccaatatgggcataacatagagaagtctcataaaatttgcaaaactgaaaatgtgccccattccaactttgtcagatctgccttgtggccattttatccatctaggtgatctatttattaagtcttacttataaaaatatttaatgaaataggtcactgaggtggagtactttgctttaattaaagtaaaatttctattataccctatttttcatattggttctattgtaataccataggcataaataaaaagtacagaaaatatttgtaaacatatttcccagaaaaatttgtattaaaacaataacaaaataatcataaaactctagtaaattttttaaaagacactaaaatgaaactataaaataatacctgatatcctgtgagcagatttatgtgtcccacatggacatcccttagcaatttggctgagattgttaacagctttaatttatactaacatttcttcctctgcattcaagataaatattctattttttaaaactttactccatagtttgaacttagtagctctgcctggtaagacctgtgtagttgttagaatagtccaggctgagaagataataagatcaaatttgcgagttgaaatgtttgatccttgcttatcattggagctcagcctaaaatytgctagaacatgtggttgtctagcaaccaactaatgtcctataatgatctacaaattgatgcctgtgctgaatgaacgttctagtccaaacccaaagctttatatagttaattaaaagctaatgtcctcattagtagctgttggggaggctcaacaagtgcagtctgcatgtgctaaatgttgaatatttattagacatgatgttaaatacaaagtaggaggaactggaccatccatctgttgacaactatatgaataaaacggtgatttg

SEQ ID NO: 686602 - DNA, 752 bp, Homo sapiens
attgttatcctcataacagtgtcaatagtgaaaattcactgtgaataaaatgccttaatcatgaaaccacaataatacctagtcctgagtgacagaggttacctggaaatacgttataaagaaaaccactaaatttattattgtcttataaaaatttaacaaacttgtattttggaataacttaagatctacggaaaagtggcaaggatagtattgagagttcctgtgtacctttcacctaacttcccctaatgtcaacgtgttacataacatcaaaactaagaaattcatagtagtacagtgctattaactacagactttatttgggtttggtcagtatttttttactaattwtcttttcctattctaagatacaatctaggataacacattctgtgtttacacatttcgtcttaatatctcctttgtcttctccaatctattacagtttcttagttttccttgttccttatgatgttgatagttttagaagagttattgttagggattttgtagaatttgagtttgtctagtgttttctcatggttagtctgagattttggaattttgaattacaaatttttgtaagcaatgcattatatttaatgctgaccatgttgtaaaatttagaaagatattgtagtataattttaaacttatcagaagaccaacttttaaaaattctcatttcctaagtcaataaatcctttccatgccaatcaatagcatacaggaattagaaatatattttt

SEQ ID NO: 686603 - DNA, 585 bp, Homo sapiens
aaattaactcttctaacttttgcctattagagtcatatgcatgcaaatattcaaaacccatgcagtctacagatgtgggcagttaatgttgataggttgaaggatgctacaatctgaatcaaagaaaacatattttcatcatcacaggacaaatgctgtaattaaggtgtgatttttatagaatccttttgataaaatctcaaaattgttttaatttctattttgcaggggtactgctatcagatcaatttaaatctgaattaatctaatatttaataatctcaaaataattattccatccataataaaaaataaaataaaaatttaacttatggccatcttttactgtgtacttttatctgaggaagagatagaatgatctactaatagaggtataacactgtatgtgtatgaaaagttggctaattttggtgctaagaatttacttacaaaaagaaaaagaatatacttagtttggtgaaacactgaataatggcgaaactaggtctttctccattattttttttctctccaatttttcagcaatagyaaatagctggcaattattccatgttaatattttga

SEQ ID NO: 686604 - DNA, 669 bp, Homo sapiens
cagtattgcaatagaaaaagtcatcttctgtttcaagcaaataatcaacatttcatgtgcttgtattagttaagtggtaattgggatagaaaaaaatcatttaaagtatgttattagtcaaaagattgaaaaaatagagctttgaaagttcaaaggagaaatcaaggtgactatcacaataagcaattcacttttaccatgtaagttcaatgccattcagaaagaattagaaagaaaaggacttcaaaggtctcataagcataaagatgtcaaggaaggtcaatcttgaaacagctgctgaaggggatcagagagataaaacttaaacctcataattactattagaaaattaaaggaataaaagtggccaacatcaaatcaaaaactttcaaagtggtagaggagattcttttgaaacagcaataaaatccatccagacataagtgttcagaattcatattaaaagatgataatggaaaaatagayttcaacccatttatcaatatattatcaagaaagaaagattctagaaatcattcagaggaaggaataaatgataaaattttaaaaaaacaggaagtaagatatttccctgagtaataagagaatttaaaccttgaggtaaaggaataaaatcctaaatttgaaatctaataggtcccaggccaa

SEQ ID NO: 686605 - DNA, 2351 bp, Homo sapiens
tccaagaatattggactggggatttcaaaagctcttctgtggggatctaacatgcagccagtgtggagaactactgtgttaggtgagggtaagacttgcctttgtaagccactgtgaaaattccctgtgcctgacatgcccccttcttgtatcccttgtgtttgggtagaccttgtcataaatacttatctcaatgactcctgggccacagaaccttgggcatctctttatggctaagtggtgtctaaaaatgggctttggatcattaaatcacaaaatcacaccttcttcccatggcaggcgttctcattggttaccggctaaagaaaattaccatgcaagcagggagatgctgcctgtcccaatattatagatctttcctttatttgctttcgatcagtactttttttggcctacttcctcagttttatgttttcctaaatatccatttcttctgtcctgtcattgatggtattttagcagtaggctagctgttactagcaacgttccaaactctgtttgaggagggggagataagcacaccattaccccacaaggtagggcrtcagattcagtgcttctgcagttaacagaataaaagggacagtgagccaacagctccaatgccacctttgcttcatcatttaaacaaaccactattttagataaggaaatttatgttggattctcaggacagccattgattattattcattctgacacagtctcgttaatatagtcatccatgcatctttgtcagggaatctgtgatggagtgtttagttagttccttttgaaataaggcagatttggtgcagtatcaaaaattgatggatgtcttatcctcattcattcaaacaacaaactatctaaatgacctaaaatatacttggtgctcacatagtctgcttttggagaatcaaaatcacaactctcgctgtccagtcaaatgccaaaaagcaacaattatgcacctactatgccaagactctttgtccagttgagttaaaatcatctgtttgtttttgtggtgctaaggactgcattcactgagattaatgcggcccgtccaacttgaacaggccacctcattaatctaaaaagaataaaacatgtgacatggactgctgttgtttgcaaacatttaaaagtagaaaagcaagtgatgaaattgaggctggcaaccctgcacgctcaggactggctgttttctggaggagggaatgacactgagtcctctcattccagggaatcctaggtaattgctggaggcaaagtctgaatggcagtcttcacttgcctggtagggcatgctttgacagaccaccatcatttatggggccaagctggtggatgaggtgttctagcagaaatagcaataaaactgaaaactgaagaaatgtctgttgttacagtaaagtcaactttaaggaatgtccctgaagagagtagaaactttatctatcactagcaaaataaactctcatgtgaagaacttcttcccatatagaaaacaggtagccatgaagtaacacatgattataaagctattgaagatgtttgcccaaggtggcctcatagcatagtgacttgcttctgtctgcctgtcttcactctcttggttcagcagttcagtaaaacagttatgagcaacatgccctacattatcgcaaaagtgctccactataaaactataaaagcatgataaacagtatcatgataagtaccataatagaaacataatattcttcttgccacagttcctgcaaaagtggggaaaacctcccaggtggtgaccttcaggcaaaacaggcagtaaaaggcatttttagaatcacacacatcctaccaagggaaaggaaacagccatagaaaaacaaataatgtagctagtagaagcacatcacactccaggctagaagacaattttgcaagactcaatgccacagaaagcccacactgtgtttctactctgacaaaaatgaggaataacacaaacatttaaaggtattcattccagaggtccaaataacaggttcagagtcagcaatccgaatgctgctctttcctcccataatgggttttcactgtgacacagccaacagtctctctctgggcaatgatttagggcgtaggttcaattttgctggaatcaggagagacttcacgccgacacattctttctcaaagaggggttcttttgattagtaaaacaaaataagctactagatgtaaagcaagtaatcttacagactaatgggattcattctgcatatgaggaaccctacgtacgaattcagcttctgtgtgtgtgactgtgttctaatactcattacactagaaaaacaggc

SEQ ID NO: 686606 - DNA, 588 bp, Homo sapiens
caaaaattgctaatcagtaaaatccagatgatctataagatggcacagagtaargtaaaaggaaatatgtgggtcttagaaaatatctgataagaaaaagaagaaaaataataatggtagcatggtgcccccttgctggtagtccagctctaatctattttcaagggtttctcttggattttcttgagtctgaagtcttatcatttattctgggccagagttactctctagacactctagtattagtagcatccccaaggaagcctttttttttttttttttttttttgagacggagtctagtggcgtgatctcagctcactgaaacctccacctcctgggtccaaacaatcctcccgcctcagcctcccgagcagctgggactacaggcacatggcatcacgcccagctaatttttgtgtctttttagtagagacaggagatggggtttcaccatgttggccaggctggtctcgaactcctgacctcatgatctgcccaccttggcctctcaaagagctgagattataggcctgagccactgtgcctggccaggaagacttttttactctcatttgccctctttctg

SEQ ID NO: 686607 - DNA, 818 bp, Homo sapiens
aaacataaatggacttcaaaattaaaattctgagtagaaaaatagttaygctttaaaaaattaaactttcagatttagccagtaaactgatgcaaatggacaaagtaattagattttaaggaagcagacgtttcctgaaattcttaactgactttttccaaagagaaataaatttgatttgtacttttttagactaggtaatacctgagtactctggtggaattaaatacttaatggtaaaaataccacttttagaataggcaaagattttgtatgaagctgtaacacagaagaacagtcatttacaacacacacacaaaagggtgccagatatattctgggccaggttaaacatgctgagatcaaacatcaacttaagaatacactgggccctgaatcaatggaaaaatcatttggcattatgacactcaccatgcaatcaaacctctgtttaaaatcaagttacaattactctaattatggacaaacatttcatttgttgcacaactggtacctaatcaaacacttctgtagaagagatgatttcaccacaaggtaacttaatttcagtgcgaaataagtcttttaaattatttttaaagagtgtttttaaccaatttacatgtcagaaattttatttctataaaaattactacatgaactaagtctaaatcaaacaaaaatgccttcctctactttgaaacaatagtcttctctcataaacattttattcaaatatttcccagcaacaggcttgtgtgcactaaccaggaagtgaaaccaaatatgatcatattgtgaaagcagagtaaaatgaa

SEQ ID NO: 686608 - DNA, 818 bp, Homo sapiens
aaacataaatggacttcaaaattaaaattctgagtagaaaaatagttacgctttaaaaaattaaactttcagatttagccagtaaactgatgcaaatggacaaagtaattagattttaaggaagcagacgtttcctgaaattcttaactgactttttccaaagagaaataaatttgatttgtacttttttagactaggtaatacctgagtactctggtggaattaaatacttaatggtaaaaataccacttttagaataggcaaagattttgtatgaagctgtaacacagaagaacagtcatttacaacacacacacaaaagggtgccagatatattctgggccaggttaaacatgctgagakcaaacatcaacttaagaatacactgggccctgaatcaatggaaaaatcatttggcattatgacactcaccatgcaatcaaacctctgtttaaaatcaagttacaattactctaattatggacaaacatttcatttgttgcacaactggtacctaatcaaacacttctgtagaagagatgatttcaccacaaggtaacttaatttcagtgcgaaataagtcttttaaattatttttaaagagtgtttttaaccaatttacatgtcagaaattttatttctataaaaattactacatgaactaagtctaaatcaaacaaaaatgccttcctctactttgaaacaatagtcttctctcataaacattttattcaaatatttcccagcaacaggcttgtgtgcactaaccaggaagtgaaaccaaatatgatcatattgtgaaagcagagtaaaatgaa

SEQ ID NO: 686609 - DNA, 1405 bp, Homo sapiens
gtttatctttttgaactccagaggtccgtgtgacaaagtcaacaaggtctggaaggcaaggagatggcccaaggcctgcagaattaattgtttttaattccaatccgagtgactcttgtttgtctaattgggaagattcttttacttcctcaggcatcattcctcctgctaacaggtcaagggcctggtgtgttccctctaggccccccaagccacggtcaacattttctgtaagtccagttttcaaaatgttaggagaagggatcctaacactcctgggattaggtgagtttcgttcaccctctgtctcaaagtcaagcaccaaggttttgggagaatctaacggaaacccagaaaaagatgggattggttcgaagtcagcgggatcggaggaattacaccctataggtgatacagaattttcttcacacactttctgacacaagacagttggggatctatgtgctgggcttacccgagtagtgcagaaatcaacaggcatatcccccagattccccagggcagtaagctcctctacctttaagtctgtagcttcaaagtcttctagggccttgctttctattgtcactgttaactctggatggacatcttgtagctccagtgcttctgtttttggtttctctgggctctcccaggtctctggcctcttcttgttttcatcccaaacagccaactcatagatctttttaacttgaaagtcttttgatctttctctcttgagtttgagacttctgtacctagaagttctagaagctgattctggagctgaattctctagcccctcctcactaacaactgaaactccttgctcttgtggactacctgttaaacacatagctgatctggctggggaatgaagcagcaactctggggcagaaattttcacaggtgtatcttgtgggttgagtaaagacctagcttctgataaaaatgagtctaattttgcctttgtgaaagagcaagcctgtggactcaatttgatcactactttacttggagtttcacttcctgtcatcaatttattggactgttcagcctctttgtcaatcattagcaagttgggctgttttacttctccctcccacatgtatctgtttccatggttcaaattagaatcatctatgctgtggggtccaatgctggtacttrctccctcatcaactatcccctcagacagctcctttaccctttcttttagttcagtgtttgtctctatctcactttctctacaatcctcagatttacggagctcttggctttccttatcctggttaacagattctctgaggtggatttctaccaacttctgagattctttgcactgtatatctaacagttgaggaggtggttctacaccaggtggtcctggctctcccaggtcaag

SEQ ID NO: 686610 - DNA, 1127 bp, Homo sapiens
tgatatctaatagaatgtacatrctatgtaaatagttgttatgctgtgttatttttgttgtattatttgattggtacactgtttttattagttcttttttgaacattttcaaaacatttgaaaatatttgttgaatctgtagatatgaaacctgtggattataagggtcaactatattttttaaatatgtaacttgatttcatgcccacttaagcagaaaataattgaaggcaattttcactttttggatatcccaggatcaaaattataaacatgtgtaactgcaccagtgcttatacagttttggccgtttcaacagcagcaccttgactgtctctgctactgtcaggttagtaccctctaaaagcctttccaatacatttgccagttagctgctgtgggactgcaccactgtgtaaaccattatttttaagttttaaaattttgatattatgaaaaaatgcttaacatatggagggttaagcaaggaaggagggctggcacatatattgacatggtatctaatatatgccaggtcttgtgcttagtagttacctgtgtattatatattttacagttttggaggctgaaaaatccctgatgaaggcctggcagcattggtttctagcaagggctctcttggtacatcctcacgtgtgtcagggggaaaggtagagagagggagggagaaagagagagaaagagagggaaggaaagagggagagaagagaggggtaagagagggagaggaaaaaggagatggagggagagagaagaatggaaaaagaacatgtgaattttctgacatctcttcttataaggtcactaatcccgttgatagagccccacatttatgatctcaattaaccttaattacctccatagaagtcccttctccaaatatagtcacattgggggtttgggcttcagtacatgaattttgggggaacatttcttattccaccttggcctcatatcagttctgagactcagacatcattattcacacattcggatgaggttcagaaagttgaggggcatactgaagtttagagagctagtacaggtccaagctgggaatttaatttagatatttcaactccatatttgtctcttgttatgacatt

SEQ ID NO: 686611 - DNA, 1838 bp, Homo sapiens
tgactccaaaaatataaacaggcagagctttggggtggcaatccagttaaaaagaaaagttaggggtctgactttttgatcgtatagctatcacattgttcttgttaattttatgatgttttcattagatgatatgtttatctacagtgagtgaaggatcccagtagaaaccatggggtaggtgagattgctcaagaaaaagctacagcttcacttccactatcccacatacatagcttgagcaccaccaagaaaactggagagtttcttggaaaactttaggaccttggaatcaaggtaaaacaaagctagggcaacagataatgtatcattgcaatatttattggaatgatatattgcaaaaaaaattattcctattaatcacaagtggaaatacctgtatagtttagcttggtcacctcaggacaattttaccattccagctgtatttttgtattacactatgaagtctttgaagtctgtattctgtaagacactttgaattgccagtgacagaaagccagttcaaactggcttaagttcaaaggaaatatactgccaaatattccagggaagctgaggaacgcacacttcagcaatgaaattttctagttgaatccattctgcatgaagtccacttggcaggcaagatggctgtttgcagttccagacttccatcctcctagtttaacaaccacagtagaaaatgcttctttattttctctttgaaattactaaaaaaagactttgtctgaccttgcttggctcatatgcgcacccttggctcctgccatggttacatgcccattctgtatcctgaatggtgatttcctcaaggagaagaagctgccagacacaaagaagaggtctacttcaaagactgagtcaaatctgagttacctttgtattcctcctctacaggtattcaacctcccagatttttaatcagtggatgccagagaagcaaagtaacattgtcactgatgaatttatttaatatgaaaagaggccaaggtatgttactagaaagaaagaagtaaagcaaaagcagagaagattggcaggtaggagagcagatgtgaagagaaggggaaaacatacacaatgtgaaaaataaggtgaaatttgtctttgctttgttttatgtgcttgtagagagagtcagtaaaaaaccatggtgactttattcatgagagaaataattttaaaaccatgcataattattgccaccacatttagagagcctttataaaaygccagtgagtttatctaattcttctcatgacttggttattgttagctgtggtatgtctgttacattgttacaatgttatgcaacagtagatattttaatggacaaccccagtgggttttgtgtgtatatgctaagtataattactgttgttttacagatgaagattctggagataaattgaaatgctaaggttatttaacaatgacatgctagaattggtagccaagcctttcatcacaatcctatcacccaatgcctgaactctcccattcctgtcagtgaaaacacaaaccaacactgtggaggtaatacacaaatggcaacatgccctcctctacccagatcaaccatggttagccttatatcctccaggagacagaacacaggagacacacacatatgtgcagtcatgcacacaaatctaccaaaagcaaagcatcactgagtaatggagtgttgactgctgatttggagattcaaaggggttaaatcacattgtgcaatctacaacattatttggctaaataactcttttctcctgaagcccttatgcaccctgaggctcaggtccatcacctaggaa

SEQ ID NO: 686612 - DNA, 1838 bp, Homo sapiens
tgactccaaaaatataaacaggcagagctttggggtggcaatccagttaaaaagaaaagttaggggtctgactttttgatcgtatagctatcacattgttcttgttaattttatgatgttttcattagatgatatgtttatctacagtgagtgaaggatcccagtagaaaccatggggtaggtgagattgctcaagaaaaagctacagcttcacttccactatcccacatacatagcttgagcaccaccaagaaaactggagagtttcttggaaaactttaggaccttggaatcaaggtaaaacaaagctagggcaacagataatgtatcattgcaatatttattggaatgatatattgcaaaaaaaattattcctattaatcacaagtggaaatacctgtatagtttagcttggtcacctcaggacaattttaccattccagctgtatttttgtattacactatgaagtctttgaagtctgtattctgtaagacactttgaattgccagtgacagaaagccagttcaaactggcttaagttcaaaggaaatatactgccaaatattccagggaagctgaggaacgcacacttcagcaatgaaattttctagttgaatccattctgcatgaagtccacttggcaggcaagatggctgtttgcagttccagacttccatcctcctagtttaacaaccacagtagaaaatgcttctttattttctctttgaaattactaaaaaaagactttgtctgaccttgcttggctcatatgcgcacccttggctcctgccatggttacatgcccattctgtatcctgaatggtgatttcctcaaggagaagaagctgccagacacaaagaagaggtctacttcaaagactgagtcaaatctgagttacctttgtattcctcctctacaggtattcaacctcccagatttttaatcagtggatgccagagaagcaaagtaacattgtcactgatgaatttatttaatatgaaaagaggccaaggtatgttactagaaagaaagaagtaaagcaaaagcagagaagattggcaggtaggagagcagatgtgaagagaaggggaaaacatacacaatgtgaaaaataaggtgaaatttgtctttgctttgttttatgtgcttgtagagagagtcagtaaaaaaccatggtgactttattcatgagagaaataattttaaaaccatgcataattattgccaccacatttagagagcctttataaaatgccagtgagtttatctaattcttctcatgacttggttattgttagctgtggtatgtctgttacattgttacaatgttatgcaacagtagatattttaatggacaaccccagtgggttttgtgtgtatatgctaagtataattactgttgttttacagatgaagattctggagataaattgaaatgctaaggttatttaacaatgacatgctagaattggtagccaagcctttcatcacaatcctatcacccaatgcctgaactctcccattcctgtcagtgaaaacacaaaccaacactgtggaggtaatacacaaatggcaacatgccctcctctacccagatcaaccatggttagccttatatcctccaggagacagaacacaggagacacacacataygtgcagtcatgcacacaaatctaccaaaagcaaagcatcactgagtaatggagtgttgactgctgatttggagattcaaaggggttaaatcacattgtgcaatctacaacattatttggctaaataactcttttctcctgaagcccttatgcaccctgaggctcaggtccatcacctaggaa

SEQ ID NO: 686613 - DNA, 631 bp, Homo sapiens
gatgtgcactactcaagctttcattttcttccgaattctctaattctattaaatcatactaataatttgccagttacccaggttgcaaatgtttaaatatggttttgttgccactctctcatttatcccttataagttattcttttatttattaatttttgcatccagaaaatgcctattaatcacctgctgccttttctgttgctgtacatcctccctctttcaatcgcatctctgcatttcaaagcaggctctgctccgttttatctccctgtttcacactctgctcctctggctttggcatctatcttatatctctcagcccagacgttgacctgattgtatcacttcttgcttagtctgcttttctggccccagtgcctcttgtctctgataagaagcrctcctttgttcctagtctgtgccctgtaggaccccctcctccccatcccaatggtcagctgggccttctgagccaatttgttagcatccccatttccatgatggcaggaaaggctcagatgctacaagtgacactgaggatgttacctaattttaataaatatcattttctcattttaaaaatgagacggatatacctcacagggctatcgtgaaatgagagaacaca

SEQ ID NO: 686614 - DNA, 553 bp, Homo sapiens
tctatcaaaatccataagagattatccatctgggttttgccatttacagggtaccatgccttaactaggtatttctcaaactgtggtccttaatctaccagcatcagaatgcctgaggatgcctattaaagtgcacattcccgggcctcacttcatctgattccatcagaaactctgaggatggctctggtaatctacaccrttaacaagctcccaaatgatttgggggaagactaaagttgagagctacgaaactatcaaaattctggtagctttctatctaacttttcaaatactaataaagattatcttcctttggaagccagttaaatgtttcaaaccagatgaggtcaagggtatcttctttacttataatttagatcattcttacaataattgcatgctcacatcttctactattaacagaaatgccttccttgccgtaatcctcagaatgctctatgtttgaaggcagatgccaccttttgatctcttttatcttctctattaaatatgctctgataacatcaggttctttggatggtagatactg

SEQ ID NO: 686615 - DNA, 408 bp, Homo sapiens
  misc_feature 2, 3, 4, 5, 6, 7, 8, 9, 10, 11, 12, 13, 14, 15, 16, 17, 18,19, 20, 21, 22, 23, 24, 25, 26, 27, 28, 29, 30, 31, 32,33, 34, 35, 36, 37, 38, 39, 40, 41, 42, 43, 44, 45, 46,47, 48, 49, 50, 51, 52, 53, 54, 55, 56, 57, 58, 59, 60,61: n = A,T,C or G
  misc_feature 62, 63, 64, 65, 66, 67, 68, 69, 70, 71, 72, 73, 74, 75, 76,77, 78, 79, 80, 81, 82, 83, 84, 85, 86, 87, 88, 89, 90,91, 92, 93, 94, 95, 96, 97, 98, 99, 100, 101: n = A,T,C or G
cnnnnnnnnnnnnnnnnnnnnnnnnnnnnnnnnnnnnnnnnnnnnnnnnnnnnnnnnnnnnnnnnnnnnnnnnnnnnnnnnnnnnnnnnnnnnnnnnnnnngggcatttgagacgaaacgggtccaggttgagacgaggtgtcactattcagctatatacacaggacttcaaatccagctataaatcactggatttatagtatacactagacatttgtagataatctataatttataattatagatagatccataatttatagatttatactctaaatctactataaatccagctatacaccctggatttcaaagactgcaagaaaaatatctctaacaatttttgtattgataatatgttgaaatgatatttcagatatattaggttaaatatamtatattattaaa

SEQ ID NO: 686616 - DNA, 668 bp, Homo sapiens
tggttttccaaaatgagagtaccattttaattttaatttttttattttttatttttattttagaactgggggtacatgtgaaggttctttacatagataaacatgtcatggaggtttgctgaagagtatcattttagtcccgctagcaatctatgacagtttttggaattggccattgtgttaatttcagccatacaagtgggtggrgagtggtattcacagaagttgaattggggcatttatcaaagttttggttattctaagtgaattcagatgtctccctctttccataaggtccctataaccaaatactgtgacacgattagatctcaaaacggtaagatcttgggtctgctggacctggaagttgctagtctgggggatgaacagagcatgaggtggctggatctgggaacagcaagatcatcacacaacaatgctgctagtcttcaaaacggtgacaccacaatgcaaaagcgtgaggtttcttttctgctcgggcacagctgttactttctcggcaaaattttcacagaagagtctaactaaggagaaaagattatcctaatatatggggtgtcaccgagttcaattccggcaaaccagccacaggtgtgactgcattcagctgctttcccgcccatgggcaagtccgccgttcttagcag

SEQ ID NO: 686617 - DNA, 1728 bp, Homo sapiens
cttgatatttgatgttcaagtaaacaacaagaaatatttttgcctaatatgaatgtgatatggttaaaagaacaatatttgaaacaaaggcattgtaatttttttgggggggtacatcttttccaaattaggacaactcagaagcctggggtttctgaaaggcaggtaatccaactctcatgatatacaaatcaagtagattggatttcttggttctgaaacaaattcatgttggtccatagttgagataaaagaatgataaactttaaaggkaaagttgctaccagaaaaagcgttaaaagttagagaaagagaacacttcacgacactaagtgacaatctaaaaagacaattactgaaaagagggcacaggcctggacagttcagcatccaacagagtagagaggctatgaagtttggaaaagagaaacagagttgagatagcatggactggtagaagcagagagctgctgaaaaagtgctcaggataaatcagagagtaggagaggccaggagtgatctatcgaatgaattttaacatttttcttcagctagtaaggtctgattgtacccagtgccgacagataaggccgagggtctcactggatctgcacagtgggcaatggaagccttgcccttaggaatcgagccctgtgtgcttcccctatgacttcactccctaacttccaacactaagctaaaatgaaaggtaagtatgcatgattagaatgatctagccaaacaaagcttgcatgaataaacgtactcagttacacttttagaagtataaatgtcccccactgtaatggaaacccggtaacccctagatgaatttataaagcaattcagagcatttctgagttgcctgaagcttatctactttagaagtacacattgctacagaagaaacagaataagaaatatctgacagaagcagaaaaatcacaagtagcttcctctgtcactctatccaaacacaatatgctaagagaccccgtgcaagcgactccacagtacccacccttaagaaagggccgacatgccttgtagggtgcatttgcaacttgcttagggacagtttttaaacttccccaaatactttttttctaatgttttaatgtaaaaacgtaataacctaacggcaaagttgaaagcattttacggtaaaaacccctaaattctcccccaggcttttgaatgtgaatgtattctgaacataatagtccagaagagtcttatattacaagatgtaatacaaatccccactgcacatggctacagaaccgtactataaaaactatcacagcattttcttggatttgttattatatgaaaattgattaaaggtaaatcacatgtaattacccatttgataggtctgactgacaggaaaggacccagataagatcctggaggcaatgggatgtgtggctgctcaacacagaccgaccacacttgctcactgccgtgtcatctcatacccttccaccctggacatacataccttctcacatgcaccaaggtaaggtttctttttaacatactaaatataggttaataccaaaatattaaaggtagaaaaaatgattttgccatgcatggtatggcctctggacctcctgtatgaatgtgttggggttactgtgtagtatggttttagcaggggaagaccactctaataggagagttgtgtgaggtgagtgccttgaggaagatgcctgttccaca

SEQ ID NO: 686618 - DNA, 1086 bp, Homo sapiens
tgaaataaaaatggacatagtccattgtgtttctagtcaatggatatatctagtcaacagatatgacctctggattgtacctgttctatactattctccatttacagttaaagctgaaagttaagataatacaattgatctctagggcaaattgtagagagaaaatgtactcttgtactagataatggtaaaatttaccatcaatgtactasagtgatgaactatttaacatacatgaagacggctgatcaatatttagttaatataggttggtttgtttttttcctccaaagaactgtgttactgagatgggtgggtgttgaggtaatactttattatttagattttattaggagacatattaactggtttaagtagggaggaagagaaagaaagagagagagaaagtgggaactgagaggagagagaaagagagaggtggattgcagggaaaaacagtgaaattgttgaagtattagaaaatataatataattacatagagggaaagaactactgaatagctgccaggccactgaagagtcctagcctttgtctgtaacagttgctaaaacaaagagcagactaggctatttgtaattccctcttgtattgtctaagcaggaatgcacttttccaggctataggtcttggtaaactccacctgttctatgttagactctgcaacctggagctatacttgggaaaatgtatgctcaacagtttacagctaccttagagagtttcttaagcaggtgcagctctgggctggccactctacagtgtgcacctttagtttcaagaagaattagcattatgtaatgtcacagtggcaagataatcattacaggttagaccttggaatgaaatcccaattccaaacagttatgatactactattactactaagaatgataatcatgataataataatagctaatagtaattgggttttaggctaatgcaaatgctttacatatgttatttctattaatacttgtacaacgctatggagatattattaaccatacagagaaatgaaataatttgtttaatggtggagttatcatttcaaagtagttttttga

SEQ ID NO: 686619 - DNA, 620 bp, Homo sapiens
caatatcagatttttaacatttacttaaagtgatctacaaaagtatagtttaattgtatgaattaaaatagcacaattacatatagcacaaatatatcctgagcatgacactggctatttcatatcacctctactgytctatacatgtttttaatgagatgtggcttaataggtaaattttacttgttactagatgtcattttttttctacaagcatcaggcattttatttcagtacttcatttttcaatttcattttctcatcataaaatgtattcattttaaagatctcctagtttaacaggtattcacttcagagggctttcctggaatggattttctaccaggggggtaatttataatattgagtactgtctctcaagcaaaaaaggaaattggtagataaacattctcaatacaccctcagtatttgcaagtgcagtctttaaaataagacagatacagttgaagcagtttaaatggtgtatgatgcagtgcctaacatgtgtatacatttagtccaaaatatctttcttggtatactgtagtaaagcatttgtaaagtctgaaacccagtcatgttttaagataacctgaagtgcaacttttattttacaacac

SEQ ID NO: 686620 - DNA, 2433 bp, Homo sapiens
taatgcatatctgtgatactaccaacttataatatttgctaatgaattattccagaataatggaggaaaatatacagcaagagccttggtatttgccaacctcttagggaaagcaatttgagttctttatattctgtgtgaatattcaggataagggcatggggtaggcctttgctttactagcaccatttgagactctggtaaacgaattttctaaaagtgatctatgttagccctccttgattaagttaaatgaattccagtcatccctctggccttaatgttacttactgaaagaagagtgacctaatgatcatagtgaattgggtttaattgcacttattacagtttgtatgtaatttgcaattatttagtggtttttattgttgctattgctattgttgcttagagcaatttaaggaacagtctctgccatgtgaaatgacataaaattgtacagatattattttctatcctgaagtgtgaatagtgggaggtagtaaaagatggggaaaagggtcactgaatagtaagtaagaagaagcaaattgattggcagaaaacttagctctgttgagattgcctatagaatacaatgaaattggttgatagagttatttatttggggaaagagtgaaaaggtaaagataaggcattgattatttagcattagtcaagtatgatggaaaaaatacctgttttgtacctgcatttgaaattagaaaaataattactagtaacaattccctatttaaaaacattgacacttttatttttttattctttttttgggggggttgggggacggagtcttgctctgtcgcccaggccggagtgcagtagtgccatcttggctcactacaagctccgcctcccaggttcacaccattttcctgcctcagcctcctgagtagctgggactacaggcgcccgctaccaagcccggctaatttttttttgtatttttagtagagacggggtttcaccgtgttagccagggtggtctcgatctcctgacctcgtgatccgccttcctcggcctcccaaagtgctggggattacaggcgtgagccactgcacccggccgactcttttaaaacattttaattttaaatattattataaatatagagccatcaccaccgccacatcacatttatatcaaccaccactggtaaatttactatcttatgaaaagatgaaataaatattaagttcacaggatgataaggagaaataaatacaatgccattgctttttatgataagttcagctatcagggagagactttcaggtaaaataggyaaatatcttcaaaatgtaattgagagacaaagggatgaagtatttgtccaaaactatcttcaagtttttgaataatctttgcaagtgtatggtagtaggagttctgttgaattgggagtaagaaatgctgaaagtttttagttccttaaaaaatatgcatttctcaatgtgtatctttttctaagacaatctcttaaaatttttctaaaaatgcaaatagtactatcaggattgacattatatttgttttgcttgtgatcattctgtaaattttacatttcagttattattaaatatagtaaattcaccaacagtggtagtggcttagtgtacagcacatagagtatgcacaaaaatacatttaaaattaaattcttagccaaatatagtaaattaaagacctgaagtctggatactgagcaaccactgtttgacacgtctttaaatatatcataatgcacataatctagaatatcattacacttgatgtaaacaaacttcagaataaccaaaagaaaacctttgttaaattcaccacttgaatgatcaaatatttctaatggttttgttgttttattctaaataaattggtaatagataatcatgatactatgtatgcaatttcagaataaatttaatatataatattcaaaataatttcatctgctgggagttaacactagacgtttttgtgtttttactctaacataaaaagtgtaattttacaaatatataagatactgataagattggaataatactgtaatttatgtttcctgctttgacttttactcaataatacactgtatatattacctcataaagttatttttccctgaatatcacattacagactgtaataattgaacatttgtacatattttattcaattctctctatattgtggaattatctgctttataaacaattaattgctattatgaatcatgttttgatgggcattcttgcaaatagatcttgattattttcctagggtagctttctttgagtgaatacagctgttttgaaattaatatattttaaaggactttgaaatatacctgaatgtttcaatgtagctcaggaaatgtgttttgaatatgggacttaatctgaataagagctata

SEQ ID NO: 686621 - DNA, 571 bp, Homo sapiens
tcatggtttagaaagaacctttagtccattaaaccatttgatttccccttttagcaaaatatagttgaagatgaactgataagcactttcttggccagggatggatcatcctcttgccctatgcagtaatgtgggtcaattccttgttactstgatgagaaattgtccaacattggtgggtctcctggaggtcctggctcaccagctgcttacccccacatcttttatgctgctgtcactttattctgctattccggcagccttatttatctttgtgagaatgtgacctgaaaaagagggatctagtttgttgcatgtaggatgaagaggatggtggggtatggatggatatagctttcagtgaagagaagacaaacatttcttaaagtatgcccagcaagtcaactctgatttcttcaacacttgatcttatggtactggtacataggttttagagtctctggagaggggaggtagggggattttacttggatgccctagtgttatatgtccacaattgcaaaacccagaccctgtggaatttagaacccaggcaagatgatcgtgtgga

SEQ ID NO: 686622 - DNA, 658 bp, Homo sapiens
agacttcactggccttttccctaagaccctcacactcagcgtgctgtgaccagatttatcatatttctcccaaaactgtttcttctcctctgtttcttttcttaatgtggtcacctcacaaatgtcacctctttgtgaggactagtactccaacagacttggggtggccctcactgtgtacctgtctaaatggtcagcctccctacctccttctccttctctcaaaagaaagataggtcacatattaatctatcctcatctaagtctcttttgcctggaggcttaagtgtttcccaactgattatgataagtccatgcagaaatttgtcctctgttcttcaactctaaggggctcaattaattcaatcacccagacatagagggtatggctgcatctggaactgttacagtccttttgggagaggattgatatttaaactcattttcccctcccaagttctgaatcaactgaagaatgaaaaaaaagaraaagtatatgtgagaacaaaacattgcctgtagaaatgaaagagttgatattagagaatgtggtttatgttcatggacacatatgtttttgtgttctgaatcccagaatttgacactctttctttctgtcactgaaaatattgtctctgggaagacactcaggtcttcc

SEQ ID NO: 686623 - DNA, 611 bp, Homo sapiens
tcatgcccctgcactctggcctgagtgacagaccgaaaaataaaaataaaaattaagagtcagaaaggttttaaaaatttagtttataaagtaaaaaagttacaataaggtaaggtatattagtgtagcctatgtatactgtgtttataaagtctacagtattatacagtaatatcctaggtctccatatatatatatatatatatatatatatatatatatatatayatatatatatatatatacatatacatatatatacctatatataaatatatatacctatatataaaaatatatatacatatataaatatatatacacacacatatatacacctatatatacatttatacctatatatacatatatatatccacacacacacacacatatacctgattttatcatcaataaattatccacaccagatgggacttaatgtattcaagttcaaatttttagtcagacttttatttatttacttttagccatcctgctcacattcataaatgtttagttagattttaaagaattccttagtataaccatattagtttttcagcattataactctctattctcctccacttactcaatgaccctgcaaa

SEQ ID NO: 686624 - DNA, 611 bp, Homo sapiens
tcatgcccctgcactctggcctgagtgacagaccgaaaaataaaaataaaaattaagagtcagaaaggttttaaaaatttagtttataaagtaaaaaagttacaataaggtaaggtatattagtgtagcctatgtatactgtgtttataaagtctacagtattatacagtaatatcctaggtctccatatatatatatatatatatatatatatatatatatatatatayatatatatatatatacatatacatatatatacctatatataaatatatatacctatatataaaaatatatatacatatataaatatatatacacacacatatatacacctatatatacatttatacctatatatacatatatatatccacacacacacacacatatacctgattttatcatcaataaattatccacaccagatgggacttaatgtattcaagttcaaatttttagtcagacttttatttatttacttttagccatcctgctcacattcataaatgtttagttagattttaaagaattccttagtataaccatattagtttttcagcattataactctctattctcctccacttactcaatgaccctgcaaa

SEQ ID NO: 686625 - DNA, 611 bp, Homo sapiens
tcatgcccctgcactctggcctgagtgacagaccgaaaaataaaaataaaaattaagagtcagaaaggttttaaaaatttagtttataaagtaaaaaagttacaataaggtaaggtatattagtgtagcctatgtatactgtgtttataaagtctacagtattatacagtaatatcctaggtctccatatatatatatatatatatatatatatatatatatatatatatmtatatatatatatacatatacatatatatacctatatataaatatatatacctatatataaaaatatatatacatatataaatatatatacacacacatatatacacctatatatacatttatacctatatatacatatatatatccacacacacacacacatatacctgattttatcatcaataaattatccacaccagatgggacttaatgtattcaagttcaaatttttagtcagacttttatttatttacttttagccatcctgctcacattcataaatgtttagttagattttaaagaattccttagtataaccatattagtttttcagcattataactctctattctcctccacttactcaatgaccctgcaaa

SEQ ID NO: 686626 - DNA, 611 bp, Homo sapiens
tcatgcccctgcactctggcctgagtgacagaccgaaaaataaaaataaaaattaagagtcagaaaggttttaaaaatttagtttataaagtaaaaaagttacaataaggtaaggtatattagtgtagcctatgtatactgtgtttataaagtctacagtattatacagtaatatcctaggtctccatatatatatatatatatatatatatatatatatatatatatatatatatatatawatacatatacatatatatacctatatataaatatatatacctatatataaaaatatatatacatatataaatatatatacacacacatatatacacctatatatacatttatacctatatatacatatatatatccacacacacacacacatatacctgattttatcatcaataaattatccacaccagatgggacttaatgtattcaagttcaaatttttagtcagacttttatttatttacttttagccatcctgctcacattcataaatgtttagttagattttaaagaattccttagtataaccatattagtttttcagcattataactctctattctcctccacttactcaatgaccctgcaaa

SEQ ID NO: 686627 - DNA, 636 bp, Homo sapiens
gcactagacatttgctcctcatgtaatcctgctgaagtaggtgatggggaacctggtattcacagaagtatatttatttgagtggagcaaatgaatcctgtgttctaactcttaggaaacaaagcatgggaaaggagtaactcagacacmatagagactagtattatttataaacatatgtgtaagagcagttctagatagtaaatatggtaaaagaacacctggaaaatacctagcccaaatatttatgttgattttcttgagttttctttgaattgaattatttttctcaatatctccacattattcaaaactttccttattactggaaggaagtgtttcagaatatgctctgggcaaagtgatagtgatgctttttattcttaggctgttgcatccacaggcataaacactgacatatgtcaacaatgccacagccctgattttctagacatagcagttacccagtttttgattgggttcctcacactttaccacaatatccattccgtgaaataaacaggcagaagaaaatgtttttcctgactaacgtgttctagtacagtttcaaatacatttcttcttctaacctaatatatctcaatgtgactccattgtgaggatgtgatttaaata

SEQ ID NO: 686628 - DNA, 1213 bp, Homo sapiens
tatctgggtctatttctgtaaaatatcagatatttggacagaagaatatctgggtctatttctgtaaaatatcagatatttggacagaagaaagatggaaagtgtgtaaacatcttcagatttgtctcaacatacaatggtaagaaatgtgctcctgagtatttgcagttccttatttctgttggcccagtcacttccaaatcaaccactgaggttctctgttcagtgatctctcttggctccttcagagcaaccaggctgtccatgcaaatgcatactagaaaaaagtccctgtagcaggtagtgtttgtctccagcttccctttggaccacctcccagtgctcattctcactgctcctcattcatggtagatactcaggttcttgtttttcctttggttttgatactgaaaccctttgttctcgtgaatcagttgtttaccaagacctcctggttactgaccaactttaggtttgcttttcagactctaactttgacttctctaggagaagtcaaagcatgcatctgctagttctttagcattgctggcaaagaccaccactcttctcctacactcacatgcactcatacactcccatacacacataggctcacatrcacatactctcacacacacacttacatacatatactctcatgtacataatactctctcacacacacaaacacacacactcttctgacctccttatcccacaacagtccccgctaaactgcatgcatggtttttttccccaagctctccctccagcctccaacaaggataagaaatctgaagaaatctggcaacatcatttcaagtctattggttagtaatacggcttttgtatattcagcctgtgatctacataaaaaaagattccttctacctatagccataccttgaaatattttacaaccattgaaaagaaccttttaaatctattcctgctaccctggagatatttccacaatgggttagaaaagcaagttgcatagaagggtatatattgggattctgttttaataaaacaaccaatgacttcacgtgataaatatggagatgtatatgtggagaaagttacagtaggatatactaaagtgttagcgattattgcaggttaaggtaagaggtgtgaaagcaaaaaaaagagggggctctttaataagaacttgtccccaataaatatggcatgtacagttataattcca

SEQ ID NO: 686629 - DNA, 1957 bp, Homo sapiens
ttttgtagggagcttggaaatgtgtggggaaattgatttcattaattcattcactaatttttaaacatgtatacctttattaagcacatgtgcacctttattaagcacatgtgcaattccaggcacctgggttaggcaccagtaattacattaaagaaaaaaatcccaacttaccaaacaccaccactataaaaataccaactacctctttgtgaaaaggtaattagtataaataaargatctgcttaaattccaacaaataagagtaagtaggaagttgattgctactgggaaactatttcacttatacgtattcaacttctaaacagttactgtggctacagatacaaagaatgtgattatttctgattttgttgccaggtgagaattcgatctttatttttaaagcccttaggggcgacagagcttgtttgtttcttggctattttagtttgtaaattctatcagcaaatctgcatactaagtgcaccttaattatttgattctgactaaaaatgactaagattttgttgtcattcttcccttctcttcttccacttgccatttcctctttctcctttttcccttcttccttcatcttctccaactactataacttaccagttagaggaagtatcaggcattaagtgtgcaagaagtactaccctgagatttttgcataggttaattctgctaaccaacacaatgaccggaggtaactgctgctgttagcctgttttacagatgaggaaatgaaacaccaagagttgaatctgcccaaactgcacatgggattggcttagttgtttattttccatactgtgtgaggaaagactttgacttatgacatagatgaaatcaagggagtttctctttatctaggtttacttgttagccaatgaaagtgcttttaaacttgaacctctctaaatatttattattgtctgctgacctctttcattgagtaattcactgaatagaaaaatttaacgcttaagccaagcagagtcattgggtatgtaaatatggcaagtcatagtatttgaaaatagtgaaagactatgttcacttgggatttggtaggacttttaaaaataaaaataatagtagtaagcagcaacagactgtaatacaaactaggatgcatgaagattgtagtgctgttggttattatttgatagatgagcactcttgaacacagtttaatccaatttgcttagagtttatatgatattttttgtcatctaagaagcattgaaaaaaatgacagtatgtccaaaattttcagaaaaatcttaaattgtggttctcagggaaacctgtggtttttctcacatgtaaaataagtacaatttaaataataaggtaattgcataatttccctattatgtaattatataattacataataataatgtaacaatgtatacataatgcaacaatttaaacaaaattggagctcaaaaaataattctgaaagaatgaatgagtctataaaatttggtgaatgtacttggctgaatttggataatttaagcccatataaattctacttgtcacaaaaataaattttaaattactagaagtgttattcttgcctttgctcttgaggaaagaacttaaaagttatgggatagcaaagtgggagatgcagaattatgagataatattacttgaattatgtaaattgtttatgtaatctgaatattagcttacttcctaacttttcttaaatttactggtcgccctctgtgacttcaggtagcagataaaaaaacagccctaaagctaaggagagaaggaagcctgcagtgtgggaagggaagccattaaaactttcctcaaagaacagtggcagctatattttgcagagtgctgggaaatggttattatcacatctctgtgctttctggaggttaaaacatttgacagcatgaagtccgattatatataaatt

SEQ ID NO: 686630 - DNA, 713 bp, Homo sapiens
cacctcactaatttaaagcctgaggcaagatcatgatagtaggaaaaaatatcactgtgccttactgacatgatattatcctttaaaggaatatattcaaaatacttaaaatctgctaattctgaaagaataggtcatagagacttgaactcacttttccctttctttctccctgttcaaggcctcaagctactgtggaaaaaccatatcgcattcaaaagtgtctttcaactataaaaagaataccccagagaatcttctccaaaaacatttcttccagctgtctgtggggccttgtgaaatcaaaggtaacttttagctcatgagtcggcaaacaaaactttgaaattcatatatcttttccagtgggttggtttgggaaaatttatggttttcctgcccttgggataatcctagccctgaaaatattctgtatcatagtggagaagataaagaaagaaaagaatagtgaaagggatcacatgttgttaacaccttttgtaagccatgccctcttgtgctttcacttttaaatacatcatctcatgraatatttatgcttacactgccatgtaggttatactagctctagtttaaaatggagtaatctgagtgtttgagagtcaaatttagtcatcaatggttaactcatcttgttagtgacagggccaaaattcaaacctagctgtagatgcttctgaactgtggtgact

SEQ ID NO: 686631 - DNA, 583 bp, Homo sapiens
tatatggagtttcctttaaaaattaaagattgaattatgatttgatccagcaatccctcttctcggtatatatccaaaggaattgaaggatggatcttaaaacatatctgcactcctgtgttcattgtaacattattcactagtcaagatatggaaacaacaaatgactaaatgtctattgaagaacaaataaagaaaatatggtatatacatacaatgsaatattattcagattttttaaaggaaattttgccagttacaacaacacggatgaaactgtaagacattatattaagtgaaataagctagacacaaaaacacaaataccacctgatcttacttataagtaaagagtacaataatcaaacacatagaagcaaagggtagaatggtggttgccacaggctggaggaagatgaaatcaggagatgttaacccagggtaaaaagtttcagttatgcaaaataaataagttctggagatctgtataacataaggcagaaaaaagagaaaagtacaacaaaatagaaaatatttttgtatggggttagtgaagagtggtagatgcaaagaagtttgatga

SEQ ID NO: 686632 - DNA, 605 bp, Homo sapiens
ctctacatagaacctaccctgtgcaagacagcctcctatgtatgagagataaagcaaggtgagtcaaagctcttcctactttggaactttttctctgaaggctgcagtgtccagtatgatcatgagttggtggagccaccctcagccatgtgaaactggggtttaattacatatcccatcattgatgattctgcaaacctcagaaaatagtggatagaaataacctgggtggcatcagtaactaatgctcttatctcacttctatgtggggaagtcgggctctgagatgacaacaccccatcttctttctcaygtagactgtctaggcaccttgtggctgtctgtatcttcttttccttctgaattctgtggctgatcctgatatttcacattaaatgggaataaaacattaatgggtcaggagtctcacaaagtttagtttttccctctaaaccgcatgcctgccatgggatggttgtttatgttgaataatacattttgaagccctcttggttgcaaaatgttttcccacttattttcacttggttgtgtatgattattcaagatttaacttcagcatcttctcttttagtaagactattttg

SEQ ID NO: 686633 - DNA, 668 bp, Homo sapiens
ataaagatataagagcacccataatacttaccacctagacatatatacacctgcatattatagtatatatatatatatatatatatatatatatatatatatatatatacatacatacacagacacattcgacaatacataatgtaaaacaaatttcagttttagatagttctgttttcctttaaaaattcagacatgagtctgggcacagtggcttacacctgtaattccagcattttgggaggccaaagcaggaacatcatttgaggtcaggagtttgaaaccagcctggccaacttggtgaaacttcatctccactaaaaatacaaaaaattagccgggcatggtggtgggtgcctgtaatcccagctacttgggaggctgaggcgggagaatcgattgaacctggaaggcggaggtttcagttagcccagatcagsccactgcactccagcctgggagacagaacgaggctccgtcctgaaagaaagaaaaaaaaaaatcagacatgaaaagcaacttttatgtgtctttaagtatttatatgtttattcaactaatatttagtgattatcttgaatgtaccaggagcataataaaacataccattatttaattaatcatttattgttggacacataaattattccagtgctttgccattatca

SEQ ID NO: 686634 - DNA, 593 bp, Homo sapiens
tggctaaacatgttggagatcagtaaagtattaaaatatttaagatgacagaacatgaagcctaattctagaaatatagcagtgagaaagaatgacaaggggcagacacagaatgcctattccatcagctgcatactttccatcatttcagtgtatacttaatcttaaaagatacagagggtggagtgagcatgcgtggttgaccatcttaattacactctacacagagacaccagttgaaactgagagtgacaactttgtgtcagaatcacagtgttggagcaagtcccacgtggtcacttctttcttgcttaaacacacagtcaggatgttggagaattttcctgaggctcaacttactgttttcatgagtctatgggagcttataaaaatacatactgtttaaattttcctaaatgtgcatggaggcaaagatttttattctgaaatggaraacctcttgttttccattgttaaggaaagactttgttacagaaataagtctccctgtggaaaattatagttttcaggtgagctatccctactaatcagactcaaggttgattggaacattacaaaattgtatgattttt

SEQ ID NO: 686635 - DNA, 1557 bp, Homo sapiens
tcaaaataataaaatcaaatgtttgtgcaatgttgcagttcttttatgatccaaactgactcaatatcagggacaactgaagttaattattgcatatrcccagacaagtctttgggggctagtgatatttgcatttgtttcttataatacaaaatttcctgtaaattgtgtgatattgagagttatatcataaataattttaaaataatatgtaaattatggaagacttctagcaccatctcaaaagaactgaggattcaacctcaaaaggctgccactggccaaatatggaaaattatgagcatcactaagaataataacttcaatagatgaaaatatattaaatattaataaatgcataagttaaaatgattcttacaatcatgattttgaaaggtgctaaggatctatattattattttaaaattagtaaataaagggaaagaattaccatctgtcttgccatgaatactgccttacctatatataaaatatatcagaggctaaccaggcctggcgcaggtggctcacgcctgtaatcccaacactttgggaggcggaggcaggcggatcacgaggtcaggagatagagatcacccgggctaacacggtgaaaccccgtctctactaaaagtacaaaaaaattagccgggcatggtggtgggcgcctgtagtcccagctactcgggaggttgaggcaggagaatggcgtgaacccgggaggcggagcttgcagtgagccaagattgcgccattgcactccagcctggacgacagagcgagactccatctccaaaaaaaaaaaaaaaaagtatcagaggctaaccaaatagtgggtgaaattttctccaagatatattaaatgaaagaagaataacagaattagaatattagcattgtgcaacctctaatgaactaggaccactagatatgaacatccagtgcagctaatcccataaatagaatggttcccagggtttatgtgcctcttgaagaaagaagataaaatcacctatgtaggattctttcaaacaaacaaataaccagttggatatgatcaaacctgtagtttatattcaaccacagatttacgggaaataaaaagaacagaaagatatgttaaactacaccataaagatgtaattaataaaatctaccaccatgttttcaaaagtagtagttagtagtagctacttgccacatgcaactatttaaatgtaaatttaacattaaaaaagcccttactttagttccttggaaacactgtccacatttctttcaagcactcaatagccatatgtggctggtggtgatcatattcaacagcccagaacatttatataattgcagaaagttctgttggacagtcctaatctaaattgtacaaaacactacaagacaatcggtttctaaaacaatgagatagtgaagaaagagagaaagagagagaacagcaacaaaagcaaatgagataaacaaatttgtaaatactcataagatacatcaattgtgatctgtgcaacattgggatcccaatttcaaagaactgtaaaacaa

SEQ ID NO: 686636 - DNA, 1557 bp, Homo sapiens
tcaaaataataaaatcaaatgtttgtgcaatgttgcagttcttttatgatccaaactgactcaatatcagggacaactgaagttaattattgcatatgcccagacaagtctttgggggctagtgatatttgcatttgtttcttataatacaaaatttcctgtaaattgtgtgatattgagagttatatcataaataattttaaaataatatgtaaattatggaagacttctagcaccatctcaaaagaactgaggattcaacctcaaaaggctgccactggccaaatatggaaaattatgagcatcactaagaataataacttcaatagatgaaaatatattaaatattaataaatgyataagttaaaatgattcttacaatcatgattttgaaaggtgctaaggatctatattattattttaaaattagtaaataaagggaaagaattaccatctgtcttgccatgaatactgccttacctatatataaaatatatcagaggctaaccaggcctggcgcaggtggctcacgcctgtaatcccaacactttgggaggcggaggcaggcggatcacgaggtcaggagatagagatcacccgggctaacacggtgaaaccccgtctctactaaaagtacaaaaaaattagccgggcatggtggtgggcgcctgtagtcccagctactcgggaggttgaggcaggagaatggcgtgaacccgggaggcggagcttgcagtgagccaagattgcgccattgcactccagcctggacgacagagcgagactccatctccaaaaaaaaaaaaaaaaagtatcagaggctaaccaaatagtgggtgaaattttctccaagatatattaaatgaaagaagaataacagaattagaatattagcattgtgcaacctctaatgaactaggaccactagatatgaacatccagtgcagctaatcccataaatagaatggttcccagggtttatgtgcctcttgaagaaagaagataaaatcacctatgtaggattctttcaaacaaacaaataaccagttggatatgatcaaacctgtagtttatattcaaccacagatttacgggaaataaaaagaacagaaagatatgttaaactacaccataaagatgtaattaataaaatctaccaccatgttttcaaaagtagtagttagtagtagctacttgccacatgcaactatttaaatgtaaatttaacattaaaaaagcccttactttagttccttggaaacactgtccacatttctttcaagcactcaatagccatatgtggctggtggtgatcatattcaacagcccagaacatttatataattgcagaaagttctgttggacagtcctaatctaaattgtacaaaacactacaagacaatcggtttctaaaacaatgagatagtgaagaaagagagaaagagagagaacagcaacaaaagcaaatgagataaacaaatttgtaaatactcataagatacatcaattgtgatctgtgcaacattgggatcccaatttcaaagaactgtaaaacaa

SEQ ID NO: 686637 - DNA, 1557 bp, Homo sapiens
tcaaaataataaaatcaaatgtttgtgcaatgttgcagttcttttatgatccaaactgactcaatatcagggacaactgaagttaattattgcatatgcccagacaagtctttgggggctagtgatatttgcatttgtttcttataatacaaaatttcctgtaaattgtgtgatattgagagttatatcataaataattttaaaataatatgtaaattatggaagacttctagcaccatctcaaaagaactgaggattcaacctcaaaaggctgccactggccaaatatggaaaattatgagcatcactaagaataataacttcaatagatgaaaatatattaaatattaataaatgcataagttaaaatgattcttacaatcatgattttgaaaggtgctaaggatctatattattattttaaaattagtaaataaagggaaagaattaccatctgtcttgccatgaatmctgccttacctatatataaaatatatcagaggctaaccaggcctggcgcaggtggctcacgcctgtaatcccaacactttgggaggcggaggcaggcggatcacgaggtcaggagatagagatcacccgggctaacacggtgaaaccccgtctctactaaaagtacaaaaaaattagccgggcatggtggtgggcgcctgtagtcccagctactcgggaggttgaggcaggagaatggcgtgaacccgggaggcggagcttgcagtgagccaagattgcgccattgcactccagcctggacgacagagcgagactccatctccaaaaaaaaaaaaaaaaagtatcagaggctaaccaaatagtgggtgaaattttctccaagatatattaaatgaaagaagaataacagaattagaatattagcattgtgcaacctctaatgaactaggaccactagatatgaacatccagtgcagctaatcccataaatagaatggttcccagggtttatgtgcctcttgaagaaagaagataaaatcacctatgtaggattctttcaaacaaacaaataaccagttggatatgatcaaacctgtagtttatattcaaccacagatttacgggaaataaaaagaacagaaagatatgttaaactacaccataaagatgtaattaataaaatctaccaccatgttttcaaaagtagtagttagtagtagctacttgccacatgcaactatttaaatgtaaatttaacattaaaaaagcccttactttagttccttggaaacactgtccacatttctttcaagcactcaatagccatatgtggctggtggtgatcatattcaacagcccagaacatttatataattgcagaaagttctgttggacagtcctaatctaaattgtacaaaacactacaagacaatcggtttctaaaacaatgagatagtgaagaaagagagaaagagagagaacagcaacaaaagcaaatgagataaacaaatttgtaaatactcataagatacatcaattgtgatctgtgcaacattgggatcccaatttcaaagaactgtaaaacaa

SEQ ID NO: 686638 - DNA, 1557 bp, Homo sapiens
tcaaaataataaaatcaaatgtttgtgcaatgttgcagttcttttatgatccaaactgactcaatatcagggacaactgaagttaattattgcatatgcccagacaagtctttgggggctagtgatatttgcatttgtttcttataatacaaaatttcctgtaaattgtgtgatattgagagttatatcataaataattttaaaataatatgtaaattatggaagacttctagcaccatctcaaaagaactgaggattcaacctcaaaaggctgccactggccaaatatggaaaattatgagcatcactaagaataataacttcaatagatgaaaatatattaaatattaataaatgcataagttaaaatgattcttacaatcatgattttgaaaggtgctaaggatctatattattattttaaaattagtaaataaagggaaagaattaccatctgtcttgccatgaatactgccttacctatatataaaatatatcagaggctaaccaggcctggygcaggtggctcacgcctgtaatcccaacactttgggaggcggaggcaggcggatcacgaggtcaggagatagagatcacccgggctaacacggtgaaaccccgtctctactaaaagtacaaaaaaattagccgggcatggtggtgggcgcctgtagtcccagctactcgggaggttgaggcaggagaatggcgtgaacccgggaggcggagcttgcagtgagccaagattgcgccattgcactccagcctggacgacagagcgagactccatctccaaaaaaaaaaaaaaaaagtatcagaggctaaccaaatagtgggtgaaattttctccaagatatattaaatgaaagaagaataacagaattagaatattagcattgtgcaacctctaatgaactaggaccactagatatgaacatccagtgcagctaatcccataaatagaatggttcccagggtttatgtgcctcttgaagaaagaagataaaatcacctatgtaggattctttcaaacaaacaaataaccagttggatatgatcaaacctgtagtttatattcaaccacagatttacgggaaataaaaagaacagaaagatatgttaaactacaccataaagatgtaattaataaaatctaccaccatgttttcaaaagtagtagttagtagtagctacttgccacatgcaactatttaaatgtaaatttaacattaaaaaagcccttactttagttccttggaaacactgtccacatttctttcaagcactcaatagccatatgtggctggtggtgatcatattcaacagcccagaacatttatataattgcagaaagttctgttggacagtcctaatctaaattgtacaaaacactacaagacaatcggtttctaaaacaatgagatagtgaagaaagagagaaagagagagaacagcaacaaaagcaaatgagataaacaaatttgtaaatactcataagatacatcaattgtgatctgtgcaacattgggatcccaatttcaaagaactgtaaaacaa

SEQ ID NO: 686639 - DNA, 1557 bp, Homo sapiens
tcaaaataataaaatcaaatgtttgtgcaatgttgcagttcttttatgatccaaactgactcaatatcagggacaactgaagttaattattgcatatgcccagacaagtctttgggggctagtgatatttgcatttgtttcttataatacaaaatttcctgtaaattgtgtgatattgagagttatatcataaataattttaaaataatatgtaaattatggaagacttctagcaccatctcaaaagaactgaggattcaacctcaaaaggctgccactggccaaatatggaaaattatgagcatcactaagaataataacttcaatagatgaaaatatattaaatattaataaatgcataagttaaaatgattcttacaatcatgattttgaaaggtgctaaggatctatattattattttaaaattagtaaataaagggaaagaattaccatctgtcttgccatgaatactgccttacctatatataaaatatatcagaggctaaccaggcctggcgcaggtggctcacgcctgtaatcccaacactttgggaggcggaggcaggcggatcacgaggtcaggagatagagatcacccgggctaacacggtgaaaccccgtctctactaaaagtacaaaaaaattagccgggcatggtggtgggcgcctgtagtcccagctactcgggaggttgaggcaggagaatggcgtgaacccgggaggcggagcttgcagtgagccaagattgcgccattgcactccagcctggacgacagagcgagactccatctccaaaaaaaaaaaaaaaaagtatcagaggctaaccaaatagtgggtgaaattttctccaagatatattaaatgaaagaagaataacagaattagaatattagcattgtgcaacctctaatgaactaggaccactagatatgaacatccagtgcagctaatcccataaatagaatggttcccagggtttatgygcctcttgaagaaagaagataaaatcacctatgtaggattctttcaaacaaacaaataaccagttggatatgatcaaacctgtagtttatattcaaccacagatttacgggaaataaaaagaacagaaagatatgttaaactacaccataaagatgtaattaataaaatctaccaccatgttttcaaaagtagtagttagtagtagctacttgccacatgcaactatttaaatgtaaatttaacattaaaaaagcccttactttagttccttggaaacactgtccacatttctttcaagcactcaatagccatatgtggctggtggtgatcatattcaacagcccagaacatttatataattgcagaaagttctgttggacagtcctaatctaaattgtacaaaacactacaagacaatcggtttctaaaacaatgagatagtgaagaaagagagaaagagagagaacagcaacaaaagcaaatgagataaacaaatttgtaaatactcataagatacatcaattgtgatctgtgcaacattgggatcccaatttcaaagaactgtaaaacaa

SEQ ID NO: 686640 - DNA, 1557 bp, Homo sapiens
tcaaaataataaaatcaaatgtttgtgcaatgttgcagttcttttatgatccaaactgactcaatatcagggacaactgaagttaattattgcatatgcccagacaagtctttgggggctagtgatatttgcatttgtttcttataatacaaaatttcctgtaaattgtgtgatattgagagttatatcataaataattttaaaataatatgtaaattatggaagacttctagcaccatctcaaaagaactgaggattcaacctcaaaaggctgccactggccaaatatggaaaattatgagcatcactaagaataataacttcaatagatgaaaatatattaaatattaataaatgcataagttaaaatgattcttacaatcatgattttgaaaggtgctaaggatctatattattattttaaaattagtaaataaagggaaagaattaccatctgtcttgccatgaatactgccttacctatatataaaatatatcagaggctaaccaggcctggcgcaggtggctcacgcctgtaatcccaacactttgggaggcggaggcaggcggatcacgaggtcaggagatagagatcacccgggctaacacggtgaaaccccgtctctactaaaagtacaaaaaaattagccgggcatggtggtgggcgcctgtagtcccagctactcgggaggttgaggcaggagaatggcgtgaacccgggaggcggagcttgcagtgagccaagattgcgccattgcactccagcctggacgacagagcgagactccatctccaaaaaaaaaaaaaaaaagtatcagaggctaaccaaatagtgggtgaaattttctccaagatatattaaatgaaagaagaataacagaattagaatattagcattgtgcaacctctaatgaactaggaccactagatatgaacatccagtgcagctaatcccataaatagaatggttcccagggtttatgtgcctcttgaagaaagaagataaaatcacctatgtaggattctttcaaacaaacaaataaccagttggatatgatcaaacctgtagtttatattcaaccacagatttacggkaaataaaaagaacagaaagatatgttaaactacaccataaagatgtaattaataaaatctaccaccatgttttcaaaagtagtagttagtagtagctacttgccacatgcaactatttaaatgtaaatttaacattaaaaaagcccttactttagttccttggaaacactgtccacatttctttcaagcactcaatagccatatgtggctggtggtgatcatattcaacagcccagaacatttatataattgcagaaagttctgttggacagtcctaatctaaattgtacaaaacactacaagacaatcggtttctaaaacaatgagatagtgaagaaagagagaaagagagagaacagcaacaaaagcaaatgagataaacaaatttgtaaatactcataagatacatcaattgtgatctgtgcaacattgggatcccaatttcaaagaactgtaaaacaa

SEQ ID NO: 686641 - DNA, 1557 bp, Homo sapiens
tcaaaataataaaatcaaatgtttgtgcaatgttgcagttcttttatgatccaaactgactcaatatcagggacaactgaagttaattattgcatatgcccagacaagtctttgggggctagtgatatttgcatttgtttcttataatacaaaatttcctgtaaattgtgtgatattgagagttatatcataaataattttaaaataatatgtaaattatggaagacttctagcaccatctcaaaagaactgaggattcaacctcaaaaggctgccactggccaaatatggaaaattatgagcatcactaagaataataacttcaatagatgaaaatatattaaatattaataaatgcataagttaaaatgattcttacaatcatgattttgaaaggtgctaaggatctatattattattttaaaattagtaaataaagggaaagaattaccatctgtcttgccatgaatactgccttacctatatataaaatatatcagaggctaaccaggcctggcgcaggtggctcacgcctgtaatcccaacactttgggaggcggaggcaggcggatcacgaggtcaggagatagagatcacccgggctaacacggtgaaaccccgtctctactaaaagtacaaaaaaattagccgggcatggtggtgggcgcctgtagtcccagctactcgggaggttgaggcaggagaatggcgtgaacccgggaggcggagcttgcagtgagccaagattgcgccattgcactccagcctggacgacagagcgagactccatctccaaaaaaaaaaaaaaaaagtatcagaggctaaccaaatagtgggtgaaattttctccaagatatattaaatgaaagaagaataacagaattagaatattagcattgtgcaacctctaatgaactaggaccactagatatgaacatccagtgcagctaatcccataaatagaatggttcccagggtttatgtgcctcttgaagaaagaagataaaatcacctatgtaggattctttcaaacaaacaaataaccagttggatatgatcaaacctgtagtttatattcaaccacagatttacgggaaataaaaagaacagaaagatatgttaaactacaccataaagatgtaattaataaaatctaccaccatgttttcaaaagtagtagttagtagtagytacttgccacatgcaactatttaaatgtaaatttaacattaaaaaagcccttactttagttccttggaaacactgtccacatttctttcaagcactcaatagccatatgtggctggtggtgatcatattcaacagcccagaacatttatataattgcagaaagttctgttggacagtcctaatctaaattgtacaaaacactacaagacaatcggtttctaaaacaatgagatagtgaagaaagagagaaagagagagaacagcaacaaaagcaaatgagataaacaaatttgtaaatactcataagatacatcaattgtgatctgtgcaacattgggatcccaatttcaaagaactgtaaaacaa

SEQ ID NO: 686642 - DNA, 609 bp, Homo sapiens
tctgtatagagcatctgtcatagctgctttctaaaactgactcatttttttcaaacatactttctttttaaaaagtgttttcaccacaaatattcatttgaaaaccacttatagcattccaaagaagatttaagaatctcccagaagctctgtaataagaaaatgcatcctttgtttccatagaaatatacttgtacatgttgttctcctggtttgctgtatgtgctgaacagatttcagaatgacatttggtgttctgtggttgaaatacgcacccacaaagcagaacaaatgtaaaatgctgccctctgttgaaaaatgccaagtacacamatcagttcttgaaaggtagatgaaatattatatttacaccagtataagaaggtttgaagaaataaaacaattggtaagagttgtgaaataatgataactttcttagacttaaatcaaaaagaacaatatcaaaaaaactatggtatgtttaaatggttaaaaagatcaactatctacattgaaaaaatactaagctaaaatagagtaacgacctatatggaaaagtgttgtttccgcatgtgacagatagaggggtaatttctgtaattttaagaa

SEQ ID NO: 686643 - DNA, 609 bp, Homo sapiens
tctgtatagagcatctgtcatagctgctttctaaaactgactcatttttttcaaacatactttctttttaaaaagtgttttcaccacaaatattcatttgaaaaccacttatagcattccaaagaagatttaagaatctcccagaagctctgtaataagaaaatgcatcctttgtttccatagaaatatacttgtacatgttgttctcctggtttgctgtatgtgctgaacagatttcagaatgacatttggtgttctgtggttgaaatacgcacccacaaagcagaacaaatgtaaaatgctgccctctgttgaaaaatgccaagtacacaaatcagttcttgaaaggtagatgaaatattatatttacaccagtataagaaggtttgaagaaataaaacaattggtaagagttgtgaaataatgataactttcttagacttaaatcaaaaagaacaatatcaaaraaactatggtatgtttaaatggttaaaaagatcaactatctacattgaaaaaatactaagctaaaatagagtaacgacctatatggaaaagtgttgtttccgcatgtgacagatagaggggtaatttctgtaattttaagaa

SEQ ID NO: 686644 - DNA, 609 bp, Homo sapiens
tctgtatagagcatctgtcatagctgctttctaaaactgactcatttttttcaaacatactttctttttaaaaagtgttttcaccacaaatattcatttgaaaaccacttatagcattccaaagaagatttaagaatctcccagaagctctgtaataagaaaatgcatcctttgtttccatagaaatatacttgtacatgttgttctcctggtttgctgtatgtgctgaacagatttcagaatgacatttggtgttctgtggttgaaatacgcacccacaaagcagaacaaatgtaaaatgctgccctctgttgaaaaatgccaagtacacaaatcagttcttgaaaggtagatgaaatattatatttacaccagtataagaaggtttgaagaaataaaacaattggtaagagttgtgaaataatgataactttcttagacttaaatcaaaaagaacaatatcaaaaaaactatggtatgtttaaatggttaaaaagatmaactatctacattgaaaaaatactaagctaaaatagagtaacgacctatatggaaaagtgttgtttccgcatgtgacagatagaggggtaatttctgtaattttaagaa

SEQ ID NO: 686645 - DNA, 593 bp, Homo sapiens
tccccaacccagatgggtgctacggtctccacctctgctcttatacctgctcccaagaagaaagaggagkggagatgcaagagaggaatgagaagcatcatgaaagctagtatgtagtgagcaaatcatgacattccaggcactgtgcttcatattaccagatttcaggctcaaagttgtatgagacaggtacagtattatcattttagtatcacagatcaggaaacccaggcttagagaattgggatttgaattctgaaacagactgtttttgctttttttttttttttgagacagaatctcactctgtcacctaggctggaatgaagtggcactatctcagctcactgcaacctctgccccccaggttcaagtgattctcctgcctcagccttctgagtagctaggattacaagcacccactactacgtccaggtaatttttgtacttttagtagagctggtttttaccatgttggtcaggctggtctcaaactcttgacctcaagtgatccactcaccttgacctcccaaagtgctgagattacaggtataagccatcgcaccccgcctagaatagattcttaaccctgg

SEQ ID NO: 686646 - DNA, 627 bp, Homo sapiens
aagcaaagtgcacaactatatgccctccttaacattctgctgattgagatctcccttttctactaaacttcagcaatggcccagataggggctgtagtgccacagctgtacagttttgagtgatgcctgcatattgtgcagaactgtcagtaagtgaggctctagccttctcttcttcaactggttgtagttgaggccatgatacatgcttctagagagaaggcggtgtaatgggagtggagaccatgggtatttggacactttatgtatcttatttgtgcctcctcagcctttttgggaccagttttgtatatactastctcatgtgatgatggtgctgtgcacatccaactttatgtcttggtatgacagacaatgcccagttcataatgggcagctgaggctgcctggtaacttaatggcccacagtcatgcatttcatttttgttaagacccagtgacaagccaagagctgcttatgaaaataatagtagttatctgtggatgatggcagggccttgctgcaaaatctgaagggcctcctctgaattcacctgtaggtatcactggtaaactgggctctttcctcacttttgattagttgtacagaaagaacatttaattgaa

SEQ ID NO: 686647 - DNA, 627 bp, Homo sapiens
aagcaaagtgcacaactatatgccctccttaacattctgctgattgagatctcccttttctactaaacttcagcaatggcccagataggggctgtagtgccacagctgtacagttttgagtgatgcctgcatattgtgcagaactgtcagtaagtgaggctctagccttctcttcttcaactggttgtagttgaggccatgatacatgcttctagagagaaggcggtgtaatgggagtggagaccatgggtatttggacactttatgtatcttatttgtgcctcctcagcctttttgggaccagttttgtatatactagtctcatgtgatgatggtgctgtgcacatccaactttatgtcttggtatgacagacaatgcccagttcataatgggcagctgaggctgcctggtaacttaatggcccacagtcatgcatttcatttttgttaagacccagtgacaagccaagagctgcttatgaaaataatagtagttatctgyggatgatggcagggccttgctgcaaaatctgaagggcctcctctgaattcacctgtaggtatcactggtaaactgggctctttcctcacttttgattagttgtacagaaagaacatttaattgaa

SEQ ID NO: 686648 - DNA, 495 bp, Homo sapiens
ttcttttctttctttctttttttttttttttgttaagacacagtctcactctgtcacctaggctggagtgcagtggcgtgatctcggctcactgcaacctctgcctcccaggttcaagcaattctagtgcttcagcctcctgagtagctgggattacaggcgtgcaccaccatgccaggctaatttttgtatttttagtagagacggggtttcaccatgttggctaggcaggtctcaaactcctgacctcaagtgatctgcctgcttcagcctcccaaagtgctgggattacagacatgagccaccacgcctggccagatatttctttatagcaatgcaaatacaacctaatacacggggtctcactrtgttgctcaggctggtctccaactcctgggctcaagtgatcctcctgcctcggcctctcaaagtgctgggattacaggcatgagtcactgtgcctgaccagaaagggaaaagttctgatttggaaag

SEQ ID NO: 686649 - DNA, 1283 bp, Homo sapiens
acactcttgcccagcaaatttataagatctcccccataacatttatagtttatttgacaataaaactggttaagactttgatctgaacacacaacacacaataatacaaaaaagttttaaaaacttaaaaactatgtgtttggagccattttccttctcttcagccttgctctccaatcctcaggaagggcttcaaaattagcatttctctctgccatgccactgtgaaaacaacatacagattattttagtggaaagaaaaattaacaaaagtattcatttcccagcaaataaaaatctaactgaaattaaaaacctgatctatcacgtctatgtttatgaaaatcttttgtttctcagccaaacatcagtatattcttcatcaaacttcttcattctgataggtcaaccaaacactaccccagttttacgtatatgtctaagtgcatatttatttatttattattgactgattgagacggaattttgctcttgttgcccagtctggagtgcaatggtgcgatctcggctcaccgcaacctccgcctcccaggttcaagcgattctcctgcctcagcctcccctcagagtagctgggattacaggcatgtgcaaccatgcctggctaattttttttttttttwagtagcgacagggtttctccatgttggtcaggctggtctcgaactcccaacctcaggtgatctgactgccttggcctcccaaagtgctgggattacaggtgtgagccaccgtgcccggccttatttattttatataaatatacctccaataaccattaaaggcacactgaagaaatgaaacacgttctattagagtttttcttagcccacaggagttatgattcttcagggcagatatatctaatcctcagtctaccaacagggaccctgggatctaatgtttttttttctgtttttgagatggagtcttgctctgttgcccagactggagtgcagtggcacaatctcggctcactgcaacctctgcctcctaggtccaagcgattctcctgcctcagcctcccaagtggcttggactacaggcgcctgccaccatgtccagctaatttttatatttttagtaaagacaggttttcactatgttggccaggctggtctcgaactcctgacctcgtgatccacccacctcggcttcccaaagtgctgggattacagatgtgagcccctgtgcccggccggatctaatgtttttgagtttctctttcaagtagttttatttgtaaggattaaaattcaaat

SEQ ID NO: 686650 - DNA, 667 bp, Homo sapiens
ttttagagagaataaagaaaaggaactaagctaaagtttttgtggtcgatgaaagatacaaggcaacaaatatgtagtagtaaaaaaaaaattctaacccagtcttctctttacaataggggaaactgggccccagtacttctagatgcctgaccctctaatctgattttacttccgttatctttgtcatatatttacctgcattcagattttcagtgtgcctaggagtcttagatgtctatgaaggcatgaatatagtaaagttaagtggtgacatttttatgttagaaatattttttgtataagagtgattattctggccaaaaaatacagtgccacatcaagaactttgttagttataggtgtgtccttcttacagagaaactgaaaagaataggtgatgccattttaaaaataatttagattttgttttttcacttagaacctggtcatcaggtgatggtttacccaagttctagcatattgttgaataaaatagaaaatgcagatagttagaagtgtcctagggtactggccctatatatgtgagattctaagatacatcagggaccagatccaagtaagccatttgagcctaaaagaaaaagaaaacygtaaggacacatatgtgcaacaatgcgttctagagacaaaatggtgtaaataa

SEQ ID NO: 686651 - DNA, 2175 bp, Homo sapiens
ccaggatggtcttgatctcctgacctcgtgatttgcccagctcggcctcccaaagtgctgggattacaggcatgagccttcgtgcctggcccatttcttttatatctctgtcccacaccaaatttcagccttcttattcagaccactgtttatttgtatgaacattctctgtatttaaaaaccagtggtatcattcttacattacagaaatactcccctcaagttaacttaatgggaacaaaagctttcatgcagagtaatagcaactatgtcattaattcaacaacacatattcattaatgatacatccattgattcttcgtttatttactcagcacatattttgtgagtgctgcttcatactaggcactatttgaggtcctgggtatatctgtgcacatgataaataaagtgcctggaatttatgttttccagattatgcaaagtaagcttatttggaaagtagtttggcactgcttactcccaagtgtgtgttctacaacatgggaaagtaagtgtatataatcagtttctaagtaaacagggatggtttttaactgtatcatttttacaaaactattattaatctgtgattacaaagaatcaaattaaagtgactcccaaccacttcagttttcagtgtcaatcatttaatttgatgatatggctaatcagtctgactcaaaatatctacattttgcattagataattataaagtagttcaaagctccagcttttactataagagaagatcttatactttaacccagaggtaacttgttccaatcctttagaaaagttgatgaacattataaaagcccctctgtgagactgttattaacgctgtgatcacagaacccacactgagcatttcacgaaacaggtagaaccactgatggtcactatgagattcctatcattagtaagtcaactgcctccattgtggcttacaacatggacagaatggttactgtgaagtctaggcctttgaaatcaaatcaacttctagagacttctatttagtagatgtctttgacattggatcatctacctttatagagcagagttaaagttgaaacaaaaaatacattcacaggaacaagagaagtgactaatgcttctgcaagtttttctttgcttgaactgtgatgagtttttttttatagttgtttctcagtgatccatattaaaacacaaatacctatggaagggagattttatctgctcctatctcagactacagagattaaggccctgccaagagatttggagagtactccagaaagctttrtctagtttacagatttgccactctgatacaaatattcagtgacttcaggcaaaagggattgggtgggggagggaaaggattggagacaatgacaagagtgtatgatgatcttgtatttttaaagacatgatgaaagggagatatttttagtaattttcccagctcttaatagaactaccagaaatatcatagcagtattgttactcctgcctactgaaatggaatctggcaatgacagctgacagcatccatggtcagaaagaaggtttcactgataggtcatagctggagttcacagaaagcaatttttttttagtagaaatatcttttttattttattttattattattatactttaagttttagggtacatgtgcacaatgtgcaggtttcagaaagcaatctcaaactttctccaggtgactgacatgctatttggttccactaattgtcttctaagtggtatgagtggtatttttttctaagtggtatgagtggtatttattttgttttttatggttttttgaataggtttttaaattattatactttaagctctagggtacatgtgcagaacgtccaggtttgttacataggtatacaagtgtcatggtggttggctgcacccatcaacccattgtctacattaagtatttctcctaatgctattccttcccttgccctccacccccgacaggccccagtgtgtgatgttcccctccctgtgtccatgtgttctcattgttcaactcccacttataagtgagagcatgcagtgtttggttttctgttcttgtgttagtttgctgagaatgatggtttacatctataatacagatgaccagatttatacagatttaatttaatgtaaaggaaaataaa

SEQ ID NO: 686652 - DNA, 2441 bp, Homo sapiens
aacattgtaaacactgatatttaaataaagaaatgataagcctatactaaaactctatactgaaagattacattaaaatctgtttgctaccaaccactaagtttttaaaaataatgtaccatgatactcagaaatatgagaatattttaattatttaatcatacagaaaagattaaatgtccacatacatgcttttttgaccatttttgtagtctgtttttatttttttacttatttactatatgctttaattaaattgtcattttttgataattatagattcacatccattgtaagaaataatacaagatactatacaatgataatatcttgccaaactacaggayaatattatacccaggatattgacattgatacagttaagatatagaacatttccatcatcaaaagggtccctcatgttgccttattacagccacacccagttccctcccacatcaacctgtccttgactcccggaaaccgctaattttgtcactttcaagaatgctatataaatggaatcatatattctatgattgaacaaagaacatgtgagattgccttttttacttcataatttgctggaaattcattcaggttgctgtatcaatagttcattccttttcactgctgaggaatattgcatgaatggatatacatgcttctttttttagcaatgtcaagaaaattaataagacaaatttaaaactagataggtttttctaaggtctaaaatacttatatagtgccgggtgtggtggctcatgcctgtaatctcagcactttgggaagctgaggcaggtggatcgcttgagttcaggagttggagaggtcctgggcaaaatggtgaaatctctctacaaaaaatacaaaaattagctacgcatggtggtgtgcacctacttaggaggctgaggtgggaggatcacttgggcccaggaggtcaaggctacagtgagccatgattgcgccactgcactccagcatgggaaatagagagagaccctataaataaaacaaaaaattaaaaattaaataatgatattggggaaaaatggatctgcacctatttattacaaaacatgcttcagttaaaatatggatttatctttggcagaccataatattatagaacaagttattaatgtcatctggataattcgacgggcttgaggaaagagctcagcaataaggaatgttcaagacagaatagaagaaatcatttgataatggtaaaagtaaggaactcaattgagagcaggtagaggggtttcttttctatctctttccctcatattcttgccccactccttcctcttggcgctaattaagaactagatgacttctttatactacatatatggaaatgaatttgaaagccgaaattatcctctattttagtatccctagggcttccagtctcccctgtctttttaaaaaagctttattgaggaataattcacatactacatgatttatccatttaattcacattactttgtcccaggaaaagccaaataattaaaggtgtttggtagtttgtaggagacaagcaatttcagtttaatacattgtttccatgctcctctatattaaaaagtaacagctgcagaaaacaacatgacagcaggcagaatcttgccagtgattggaaatgggtcatctaaatattctttattttgctttataatatgaaatcaatacattttagaaaattcatttagagaattcagaaaatgataaaaaggaatatatatttatctaccagagataacgtctcaagttgtattttttaattctatctttgttttctgtttgtgagtgtgtatgcatgactgtgtgtggtcatatctctttctgtaatgaatataatcgaatacaaatgttttttaaaatataatttcattgcatctatagaattcctatagatatacaccatcatccatcacccattaaatgttccaacactgttgaatgtttagagtgtttccactttttgcgatcataaataaatttataacagatacctttgtatgttatctctgtaagcctcaatatgattctttaggataaatttctaaaggtagtattttgggaaccgagataatgttagttaacaagcttgtctcccaaaaaagttttaaaaaatatttatttgtatttgtagaaatttacttatgtttactatctaattctgtagctaggctgcagtaaaactaacgccatttcccgagttctttccaaactgctcaaaaccctttgcagagcttccactataacgtcataaaatttatcattaagtagaggagggggaaccccttcaaatgtttttttattcaagagaagtaaatttgggggtggtatcttagtgacctacaagaatgtatgttactcttagtacacatggagggattctcactccttttgatatggtgcac

SEQ ID NO: 686653 - DNA, 2441 bp, Homo sapiens
aacattgtaaacactgatatttaaataaagaaatgataagcctatactaaaactctatactgaaagattacattaaaatctgtttgctaccaaccactaagtttttaaaaataatgtaccatgatactcagaaatatgagaatattttaattatttaatcatacagaaaagattaaatgtccacatacatgcttttttgaccatttttgtagtctgtttttatttttttacttatttactatatgctttaattaaattgtcattttttgataattatagattcacatccattgtaagaaataatacaagatactatacaatgataatatcttgccaaactacaggacaatattatacccaggatattgacattgatacagttaagatatagaacatttccatcatcaaaagggtccctcatgttgccttattacagccacacccagttccctcccacatcaacctgtccttgactcccggaaaccgctaattttgtcactttcaagaatgctatataaatggaatcatatattctatgattgaacaaagaacatgtgagattgccttttttacttcataatttgctggaaattcattcaggttgctgtatcaatagttcattccttttcactgctgaggaatattgcatgaatggatatacatgcttctttttttagcaatgtcaagaaaattaataagacaaatttaaaactagataggtttttctaaggtctaaaatacttatatagtgccgggtgtggtggctcatgcctgtaatctcagcactttgggaagctgaggcaggtggatcgcttgagttcaggagttggagaggtcctgggcaaaatggtgaaatctctctacaaaaaatacaaaaattagctacgcatggtggtgtgcacctacttaggaggctgaggtgggaggatcacttgggcccaggaggtcaaggctacagtgagccatgattgcgccactgcactccagcatgggaaatagagagagaccctataaataaaacaaaaaattaaaaattaaataatgatattggggaaaaatggatctgcacctatttattacaaaacatgcttcagttaaaatatggatttatctttggcagaccataatattatagaacaagttattaatgtcatctggataattcgacgggcttgaggaaagagctcagcaataaggaatgttcaagacagaatagaagaaatcatttgataatggtaaaagtaaggaactcaattgagagcaggtagaggggtttcttttctatctctttccctcatattcttgccccactccttcctcttggcgctaattaagaactagatgacttctttatactacatatatggaaatgaatttgaaagccgaaattatcctctattttagtatccctagggcttccagtctcccctgtctttttaaaaaagctttattgaggaataattcacatactacatgatttatccatttaattcacattactttgtcccaggaaaagccaaataattaaaggtgtttggtagtttgtaggagacaagcaatttcagtttaatacattgtttccatgctcctctatattaaaaagtaacagctgcagaaaacaacatgacagcaggcagaatcttgccagtgattggaaatgggtcatctaaatattctttattttgctttataatatgaaatcaatacattttagaaaattcatttagagaattcagaaaatgataaaaaggaatatatatttatctaccagagataacrtctcaagttgtattttttaattctatctttgttttctgtttgtgagtgtgtatgcatgactgtgtgtggtcatatctctttctgtaatgaatataatcgaatacaaatgttttttaaaatataatttcattgcatctatagaattcctatagatatacaccatcatccatcacccattaaatgttccaacactgttgaatgtttagagtgtttccactttttgcgatcataaataaatttataacagatacctttgtatgttatctctgtaagcctcaatatgattctttaggataaatttctaaaggtagtattttgggaaccgagataatgttagttaacaagcttgtctcccaaaaaagttttaaaaaatatttatttgtatttgtagaaatttacttatgtttactatctaattctgtagctaggctgcagtaaaactaacgccatttcccgagttctttccaaactgctcaaaaccctttgcagagcttccactataacgtcataaaatttatcattaagtagaggagggggaaccccttcaaatgtttttttattcaagagaagtaaatttgggggtggtatcttagtgacctacaagaatgtatgttactcttagtacacatggagggattctcactccttttgatatggtgcac

SEQ ID NO: 686654 - DNA, 819 bp, Homo sapiens
cagggaagttgaatggataccacaagtgtgaaggaataaaggacaaggtgagaccatagagaatacactggatggctagaaaaaactagcgagcacatccattgcatgtagaactttcgttttcaggtcctagtttttaaagaataacagtgaataagtcaatagatgtttcaagcamaatttaggcaatctagtttagaaatcaaaaaatcaagccataaggaattgagaaaacaatttatttgtgttttagaaagcattaacataatcaaataatggacatgggaaatccagagttactaaaaccaggctgttggtcacagaaaaaagtgctgtgaagatataataggctgtgagcaataaaactgtaaaaatcagatcaagctggtaacctggacaagtcagataatagaaattaactgagcattagatggtcacaataaatccagtatgcaaagactacaaatgcaagcaaaaacaaaaaattctgcctgctgggaacatttattaaagaagtttacattacattaaagaagtttaaatttaatcttttacatgtaaaaaattaaacatttatgaagtaaagtccatcattttatttttaggacacaattttgtctccactatatggcacattttggtttatcaaatacattctctcatgttactcaaacaatgctttcaagccgataaaggtcggggtaacaaaagaacaacaggtatgaaacaacaaagcttcataaaaataccagtttttttcttatacgatcaattgaagtagatgctggaataagaataggctatctttcattggcacta

SEQ ID NO: 686655 - DNA, 819 bp, Homo sapiens
cagggaagttgaatggataccacaagtgtgaaggaataaaggacaaggtgagaccatagagaatacactggatggctagaaaaaactagcgagcacatccattgcatgtagaactttcgttttcaggtcctagtttttaaagaataacagtgaataagtcaatagatgtttcaagcaaaatttaggcaatctagtttagaaatcaaaaaatcaagccataaggaattgagaaaacaatttatttgtgttttagaaagcattaacataatcaaataatggacatgggaaatccagagttactaaaaccaggctgttggtcacagaaaaaagtgctgtgaagatataataggctgtgagcaataaaactgtaaaaatcagatcaagctggtaacctggacaagtcagataatagaaattaactgagcattagatggtcacaataaatccagtatgcaaagactacaaatgcaagcaaaaacaaaaaattctgcctgctgggaacatttattaaagaagtttacattacattaaagaagtttaaatttaatcttttacatgtaaaaaattaaacatttatgaagtaaagtccatcattttatttttaggacacaattttgtctccactatatggcacattttggtttatcaaatacattctctcatgttactcaaacaatgctttcaagccgataaaggtcrgggtaacaaaagaacaacaggtatgaaacaacaaagcttcataaaaataccagtttttttcttatacgatcaattgaagtagatgctggaataagaataggctatctttcattggcacta

SEQ ID NO: 686656 - DNA, 651 bp, Homo sapiens
atggtattatatatattcttttatatcatttcaaatgcttaaatagtactccattttacataatatgtcaggagttaagtcatctcctgccactggatgtttacaatattattgtttcactataatgtagctctgtgggagtgcttagagctttaaggtattatttcatgaggaaccctcaattatgtacagatcctccttcctgggttaatcatttattcagaagagtcctccaatctttcttcttaggatgaataggtcaggctgccagaattctatgttagtgggtgtccagggaataaacttttagtctccagcagggtgagggaagaagatctgagcatcgtactacttcttaaacaggcttgcaaccaatccgatgtttaggcccacatgtatccccactttctgagatacttgatgcctccaattcctgagactttctgacattctgtagcaagaatcaacctgtttctgggttctcattactgccagcttagatttctgccttttttagactgaatttttaaccctttagtgaaatttaaggggactacaggaaggaatggtagtaaagatttatgttctatccactgtgttttaaggttgaaaactctttacatgtttattggccacacawatgtgtgacca

SEQ ID NO: 686657 - DNA, 1776 bp, Homo sapiens
gaatctgcctggtccgttttaatagtctcctattctgtcatacttgttcccccttttatattttttcaaatacattaaaaatattttatgtttgcatctgataatactcttatctgctgtctttgttggtctaatacattggctcttacttgtaggtgcttgtttctttggtgattttgtaaaattgtgagcccatgacattagaactttattttttgtgatttttttgaagcagggtattagatttttttttttccagagatgatgtgagtatctagtagtaccacctacttttaagtaaatttttgacttgagtttttcaggccacaccactagtttgaattttagtcacaaagggtgcagacttactaagaattcacagtggagacatatttctgttttactcttctaccaagaaccaaagccaataaagacccttattctcattatcgccctctgcagaatgagcttttacctatttcacttactaaggatgcagacttttgggaggcttctagcatatttgtaaaggtatagttaatccagtctcctgggaagggccccaggtggcctcctgtcatctcagcaagtagcccattaaaacctaggcttttgtccaccgaggattggccagtaactccagggaaaactgtctataatgttactcacctttgtgaatgtatatttctttcttgtttctgctctccaggaatttctttgcttccctctcaaggttaaccatgtattttatccagcatctttagatgcttttccatctaatttacttttattctatactcatatctttaggaattacctctagctctttttgaaatgtggcaaggggaaaaataaagtccataatcggtcctgtctcccaktttagaatgtcttttcctatttcaactgtgataaattcatcctcctcttcactcacttcagatgttcttctctttaggtattctccccatctggctcaactcctacccctatatatacccccggtagaatgaattactcttttacgtttgtttctatacttctttatatatatatctttcttaaaggagaggtatccctgtagacacaaagatagagactgaattctatttatttctatgttcctagcatgtaatatgcattcactaaagtttgttgaattgagttttcaaagtctttataaccaactcttgaaattttaagcttctagctaggactgttataacttaatttgctagttttagaaaataacttttaaagcaattaaagcttattcaacacgttgaagataaaataattttatttggtatttggtaaattccttgggctagtcctatttaaggatggattaaaatatgatagaagtgttatcttacaatctccagatgggctggggtgatgtaattttggagcaaatgaacattcacatcccaattctaaatctgagctcattttaaaattatacacttgcgggatgatctgtgccacaaaccatgacacacatttgcctatgtaacaaacctgcacatcctgcacatgtacccctgaacttaaaagttggagaaaaaaattacgcactttgtatctgtaacatcaaggggaatttttgcctttgggttactatttttaaaaaatttttttaaatggatacagtgatagattttagagcataacagttacaaatggagaggtttcctaaatgaccttgattactttgtgtgtgttggggtagggggttgaggaggttgtttttctcctgttgcctgaatttaaatg

SEQ ID NO: 686658 - DNA, 644 bp, Homo sapiens
aaaaggataatwaaaaatttggataactttaaaagatggagttactgtcaaaataccaaagactaggtagcttataaacaacaaaagtttatttctcacaattctggagactaggaagtccaagatcaaagcttctgcagatttggtggctggtgagggcccatttcctggttcatagatgatacattctcaatgtgttctcatctgatggaaagcagaaggcaggtctttggggcctcttttataaacggcactaatcccattcatgagggcttcaccttcatgatataatcacctctcccaaggtcccacttcctaataccatcatattggtgattaggatttcaacatacaaattttcaggggactcacacattcagtccaaagcagttcctgttgattagctgaaataatgtgacagagctgtactgttttccaacagaaaaggtacttttaacttttctgttagaaattttgatatttttcctgagactggagaaggtaaaagagtatccccatttttgtgcatctgtgtattaaattggtatgtgaataaaagaggacctatggtttataaaacagtgaaaaacaaagaagtggagtagagagggttagtatcattggttcatgcagttttttaaaca

SEQ ID NO: 686659 - DNA, 612 bp, Homo sapiens
attgctgccagtagatttgggagtaggagtggggtgggatgggggcagaaaagggtgaggtattgatattcagcacttttcatgatcaaatacagacactaaaaatgaattcatataagcattttccttaatctacatcagtgaggaaacaaacttcagaagttcactcatttcttcccctcatcaacttttaagttccagggtacatgtgcaggatgtgtgggtttgttagaggtaaatgagtcccatggtgatttgccccacaaatcaatccatcgcttaggtattaagcccaacatccattagatatttttcctkatgttctccctccccttgccccagtgtgtgttgttccccttttgtgtccatgtgttctcatcgttcacctcccacttataagtgagaacatgtggcatttggttttctgttcatgtgttagtttgttggggataatgccttccagctccatccatgtccctgcaaaggacatgatctcattcctttctatggctgcatggtattccatggtgtatatgtaccacattttctttgtccaatctattgttgatgggcatttgggttgattccatgtttttgctattgtgaatagtg

SEQ ID NO: 686660 - DNA, 612 bp, Homo sapiens
attgctgccagtagatttgggagtaggagtggggtgggatgggggcagaaaagggtgaggtattgatattcagcacttttcatgatcaaatacagacactaaaaatgaattcatataagcattttccttaatctacatcagtgaggaaacaaacttcagaagttcactcatttcttcccctcatcaacttttaagttccagggtacatgtgcaggatgtgtgggtttgttagaggtaaatgagtcccatggtgatttgccccacaaatcaatccatcgcttaggtattaagcccaacatccattagatatttttccttatgttctccctccccttgccccagtgtgtgttgttccccttttgtgtccatgtgttctcatcgttcasctcccacttataagtgagaacatgtggcatttggttttctgttcatgtgttagtttgttggggataatgccttccagctccatccatgtccctgcaaaggacatgatctcattcctttctatggctgcatggtattccatggtgtatatgtaccacattttctttgtccaatctattgttgatgggcatttgggttgattccatgtttttgctattgtgaatagtg

SEQ ID NO: 686661 - DNA, 612 bp, Homo sapiens
attgctgccagtagatttgggagtaggagtggggtgggatgggggcagaaaagggtgaggtattgatattcagcacttttcatgatcaaatacagacactaaaaatgaattcatataagcattttccttaatctacatcagtgaggaaacaaacttcagaagttcactcatttcttcccctcatcaacttttaagttccagggtacatgtgcaggatgtgtgggtttgttagaggtaaatgagtcccatggtgatttgccccacaaatcaatccatcgcttaggtattaagcccaacatccattagatatttttccttatgttctccctccccttgccccagtgtgtgttgttccccttttgtgtccatgtgttctcatcgttcacctcccacttataagtgagaacatgtggcatttggttttctgttcatgtgttagtttgttggggataatgccttccagctccatccatrtccctgcaaaggacatgatctcattcctttctatggctgcatggtattccatggtgtatatgtaccacattttctttgtccaatctattgttgatgggcatttgggttgattccatgtttttgctattgtgaatagtg

SEQ ID NO: 686662 - DNA, 2254 bp, Homo sapiens
cttttcagcacagaaatgaactgatctgacaatgagaaaaagcagtgaatttacctagtatcctcttaaaaattttctcagacgtccaaataaagaagtctattctattactagaagtaatttgcctggattataaaaatattttcccagtccagggcacataaacgactttaggcttttgatatgtgttcacataataattctttttggcaaatgaagtacaatgtttaataagagccatcagcattgtaagtggacaaaacataaaatccaagtgtttatcaaataaaaatttagtcggctgaagtggttcacacctgtaatcccagcactttgggaggccaaggcaggcaaattgcttgaacccaggagtttgataccagcctgggcaacatggcaaaacctgtctctacataacatacaaaacttagccaggtgtggtgaggcacgcttgtagtcccagctactaggaaggctgaggcgggaggatcacttgaacctgggaagcggaggttgcagtgagctgagataccaccactgcattccagcatgggtgacagagtaagaccctggctctaaataaataaataataaaaatcaggaaattccctttatgcaatagatagagtcaaggttcataacagaaagctcatcgtgtaaactcaggcaaactctgccatgctaaatgaaggagatggcataattcatcataaccactataatgatataaaaatccagactttaccccttgcctgtgtgtgacgtcagaattgccacagccagctatctgtatgggcggggctgccctggagatgcagggcaagcgccaggaacccctccgggtagctactaccttggaccccccccagtagtggagggcagtatggcagcgtgctaccccctggtggtggctatgggggtcctgcccctggagggccttatggaccaccagctggtagagggccctatggacacctcaatcctgggatgttcccctctggaactccaggaggaccaaatgatggtacagctccagggggcccctatggtcagccacctccaaattcctacggtgcccagcagcccaggcctcatggacagggtggctcccctcccaatatggatgaggcctactcctggttccagtcggtgactctgatcacagtggctttatctccatgaaggaggtgaagcaggctctggtcaactgcaactggtccttgttcaatgatgagacctgcctcatgatgataaacatgtttgacaagacctaatcaggccacataaatgtctacggcttctcagccctgtggaaattcatccagcagtggaagcagctcttccagcagttatgactgggacaactcaggctccattagctacacagagctgcagcaagctctgtcccaaatgggctacaacctgagcccccagttcacccagctactggtctccagctactgcccacgctctgtcaatcctgccagacagcttgattgcttcatccaggtgtgcacccagctgcagatgccgacagaggccttccgggagaaggacacagctgtacaaggcaacattcggctcagcttcaaggacgtcgtcaccatgacagctcggatgctatgacccaacccatctgtggagagtggagtgcaccagggacctttcctggcttcctagagtgacagaagtacgtggacctctctcttcttttcctgtccctctagaagaacattctcccttgcttgatgcaacactgttccaaaagagggttgagagtcctgcatcacagccaccaaatagtgaggaccagggctgaggccacacaggtaggggcctgatgaaggagaggatgaaagctgaatgtcccgacggccatgagcagttgagtggcacagcctggcaccagacgcaggagattctggtccttgtaatggagttagtgtccagtcagctgagctccaccctgatgccagtggcgagtgttcactggcctgttaccattagcacctgtgttccctcaccaggccatcctgtcacatgagcccattttctccaaagtggaatctgaccaagcatgagagagatttgcccctgggaccagtggcttggattccatcacacccataaatccttgggtattaacttctagctgcctggggctggccctgctcagacaaatctgytccctgggcatctttggccaggctactgcctccgcagctgggatccctcacttgcctgccacgctctg

SEQ ID NO: 686663 - DNA, 1346 bp, Homo sapiens
ggccatgttatatattctttaggggaggggatggcagagatgctttctacatctacacacatgctcccctttccctgcggcaccctggcagacactcctagcaccccacagggttctctgctattgagctttgggatcatcacagccatgttctaggcagccctgccaatggactggagctggcctgtgcaatttagcctattctccatcctccaggatccagaagctctgtagggaggaggtgggacagagtctgtgctgatcatagaaaactggagtcagaaatcgacgcctctcctttcctcccagaagatccacagtgctgcctttcttctctggcccacgacacatggacaatcaaggtgttcccttaaataagctcccgagccctgtaagagcctgtggagccctgtaacaccctcccatcatcacctccactgccaccccagaacttaccgaagagcccctsgtcagtcaatagctaccaaaacagggaccacttgcagatccagaagtcccaaggctttagatccctcaggctgaaaagacacgtacatgtgcctgcagttggaaggtagaaagagggagtgttcccagccccagaggaccatttgcctgctctgatctctttgctacccccatttccaccagactcctcagttacagaatgattgcaagctgtgaacccctggggaaaggcagaaatcatccaacccagaggatgtagctctgcctcccagatgccatgtgcctgtacttgacgcactgtggcatctcagctgccatggggctcagagctgctcaagtccttgaatgtgaatgctttcttctcagaagaaaatgtcagttatggggacttaatctgtgtctcacctgaatccccaggtcctggactgttaggctacagcagagaagttaggtgaggtggggaaaggaaagtagctcatggcatctcttctgtaaagagagatgacaccgcaggggcactccccagttggagagagtgaggacaaggcactcggtgggttgctgtgtcctggaatagccagaaatggagcagctgaacatgagcagcccctcccctggtacagagctggacatgtggctctggtgtgtttcgagcaggaggaaggacagtgggactatcccctgccctcctctggctctatgtgtccattaacacagcctaacaggtaacatctgaagtcttagcttcaacactagaccaggcatgtgggcaactaaatgtactgggtttaaaacaaaacagctattaagcctggtgtcttctgtacatttcagattgcttttttttcttttaatcctaaataggaaataatacttac

SEQ ID NO: 686664 - DNA, 1815 bp, Homo sapiens
  misc_feature 1323, 1326, 1424, 1425, 1426, 1427, 1428, 1429, 1430, 1431,1432, 1433, 1434, 1435, 1436, 1437, 1438, 1439, 1440, 1441,1442, 1443, 1444, 1445, 1446, 1447, 1448, 1449, 1450, 1451,1452, 1453, 1454, 1455, 1456, 1457, 1458, 1459, 1460: n = A,T,C or G
  misc_feature 1461, 1462, 1463, 1464, 1465, 1466, 1467, 1468, 1469, 1470,1471, 1472, 1473, 1474, 1475, 1476, 1477, 1478, 1479, 1480,1481, 1482, 1483, 1484, 1485, 1486, 1487, 1488, 1489, 1490,1491, 1492, 1493, 1494, 1495, 1496, 1497, 1498, 1499: n = A,T,C or G
  misc_feature 1500, 1501, 1502, 1503, 1504, 1505, 1506, 1507, 1508, 1509,1510, 1511, 1512, 1513, 1514, 1515, 1516, 1517, 1518, 1519,1520, 1521, 1522, 1523: n = A,T,C or G
cctggaaagtagtaaaactaaatgtgtatcttattgataagccatcaaaaatattataatatttcacctttctcataaaatacatgctaaaaaatgtattaggatattaactacaagtttacctctctagtgggatgagctatgaatccaaaacaagatgaatcctttggtcctttcaaaagtagcattgtagcatagaactgcagaaaaaaaaaaatawatatatatatatatggcagttttcataaataaggacttatcctcgagcctttcacacatgtctttagttctctttctagggttttaaagtagcataatttatttataatcccttaaagattgtaaagaaagaaagaaactgtataacagcatcaacatgcattaaacaaagctcattttttcattcctggaaacatgataaaaattaaaattactatgaaataatcatatttttctcccagaagtggggcagtgttttatttagctttgagttctcaaagttaaggctagtgcctggcatatcataagtgttttataaatgtttttaacctgtgttgtgccatgaggcccagtccaggaattcataccttgtagtattttaccacaaggcatattgctggaggaactgttttattgctctgagagttcagtattcagccattcccatgcctcccgcctatgtctcccatctagaggactgtgttggcaccttctggtcaacataccaactgaccaacacggcatatgactatatggcatatacacgaaatatgtagctacatgcctgtgttgttatttaaaggcacactctaataattatcaaatgactgtaaatgtactacacacgtggcttacaccaaaatatttgagataatgtcagtagcacattatattgattacaatgctttcagctgctaggaacagaaaggtttgtcttactttgttaaaacaatacgaagaaacattttcacatggtaagaagtcatgaggcagggtgggttcagggctggtaaattcagcagcccaatgatatttccaaggattctggttcttttcatgtttctgctctgcctcttcagtatatcagtctcatcctcagactaactccccaacccctgccaatggataattccaggaattaatagaacattcagagacagaagggaaagtccgagtttccttttaagatcacggaaaattttcccagaatccaccattcacacatccatgaaacttctccacaggtctcattggccagaagtgtgtcacatgcttttcctgaaccaatcattgtcaatggtgatgaaactgctattggtggtntanaagcatcagattaccacattcccacacctgccaagagcagaatatgtggccaggtggggaaagaagacacttcgacaaaatgagattttaccaatagnnnnnnnnnnnnnnnnnnnnnnnnnnnnnnnnnnnnnnnnnnnnnnnnnnnnnnnnnnnnnnnnnnnnnnnnnnnnnnnnnnnnnnnnnnnnnnnnnnnntacagtgtgaatcaaaaataaaacaaaaagaggatttgaaactaggctttcattattaggaaagtaaaaaggacttccaagaacacttggggaaacctatcaatatacaaagataaaaaagtcactgggtgacagagtaactggtctgtttccctacgggctgcaggagtgagctaataaggatacaaattattctgttgggctccaaaaaaaaaaaaaaaaagaaaagaaaactgtgaaggtataaaataactctaccagttagcactctgtagtaaatgatggaaaatcc

SEQ ID NO: 686665 - DNA, 1815 bp, Homo sapiens
  misc_feature 1323, 1326, 1424, 1425, 1426, 1427, 1428, 1429, 1430, 1431,1432, 1433, 1434, 1435, 1436, 1437, 1438, 1439, 1440, 1441,1442, 1443, 1444, 1445, 1446, 1447, 1448, 1449, 1450, 1451,1452, 1453, 1454, 1455, 1456, 1457, 1458, 1459, 1460: n = A,T,C or G
  misc_feature 1461, 1462, 1463, 1464, 1465, 1466, 1467, 1468, 1469, 1470,1471, 1472, 1473, 1474, 1475, 1476, 1477, 1478, 1479, 1480,1481, 1482, 1483, 1484, 1485, 1486, 1487, 1488, 1489, 1490,1491, 1492, 1493, 1494, 1495, 1496, 1497, 1498, 1499: n = A,T,C or G
  misc_feature 1500, 1501, 1502, 1503, 1504, 1505, 1506, 1507, 1508, 1509,1510, 1511, 1512, 1513, 1514, 1515, 1516, 1517, 1518, 1519,1520, 1521, 1522, 1523: n = A,T,C or G
cctggaaagtagtaaaactaaatgtgtatcttattgataagccatcaaaaatattataatatttcacctttctcataaaatacatgctaaaaaatgtattaggatattaactacaagtttacctctctagtgggatgagctatgaatccaaaacaagatgaatcctttggtcctttcaaaagtagcattgtagcatagaactgcagaaaaaaaaaaatatatatatatatatatggcagttttcataaataaggacttatcctcgagcctttcacacatgtctttagttctctttctagggttttaaagtagcataatttatttataatcccttaaagattgtaaagaaagaaagaaactgtataacagcatcaacatgcattaaacaaagctcattttttcattcctggaaacatgataaaaattaaaattactatgaaataatcatatttttctcccagaagtggggcagtgttttatttagctttgagttctcaaagttaaggctagtgcctggcatatcataagtgttttataaatgtttttaacctgtgttgtgccatgaggcccagtccaggaattcataccttgtagtattttaccacaaggcatattgctggaggaactgttttattgctctgagagttcagtattcagccattcccatgcctcccgcctatgtctcccatctagaggactgtgttggcaccttctggtcaacataccaactgaccaacacggcatatgactatatggcatatacacgaaatatgtagctacatgcctgtgttgttatttaaaggcacactctaataattatcaaatgactgtaaatgtactacacacgtggcttacaccaaaatatttgagataatgtcagtagcacattatattgattacaatgctttcagctgctaggaacagaaaggtttgtcttactttgttaaaacaatacgaagaaacattttcacatggtaagaagtcatgaggcagggtgggttcagggctggtaaattcagcagcccaatgatatttccaaggatkctggttcttttcatgtttctgctctgcctcttcagtatatcagtctcatcctcagactaactccccaacccctgccaatggataattccaggaattaatagaacattcagagacagaagggaaagtccgagtttccttttaagatcacggaaaattttcccagaatccaccattcacacatccatgaaacttctccacaggtctcattggccagaagtgtgtcacatgcttttcctgaaccaatcattgtcaatggtgatgaaactgctattggtggtntanaagcatcagattaccacattcccacacctgccaagagcagaatatgtggccaggtggggaaagaagacacttcgacaaaatgagattttaccaatagnnnnnnnnnnnnnnnnnnnnnnnnnnnnnnnnnnnnnnnnnnnnnnnnnnnnnnnnnnnnnnnnnnnnnnnnnnnnnnnnnnnnnnnnnnnnnnnnnnnntacagtgtgaatcaaaaataaaacaaaaagaggatttgaaactaggctttcattattaggaaagtaaaaaggacttccaagaacacttggggaaacctatcaatatacaaagataaaaaagtcactgggtgacagagtaactggtctgtttccctacgggctgcaggagtgagctaataaggatacaaattattctgttgggctccaaaaaaaaaaaaaaaaagaaaagaaaactgtgaaggtataaaataactctaccagttagcactctgtagtaaatgatggaaaatcc

SEQ ID NO: 686666 - DNA, 589 bp, Homo sapiens
caaaaggtgtgtatttgatctgtagaaatgtggaaagcatcataaatcacaataattacataccactaatytaaaatgatatagatgtaatcaattaagtggaaaaggctacctacctcacagcaggtgcttaggataaaccgataaataaaatgtatggttcttgccctcaaagaatttacaatatgaaatttatgatacgtgaaaacataaacagaagtataacaatgttgaaagagctggagagtccccttaatgagctaaaggcttctccagagacgttttggaaaaagcaatgatggtggggggtggaaggattagccagcaaaggacttaagggtgacggagagaaaagatgaacataaattcgtgttagcagtaaaagatactagataagcaggcaaaaggaagttaatatgtagtaatctaagagtcacaaggcccagaggtttcaagaataggaatttatagagcttgaaggtcaagttacaaggccaaagaagagggacaacctttctgtggtatttgctgatatccagaaaatgctacatttcttttttttttttttttttgagacggagtctcgctc

SEQ ID NO: 686667 - DNA, 589 bp, Homo sapiens
caaaaggtgtgtatttgatctgtagaaatgtggaaagcatcataaatcacaataattacataccactaatttaaaatgatatagatgtaatcaattaagtggaaaaggctacctacctcacagcaggtgcttaggataaaccgataaataaaatgtatggttcttgccctcaaagaatttacaatatgaaatttatgatacgtgaaaacataaacagaagtataacaatgttgaaagagctggaragtccccttaatgagctaaaggcttctccagagacgttttggaaaaagcaatgatggtggggggtggaaggattagccagcaaaggacttaagggtgacggagagaaaagatgaacataaattcgtgttagcagtaaaagatactagataagcaggcaaaaggaagttaatatgtagtaatctaagagtcacaaggcccagaggtttcaagaataggaatttatagagcttgaaggtcaagttacaaggccaaagaagagggacaacctttctgtggtatttgctgatatccagaaaatgctacatttcttttttttttttttttttgagacggagtctcgctc

SEQ ID NO: 686668 - DNA, 641 bp, Homo sapiens
attgtggtgttttcttttagctgttagtataaaacactgtgctaagccttttaaagcaaccatttgaagttggtactatttgttatcctcattttacaggaaacagaggcttagagagattaagtaacttgtcctcagccacatgcagcagtcagggttcaaacccagacttgctcttaaccagttttgtgtactgtattgcctttttaataaaaaagtgtycaccctctgaaaccttactattcaaagtacaccccctagaccagcaggactggaatcaccagagagctcattagaaaggcagaatcagccccactccaccccagacctactgaatcacaatatacattttaacaagatctgccaggtgactcttacgcacattaaagtctaagaagcatgatccaaaacagaatataaaaaaggcagattaacttgattagggaagacattccagagcacaaagaatatgaattgatatttatagaaggctaatttccacttttgtctgcagatggtgcaatgaattcaatgcttatatctacccaaaattctgatgctgaaacccttatccccagtgtgatagcatttggaggtggggtctttgggaggtaatgaggtcatgagggtggagcccctca

SEQ ID NO: 686669 - DNA, 641 bp, Homo sapiens
attgtggtgttttcttttagctgttagtataaaacactgtgctaagccttttaaagcaaccatttgaagttggtactatttgttatcctcattttacaggaaacagaggcttagagagattaagtaacttgtcctcagccacatgcagcagtcagggttcaaacccagacttgctcttaaccagttttgtgtactgtattgcctttttaataaaaaagtgttcaccctctgaaaccttactattcaaagtacaccccctagaccagcaggactggaatcaccagagagctyattagaaaggcagaatcagccccactccaccccagacctactgaatcacaatatacattttaacaagatctgccaggtgactcttacgcacattaaagtctaagaagcatgatccaaaacagaatataaaaaaggcagattaacttgattagggaagacattccagagcacaaagaatatgaattgatatttatagaaggctaatttccacttttgtctgcagatggtgcaatgaattcaatgcttatatctacccaaaattctgatgctgaaacccttatccccagtgtgatagcatttggaggtggggtctttgggaggtaatgaggtcatgagggtggagcccctca

SEQ ID NO: 686670 - DNA, 2142 bp, Homo sapiens
tagaacatacattttattcagtatacagttatttgctagcactattctctctttaatcttcttgttaaaaatgcatttagctgtttttccctgaacttctaacaagtttaagctattgaagcatccatggagtttttttttttaaattatataaaactacagttaattaggagataatcaacatccctattctaatatttttattcaggaacatgtttcttgtattcatttaagtgagctttattgtctctcagcaaaatttcatactttttttcacagagtcactgaactttcttgattaaagttattcttaggcatttttattgcaaataagtgggatattttctaacagaattgctggtagcatatttagctttaaattacaatctgtggactctgatttttcatcattgtcacagcctaatttcttcatgtgattacgaggcactcaataaataataaagatatgatttttgccttcctttagttaatgcttattaaaagggtagtgagttttgcttacacacaaaaaagtattcttcggaccaaattcatgttctgccttaagtttctcaagactagttctattacaataytgaattaagaggcagtagaggaaacgttggagaagggtagtttgtgcttctccttggcctccagttacttattctggaaaattctatcttagttctcccagtgagaagacaataactctccttcgctagaaatactacacaaatgtaggagagaaaggaaaaaacatatttgtttctcattatctcttttacatataccatcagtttgcatcagcagatgggtccacagcaatggagttgttcaggtaggccccacccttgactattaaaatattgacagtcaaacaataatgttacaatgtgaagtttattgaaaggataacaaaatgagcattttcattacaaattaaatgtcattttaaatgtaccacatcaaacttaatttgtcttgtttttatatattgaggtagttgtaattcaaagtattaatgccagtcagtaaagcatataccaattaaacttggatatttgcatacattctctgtaggtgtcagcattgctttgtaatagtcttatgcacagaactgtgttttcatcatgtcataggatgtaactttcatgttaaattctagttaaacaccagaagggcctctctaagtctataagacatctcctggattattctgtatttcttaatcacaaatgtgactgaatgattaatcagcttggaaaaaaatggatatttattgtctttctttaggcatggataagtactttcaaggttttacgtggcattctctggatattaaaataagatgctttgaaaatatacaatacagcatacatagaacctaattctatttggcatatttagaaacgacattcattatttattgtcgggagaacagttaacatagcattctatggagtgatttagattgcagacaccaccacatcactgttttcacagtttgaactaattatacacagactttttattggataaagttattaggattcaatctagggagtgcctatttaagaaggaaagacatatacaaatttatgttcacactaggagggtatctattcttggggcaattttctgattcagagacttagagatgaatgaaatcctaaagtagtagaatctgaatgctttgtgcatacgaacttgcacctgcaagcagtcctgctatggacagcctctgtcatgagacctgtattcattgtgtacatggctctcattctcatttttttttttttttttttgagatggagtctggctctgtcacccaggctggagtgcaatggcgcgatctcagctcgctcactgaaacctctgcttcccagattcaagcgactctcctgcctcagtcttccaagtagctgggattacaggcacatgctgccatgcctggctaatttttttttttttttgtatttttagtagagacgaggtttcactatgttggccaggctggtctcgaactcctgactctgtgatctgcctgcctccgcctcccaaagtgctaggattacaggcatgagctgctgcgcccagctatggctctcattctctacaggatggtggataatacaagca

SEQ ID NO: 686671 - DNA, 602 bp, Homo sapiens
tgatacatatggatatgtgctaagttaataagaaatgtaactatagttaacaatrcatattaaaatgtactaagaggctacatattaagtgtacaaatacaaacatattaaaaaactggtaaatatgagaattggtagatatgtttaattagcttgaatttatggtgattatttcagagtgtatgcatatatcaaaacatcaagttaaaccccttaaatatatataattttattggtaaattatctctcaataaagctgggagaaaagcatatacagtaatatcatttttcttatttatcatttttatttttgtttgtattgaatgttttattgggagataatacattttccttataattcacgtttatgaggattttcatttactacaaagtgctctctgtactctagttttatattaataggtcaatataaagctatgggtcatacaaagctttaacttaagctagaatcatgttcaaatccaaactctgatgcttagtggctagttcatctttctgagcctccctttactggtgtaggaaatggagaatgtaaccaaactctgttagttctggtattaaatgaaataggatcagatagg

SEQ ID NO: 686672 - DNA, 602 bp, Homo sapiens
tgatacatatggatatgtgctaagttaataagaaatgtaactatagttaacaatgcatattaaaatgtactaagaggctacatattaagtgtacaaatacaaacatattaaaaaactggtaaatatgagaattggtagatatgtttaattagcttgaatttatggtgattatttcagagtgtatgcatatatcaaaacatcaagttaaaccccttaaatatatataattttattggtaaattatctctcaataaagctgggagaaaagcatatacagtaatatcatttttcttatttatcatttttatttttgtttgtattgaatgttttattgggagataatacattttccttataattcrcgtttatgaggattttcatttactacaaagtgctctctgtactctagttttatattaataggtcaatataaagctatgggtcatacaaagctttaacttaagctagaatcatgttcaaatccaaactctgatgcttagtggctagttcatctttctgagcctccctttactggtgtaggaaatggagaatgtaaccaaactctgttagttctggtattaaatgaaataggatcagatagg

SEQ ID NO: 686673 - DNA, 1018 bp, Homo sapiens
ttgcttgatttgatgctggcagctgttttgccaagcctaaggataaagcagacactcccaagggctgcagaatagagataaagaaatctgagtccttgatgacaccatggaactgctctatcaaggaatcctgaaactcactctacctttttaagccagctatactttgttacttcagtgaaaaagcatcctgataygggaccctttacaaaagagctcattttctctcttttaaaattgtttgaatctatttttttaagagccttctgtctccacgaaaggttgtcaacaatcacttcttgctattctctaaaaggatataataatgtaataattggagttctggaataggacaataaatctgagctctcctacttactatctgtgacttgggggaaaattttaaactgtctgagctttaggatttttcttttttaaatcagcagcatctgggagaaattctgtattatcgctactctactgtcatttaattaacatctattaagtaaccactataagactttaatactgcaaagtactttacaatcctgagaagttgtcaaattcttgagggaaaggtatatgtttttaatctttatgttcccggtgcctacagtgggggggggctcaataactatttgaataatgagttaataaaataattaatgacatgatccagtacataatcaccatcaggttactaccaattttccagaaccatacccatgtatacaataaaactaatttttatgttagagactgattttcacatacaattatttgaaaagtcctcaagtaagatatctttcttaaaggcagacaagccttaagtatatattacccaaggtgatgttctcaaacagacaacataattgtccatttaaatctcacctgttaaaccagcaggatatgaacttggcaccactgaaaatgaggaagatgcacctccaaaaggcgttacccctgaggatcctccaaatggtgtcatggaaagactgctgaaattaactgctgttcc

SEQ ID NO: 686674 - DNA, 1018 bp, Homo sapiens
ttgcttgatttgatgctggcagctgttttgccaagcctaaggataaagcagacactcccaagggctgcagaatagagataaagaaatctgagtccttgatgacaccatggaactgctctatcaaggaatcctgaaactcactctacctttttaagccagctatactttgttacttcagtgaaaaagcatcctgatacgggaccctttacaaaagagctcattttctctcttttaaaattgtttgaatctatttttttaagagccttctgtctccacgaaaggttgtcaacaatcacttcttgctattctctaaaaggatataataatgtaataattggagttctggaataggacaataaatctgagctctcctacttactatctgtgacttgggggaaaattttaaactgtctgagcttwaggatttttcttttttaaatcagcagcatctgggagaaattctgtattatcgctactctactgtcatttaattaacatctattaagtaaccactataagactttaatactgcaaagtactttacaatcctgagaagttgtcaaattcttgagggaaaggtatatgtttttaatctttatgttcccggtgcctacagtgggggggggctcaataactatttgaataatgagttaataaaataattaatgacatgatccagtacataatcaccatcaggttactaccaattttccagaaccatacccatgtatacaataaaactaatttttatgttagagactgattttcacatacaattatttgaaaagtcctcaagtaagatatctttcttaaaggcagacaagccttaagtatatattacccaaggtgatgttctcaaacagacaacataattgtccatttaaatctcacctgttaaaccagcaggatatgaacttggcaccactgaaaatgaggaagatgcacctccaaaaggcgttacccctgaggatcctccaaatggtgtcatggaaagactgctgaaattaactgctgttcc

SEQ ID NO: 686675 - DNA, 2310 bp, Homo sapiens
acgggaaggctgagaccgccaccgcgacattcgcatgtttggagagactgcctcacactcggatgcactaatgcagtgcacgacattctcagtggtgaaattttccacagctggggctgtaggaggacttatgttgtggtttaagagcttcctacagcccttgtaaacctatggtggatctttccaaacataaagattttttgttgttgttctggagagctatgcagaacttagaaaatgtttgataaaaagaatgagctaaatgaggaagacgggaagacaaagagagaaaatgccaacgcttaatttaaagaaggttagtacagtttactctacaattttactatacaattaggcttttacctaatatgttggaatatctagccaactaaagatcaggtaagaaatggaaaaatacttgccaattataatcaaatcattttcctcctgtgactaagctatagactagtagttaggcatcttcgtaaactacagggtgtcccaaaactgttatcttaatttttcttcctttttgctatctacaggtagcataaactcagtcttcttgagagtgagtgattccgataaagttaatctttccttagatgggaagcaaaaataataacatcaataarcatttatgagttagcatttgctagcataacagccctatgaagtgtgtatgactatcatgctcattctttttgatggaaaggtgaggtctacagagagtaagtaacttgctcaggggttcactaataagacacagacctgggcgatggctcctgtgtccctgctcacaggttgcatgggctgaagcctggatatgccttctctttccttgacattgtacacattgagaattgactcagttgcataatatacagatgcaaagaatctcaggaaaaatctatgcaaattccaggagggttaaggaacttgcctagtgtcccatcctggtggtactagaagccaggtgttctgaatggcaacacaatcccttatttaccacatttgaaaaaaatactcatattcactttcagtgtttttgtactggcccacccaaaatatctagatccatgacatacaaaacaatttagtgggcagaaagcattatgactttcaaaatgcccagacatttaacaaactaaggaaaagtagactatggaaaatttcacacaaataggttctattaatacttccatattttcagtaatttatacttccaaaattagatttttttgctttctggaaaccttggtgaattgtcatcataggacctacttagggaagtgatattcactcaatatgatgtttaatagaagattgccctatagatcattaatagataatgaatgtgaacaaattaaaatacaataaattaaaatcaatgtatgtgataatacagaagccttcctaggatccttcagtatctcacagatgacaggcaatgggggaatattttgaaacagtagcagatctctctccccaatacttcaagttctcactttgtctttcccttctccaccagcgaggctgttctctgagtattgatttagttgaggtgaaagacccgagagtctcaaatgcctaggcttttagcaggaggaagaaaggaggattgcaactaagacaaaaggtttggagcttgatgtctgttcaaacaaaaatgggtagcatttgtctaatgctgcttgccaagacgctttgcagggatcatctcctttaatgctcacagtaaccttcaggtgtaaatattatcgttttccccatttttaaccgcaaggtgacggaggcggagggagcatcagtaacttgcccaaggccgcttgtctgcaaggaggacctggcagctcggccagtccatctccgctgtcggagccgcattcagccctttgaacttctcaccttgaccatcacattaagcatctagttctctccctacaccagcccctgtctctccattgcttcctccatattgctaaacactttacgtttctaaaacttataaaatgaccatgctcggtgatgtcttaaaactcttctaggagcctgtgaacagctccgggctgacctccagatcctctgccaagcacacaggcccttcctgatctgtttaacccaactatccctgcaacacagtggccagttctcacccagtagccaccttctcttcacccacagtggtggctgtgaaatgtgtcaacctgcccaggctcaactgtgtagcgcattccctttcttctgcgtttcccatggggtaggagtaggggcggggagggaggtagctgcaggctgctgctcagctgt

SEQ ID NO: 686676 - DNA, 658 bp, Homo sapiens
gacaaagagatttgtgccttatgaaaaaaactcaatcagatttaaaaatatataaaacattcttatctataaaaacagaatagatggatagaattaaactctaattatagacattgtcatacaaagaaacatgcaaaattagaaaactagaacaaatgagcattttgtgttttaatttttacctagaagaagaattgaaaaagtatacttatttttaaatgagaaaaaaaaacactaataaaagtcaggaaaaggaaaaaacaaacatacctgacttttctcattgtgttctattttagatcctaagcacaagttatttacttttttagacttgggtgtggagattaaagagaagggaccgtaatatataagagacagctcttgggatttatcatcaatcaycttggggtcatattctgatcaatcatgtaatctcagataaattacgtcccatgtctaaatttttgttttccataaatataagatggagataatgaacattcttgtcctatgtgcttcctagggttgagtctatgataaaatgtggtaatgtatgtagcaattctttataaattactaggcaaataataattatattatcattgtgttaattctgagtttggaaggggatcctccaattctctgcaaatactgatgc

SEQ ID NO: 686677 - DNA, 658 bp, Homo sapiens
gacaaagagatttgtgccttatgaaaaaaactcaatcagatttaaaaatatataaaacattcttatctataaaaacagaatagatggatagaattaaactctaattatagacattgtcatacaaagaaacatgcaaaattagaaaactagaacaaatgagcattttgtgttttaatttttacctagaagaagaattgaaaaagtatacttatttttaaatgagaaaaaaaaacactaataaaagtcaggaaaaggaaaaaacaaacatacctgacttttctcattgtgttctattttagatcctaagcacaagttatttacttttttagacttgggtgtggagattaaagagaagggaccgtaatatataagagacagctcttgggatttatcatcaatcaccttggggtcatattctgatcaatcatgtaatctcagataaattacgtcccatgtctaaatttttgttttccataaatataagatggagataatgaacattcttgtcctatrtgcttcctagggttgagtctatgataaaatgtggtaatgtatgtagcaattctttataaattactaggcaaataataattatattatcattgtgttaattctgagtttggaaggggatcctccaattctctgcaaatactgatgc

SEQ ID NO: 686678 - DNA, 619 bp, Homo sapiens
gctatgataattccttcatgtaatttccttcataaagtaactaagtttaaaatacatgcatacttttttaaaaagcacataaactttctctcttgtccttactcatcactttagtatttttatatatcctcaagttagttaaatatgtccaaggcctttaattgccagaagaaattgtgttatttgatatgcattctgttgcaaatccctgaatagactctataatctaagtatgaatcgtaagagataatgcttcaggccttgtattttttcttttttggtatagaaatttttttacctgaacatccagtcctactcataacttcaaatgacttctttgagacagaatttctttaaggaaactttagacatttccattttaatagacagataaagcttgtagccttcaatctctaaagtcatcagcttgaatgaaagtcattcaattatatcaactttttgagagattttcagctgtggaaaaatagytctgcttctctcaataaactgaaattgcaggagctagttatgcttcaggtaaatgtgacatcttccaaggtatgcacaaggtacacacctggcttcatgcctgtggtgtgtgtgattatatgggtgagta

SEQ ID NO: 686679 - DNA, 1227 bp, Homo sapiens
aaaaatttgaacatatatgtatttagaatctcagaatgagaagagcaataaaaaagaagaaaaaatatttgaagatatgatagctgrtaatgttttaaagtatatttcaaagacatcaatctacagattcaaaaagaaactgcaaatccaagtaataaaattacagtaaaacaaatgtctaggcatatcataataataaaacagaacaagacaagaaaaaatatacaaagaaaccagaaaaaaaattagagtcaaataagtgataataatgcaccttatttctcaatagataaataatgtaatccagattatgatggatagactgatattttttaaatagtgaaagaaaagaagcttaacctagatttttacactgtgaaaacactcttcaaatatgacgctaaagtgaaatcattttgggacacaaaaactaaggacattcatcattaatagacctgaagtaaaagaatactttgagacaggcatgcacattataaagtgtagggtaatcattaaagaaatagtgtagtggtcaagggaaacttccccttcaccttcagaaggttcactgaaaaattaactcacaaatggcagattaactggagagaaagactacaaattgtattaatgtgtgcaccaggagaactagagttataactcaccccataacagggtttggaagcctcgataccatcctggcaaaataggttatgggagtgggaggagaaatctgttaaagggattgctagggagaattaatggatcagaaaacagagattaccttgcacattattttgtgaaggctctgttcagatgtggttacattcttggttctacagggtggaggagaataaaacaattgttctccttaggggatctagacttcaggcagataaaggaactgaataacttcatcttgtgctttgggagagatggtggagcatgaagatcagaaacaacctttaggcttcttgagttcagcatatcaacatgccatattttggggcaatttttttctgagacccaacaatagtaaaagaataaaaataaatatcttaataagtgtgaatgaaacaaaaatagttgattaacttgaatacttgaaattagcaaaacttgaggttagggcacagtgctccagatggccaagtctgcccaagactttagaaactaactgcaaatttgaaggttttccaaatccacagtcagatttaattatctactata

SEQ ID NO: 686680 - DNA, 1227 bp, Homo sapiens
aaaaatttgaacatatatgtatttagaatctcagaatgagaagagcaataaaaaagaagaaaaaatatttgaagatatgatagctgataatgttttaaagtatatttcaaagacatcaatctacagattcaaaaagaaactgcaaatccaagtaataaaattacagtaaaacaaatgtctaggcatatcataataataaaacagaacaagacaagaaaaaatatacaaagaaaccagaaaaaaaattagagtcaaataagtgataataatgcaccttatttctcaatagataaataatgtaatccagattatgatggatagactgatattttttaaatagtgaaagaaaagaagcttaacctagatttttacactgtgaaaacactcttcaaatatgacgctaaagtgaaatcattttgggacacaaaaactaaggacattcatcattaatagacctgaagtaaaagaatactttgagacaggcatgcacattataaagtgtagggtaatcattaaagaaatagtgtagtggtcaagggaaacttccccttcaccttcagaaggttcactgaaaaattaactcacaaatggcagattaactggagagaaagactacaaattgtattaatgtgtgcaccaggagaactagagttataactcaccccataacagggtttggaagcctcgataccatcctggcaaaataggttatgggagtgggaggagaaatctgttaaagggattgctagggagaattaatggatcagaaaacagagattaccttgcacattattttgtgaaggctctgttcagatgtggttacattcttggttctacagggtggaggagaataaaacaattgttctccttaggggatctagacttcaggcagataaaggaactgaataacttcatcttgtgctttgggagagatggtggagcatgaagaycagaaacaacctttaggcttcttgagttcagcatatcaacatgccatattttggggcaatttttttctgagacccaacaatagtaaaagaataaaaataaatatcttaataagtgtgaatgaaacaaaaatagttgattaacttgaatacttgaaattagcaaaacttgaggttagggcacagtgctccagatggccaagtctgcccaagactttagaaactaactgcaaatttgaaggttttccaaatccacagtcagatttaattatctactata

SEQ ID NO: 686681 - DNA, 2346 bp, Homo sapiens
tgaccacgagatacccctggagtctctgggaatctgctgtggttctgggggctgcccgattcacaaatcattcattgctcaattaaactcttataaatttaattcagctgaagtttttcttttatcaccatcaaagattattctacaatagatcataggaaaatctagcagaycactctgacttggctgtttagtctcctcaactcaggaatatagttccaaggacctggtgttgtgtatccgctttcttattttctatctatttattcaaatctagtcttgtcttttgtcaatatagttctaaaatcctgtataagccatgaggtggtcacagaattaggtctagaaagattttgaggagaggtagaactttttttctcttctggtaacagggtagatccttgattcctgaactgctgcttcttagattaacagtatatgagtcaggaagctcatgattctggccttttctgatgtgatcaattccccactctattaaattacagataactttgagtacacttctgtgagaaactggactgtcatggagagctatattgactcacttgtttctttgatctcaggttgatcttttgcattgctttcttggctgttcagtagtaaatggaaataaacacaaccttaaacatagcccaagtcatcactgtagacaaaactttaggtcaattctcatgccctcacatttagtttcctattctaaacttatattttctttcaatattgctacatagttttacataggcaccttctaccttatccaatggcagtcatcttccaagcccactctgtacctgtctttgggctttgtgttgcaagagaaatataaaaaatctttctttaaacctctgcaagttggattttctattacttctaacagaatacattccttagttgattcactcatacaatcagaatcctggaagataggactattccagaagtggctaattcagttcaacaaagtcaacagaaattcaacaaagttgaattcaacaaagtcatcagaaattgaggttcaacaaagtcatcagaaattgagggtcttgccatttttctacttcatagttgcttgatgcttgtggcagcttcagacatcatatcctttcatactaatgtcaagagagagggaaaataaagaaatgtttccgtcctggtcttttttaagagaagaaaatgtttttgaagttcctcagcctacttcttatgtctcatcagacagaatttggtcagtgcccacaccaaaataaatgtttgccaagggggataaataaccatggctggctctggccaatcaggagtcactgctggggatggagatgggtcctgtcttcccagaaggaaatattaggttggtgcaaaagtaattgtggttttgtaactgcccagtgagatcaccttgaccacggcctagacagagccgatttgtcaagacaagggaattgcaatggtgaaagaataattcacgcaaagccagctgtgcgggagactggagttttattattactcaaatcagtctatacgagcattcggacattagagtctttagggataatttggtaggtatgggctccaaaagtgggaagtgctgattggtcaggttgaagataaatcataggggatcgaagtaagttcctcttgctgactttggggtgggatcacagaactggttgagccagattcacagtctgagtggtgtcatctgctgcagggtctgcaaaatatttcaagcactgatcttaggttttacaacagtgattttagtcccaggagcaacttggggaggttcagactctttcagtcagaggctgcatagcccctaaaccatgatacctaatcttgtagctgatttgttagtcctacaaaggcagactggtccccaggcaagaaggggtttttcaggaaatggctattatccattttgtttcagagtttaaactataagctaaattccttcccatggccagttcagcctacacccacgaatgaacaaggacggtttagaggttcgaaggaagatggggtcggttaggtctgatctctctccctgacataatttcctcagttatgatttttttcaaaagtggtttgtttttgcctttttttaattgcaaagacctcaattacttttgcaccaatgtaatagctacttggaggccaattaacaaaatcaagtttctgttagaaggaagaggtggggaaatggataaaggctgttggcatagcaactgacagtgtctagtggtgaaatactgctggcttctttgacctgagtcactttcatgggttcttacaccacttaggagagaaagttcctcagtgatatat

SEQ ID NO: 686682 - DNA, 2346 bp, Homo sapiens
tgaccacgagatacccctggagtctctgggaatctgctgtggttctgggggctgcccgattcacaaatcattcattgctcaattaaactcttataaatttaattcagctgaagtttttcttttatcaccatcaaagattattctacaatagatcataggaaaatctagcagatcactctgacttggctgtttagtctcctcaactcaggaatatagttccaaggaccwggtgttgtgtatccgctttcttattttctatctatttattcaaatctagtcttgtcttttgtcaatatagttctaaaatcctgtataagccatgaggtggtcacagaattaggtctagaaagattttgaggagaggtagaactttttttctcttctggtaacagggtagatccttgattcctgaactgctgcttcttagattaacagtatatgagtcaggaagctcatgattctggccttttctgatgtgatcaattccccactctattaaattacagataactttgagtacacttctgtgagaaactggactgtcatggagagctatattgactcacttgtttctttgatctcaggttgatcttttgcattgctttcttggctgttcagtagtaaatggaaataaacacaaccttaaacatagcccaagtcatcactgtagacaaaactttaggtcaattctcatgccctcacatttagtttcctattctaaacttatattttctttcaatattgctacatagttttacataggcaccttctaccttatccaatggcagtcatcttccaagcccactctgtacctgtctttgggctttgtgttgcaagagaaatataaaaaatctttctttaaacctctgcaagttggattttctattacttctaacagaatacattccttagttgattcactcatacaatcagaatcctggaagataggactattccagaagtggctaattcagttcaacaaagtcaacagaaattcaacaaagttgaattcaacaaagtcatcagaaattgaggttcaacaaagtcatcagaaattgagggtcttgccatttttctacttcatagttgcttgatgcttgtggcagcttcagacatcatatcctttcatactaatgtcaagagagagggaaaataaagaaatgtttccgtcctggtcttttttaagagaagaaaatgtttttgaagttcctcagcctacttcttatgtctcatcagacagaatttggtcagtgcccacaccaaaataaatgtttgccaagggggataaataaccatggctggctctggccaatcaggagtcactgctggggatggagatgggtcctgtcttcccagaaggaaatattaggttggtgcaaaagtaattgtggttttgtaactgcccagtgagatcaccttgaccacggcctagacagagccgatttgtcaagacaagggaattgcaatggtgaaagaataattcacgcaaagccagctgtgcgggagactggagttttattattactcaaatcagtctatacgagcattcggacattagagtctttagggataatttggtaggtatgggctccaaaagtgggaagtgctgattggtcaggttgaagataaatcataggggatcgaagtaagttcctcttgctgactttggggtgggatcacagaactggttgagccagattcacagtctgagtggtgtcatctgctgcagggtctgcaaaatatttcaagcactgatcttaggttttacaacagtgattttagtcccaggagcaacttggggaggttcagactctttcagtcagaggctgcatagcccctaaaccatgatacctaatcttgtagctgatttgttagtcctacaaaggcagactggtccccaggcaagaaggggtttttcaggaaatggctattatccattttgtttcagagtttaaactataagctaaattccttcccatggccagttcagcctacacccacgaatgaacaaggacggtttagaggttcgaaggaagatggggtcggttaggtctgatctctctccctgacataatttcctcagttatgatttttttcaaaagtggtttgtttttgcctttttttaattgcaaagacctcaattacttttgcaccaatgtaatagctacttggaggccaattaacaaaatcaagtttctgttagaaggaagaggtggggaaatggataaaggctgttggcatagcaactgacagtgtctagtggtgaaatactgctggcttctttgacctgagtcactttcatgggttcttacaccacttaggagagaaagttcctcagtgatatat

SEQ ID NO: 686683 - DNA, 2346 bp, Homo sapiens
tgaccacgagatacccctggagtctctgggaatctgctgtggttctgggggctgcccgattcacaaatcattcattgctcaattaaactcttataaatttaattcagctgaagtttttcttttatcaccatcaaagattattctacaatagatcataggaaaatctagcagatcactctgacttggctgtttagtctcctcaactcaggaatatagttccaaggacctggtgttgtgyatccgctttcttattttctatctatttattcaaatctagtcttgtcttttgtcaatatagttctaaaatcctgtataagccatgaggtggtcacagaattaggtctagaaagattttgaggagaggtagaactttttttctcttctggtaacagggtagatccttgattcctgaactgctgcttcttagattaacagtatatgagtcaggaagctcatgattctggccttttctgatgtgatcaattccccactctattaaattacagataactttgagtacacttctgtgagaaactggactgtcatggagagctatattgactcacttgtttctttgatctcaggttgatcttttgcattgctttcttggctgttcagtagtaaatggaaataaacacaaccttaaacatagcccaagtcatcactgtagacaaaactttaggtcaattctcatgccctcacatttagtttcctattctaaacttatattttctttcaatattgctacatagttttacataggcaccttctaccttatccaatggcagtcatcttccaagcccactctgtacctgtctttgggctttgtgttgcaagagaaatataaaaaatctttctttaaacctctgcaagttggattttctattacttctaacagaatacattccttagttgattcactcatacaatcagaatcctggaagataggactattccagaagtggctaattcagttcaacaaagtcaacagaaattcaacaaagttgaattcaacaaagtcatcagaaattgaggttcaacaaagtcatcagaaattgagggtcttgccatttttctacttcatagttgcttgatgcttgtggcagcttcagacatcatatcctttcatactaatgtcaagagagagggaaaataaagaaatgtttccgtcctggtcttttttaagagaagaaaatgtttttgaagttcctcagcctacttcttatgtctcatcagacagaatttggtcagtgcccacaccaaaataaatgtttgccaagggggataaataaccatggctggctctggccaatcaggagtcactgctggggatggagatgggtcctgtcttcccagaaggaaatattaggttggtgcaaaagtaattgtggttttgtaactgcccagtgagatcaccttgaccacggcctagacagagccgatttgtcaagacaagggaattgcaatggtgaaagaataattcacgcaaagccagctgtgcgggagactggagttttattattactcaaatcagtctatacgagcattcggacattagagtctttagggataatttggtaggtatgggctccaaaagtgggaagtgctgattggtcaggttgaagataaatcataggggatcgaagtaagttcctcttgctgactttggggtgggatcacagaactggttgagccagattcacagtctgagtggtgtcatctgctgcagggtctgcaaaatatttcaagcactgatcttaggttttacaacagtgattttagtcccaggagcaacttggggaggttcagactctttcagtcagaggctgcatagcccctaaaccatgatacctaatcttgtagctgatttgttagtcctacaaaggcagactggtccccaggcaagaaggggtttttcaggaaatggctattatccattttgtttcagagtttaaactataagctaaattccttcccatggccagttcagcctacacccacgaatgaacaaggacggtttagaggttcgaaggaagatggggtcggttaggtctgatctctctccctgacataatttcctcagttatgatttttttcaaaagtggtttgtttttgcctttttttaattgcaaagacctcaattacttttgcaccaatgtaatagctacttggaggccaattaacaaaatcaagtttctgttagaaggaagaggtggggaaatggataaaggctgttggcatagcaactgacagtgtctagtggtgaaatactgctggcttctttgacctgagtcactttcatgggttcttacaccacttaggagagaaagttcctcagtgatatat

SEQ ID NO: 686684 - DNA, 2346 bp, Homo sapiens
tgaccacgagatacccctggagtctctgggaatctgctgtggttctgggggctgcccgattcacaaatcattcattgctcaattaaactcttataaatttaattcagctgaagtttttcttttatcaccatcaaagattattctacaatagatcataggaaaatctagcagatcactctgacttggctgtttagtctcctcaactcaggaatatagttccaaggacctggtgttgtgtatccgctttcttattttctatctatttattcaaatctagtcttgtcttttgtcaayatagttctaaaatcctgtataagccatgaggtggtcacagaattaggtctagaaagattttgaggagaggtagaactttttttctcttctggtaacagggtagatccttgattcctgaactgctgcttcttagattaacagtatatgagtcaggaagctcatgattctggccttttctgatgtgatcaattccccactctattaaattacagataactttgagtacacttctgtgagaaactggactgtcatggagagctatattgactcacttgtttctttgatctcaggttgatcttttgcattgctttcttggctgttcagtagtaaatggaaataaacacaaccttaaacatagcccaagtcatcactgtagacaaaactttaggtcaattctcatgccctcacatttagtttcctattctaaacttatattttctttcaatattgctacatagttttacataggcaccttctaccttatccaatggcagtcatcttccaagcccactctgtacctgtctttgggctttgtgttgcaagagaaatataaaaaatctttctttaaacctctgcaagttggattttctattacttctaacagaatacattccttagttgattcactcatacaatcagaatcctggaagataggactattccagaagtggctaattcagttcaacaaagtcaacagaaattcaacaaagttgaattcaacaaagtcatcagaaattgaggttcaacaaagtcatcagaaattgagggtcttgccatttttctacttcatagttgcttgatgcttgtggcagcttcagacatcatatcctttcatactaatgtcaagagagagggaaaataaagaaatgtttccgtcctggtcttttttaagagaagaaaatgtttttgaagttcctcagcctacttcttatgtctcatcagacagaatttggtcagtgcccacaccaaaataaatgtttgccaagggggataaataaccatggctggctctggccaatcaggagtcactgctggggatggagatgggtcctgtcttcccagaaggaaatattaggttggtgcaaaagtaattgtggttttgtaactgcccagtgagatcaccttgaccacggcctagacagagccgatttgtcaagacaagggaattgcaatggtgaaagaataattcacgcaaagccagctgtgcgggagactggagttttattattactcaaatcagtctatacgagcattcggacattagagtctttagggataatttggtaggtatgggctccaaaagtgggaagtgctgattggtcaggttgaagataaatcataggggatcgaagtaagttcctcttgctgactttggggtgggatcacagaactggttgagccagattcacagtctgagtggtgtcatctgctgcagggtctgcaaaatatttcaagcactgatcttaggttttacaacagtgattttagtcccaggagcaacttggggaggttcagactctttcagtcagaggctgcatagcccctaaaccatgatacctaatcttgtagctgatttgttagtcctacaaaggcagactggtccccaggcaagaaggggtttttcaggaaatggctattatccattttgtttcagagtttaaactataagctaaattccttcccatggccagttcagcctacacccacgaatgaacaaggacggtttagaggttcgaaggaagatggggtcggttaggtctgatctctctccctgacataatttcctcagttatgatttttttcaaaagtggtttgtttttgcctttttttaattgcaaagacctcaattacttttgcaccaatgtaatagctacttggaggccaattaacaaaatcaagtttctgttagaaggaagaggtggggaaatggataaaggctgttggcatagcaactgacagtgtctagtggtgaaatactgctggcttctttgacctgagtcactttcatgggttcttacaccacttaggagagaaagttcctcagtgatatat

SEQ ID NO: 686685 - DNA, 801 bp, Homo sapiens
tttgctgtatccatgctggctcagtattcytactgatgcattttatggcagggatatagggtttttttttaacctctgcatatgataaccaaatcccagaaatgccaattatacaaaagcaaagcatatcattcattcctcaatagaacgtctgcagaaagaaagtggccaaggactctggggtcagcttccctattttctttaggctttctcaagatacatattgtcttttctatgtgttgaacggtgagcaatactgagcatactctgagcattttataagcatggaactgttccttctttccaaataaaaggccatgtactctgtgcctcattaaagaggcaggttagaaacagcatagactaggagtcaggaaaactggttctaaaaattccagcttttctgtgatcaagctatcacaccaaggctctagatctaattaccagttttcagagggagggaggaagacaggtacatgttaaatgacgccacagaaagcacttagaaaaatctcgaattcagaaaactctacaagatgaatgagttggcttcttcaccaaataaattgtaaagagaaaaaaagagataaagagaatctactgattaagagagacttaacagacatacgacaagcaaatgtattgagaaacttgcttggtttcttgtttgattcaaacaaatcaaaatttaaaaatcattttgaggttgagtgtgatggctcatgcctataatcccagcactttgggaggctgaagtgtgtggatcacctgaggtcaggagttcaagactagcctgaccaa

SEQ ID NO: 686686 - DNA, 635 bp, Homo sapiens
tgcattctttatagttatttttattctctattattgggaaagattattttctgtatttaccaatcagcttggtaaaccttaaatttaaaaartatgtatgtaataatacattgtttagctgcttgcatttctcatgtcaattttgcaataaaattgttttctgcttacaaaatctgtcaaattcaaagaagctgttaacatacctatcacaacatattatttacactaataattatctctgtctgtgcaattccccactctacacatactaatgcatttaagtcaagtttattatgatagtgtttaagatttatttaatgcctaaaattatatttttatgcataaacatttcagtgttaaatgattaattaggtcagcaaaatattttaaattgttgaactatatttgtaagtgtgaatgcatatttaattagaaaattacatttaataagttaataaaccaaattctacttaatcatattttaacaattacaatccccccccccccttttttttttttgagatggagttttgctcttgtcacccaggctggagtgcaatggcgctatcttggctcactgcaacctccgccttctgcgttcaagtgattctcctgcctcagcctcccaggtagct

SEQ ID NO: 686687 - DNA, 635 bp, Homo sapiens
tgcattctttatagttatttttattctctattattgggaaagattattttctgtatttaccaatcagcttggtaaaccttaaatttaaaaaatatgtatgtaataatacattgtttagctgcttgcatttctcatgtcaattttgcaataaaattgttttctgcttacaaaatctgtcaaattcaaagaagctgttaacatacctatcacaacatattatttacactaataattatctctgtctgtgcaattccccactctacacatactaatgcatttaagtcaagtttattatgatagtgtttaagatttatttaatgcctaaaattatatttttatgcrtaaacatttcagtgttaaatgattaattaggtcagcaaaatattttaaattgttgaactatatttgtaagtgtgaatgcatatttaattagaaaattacatttaataagttaataaaccaaattctacttaatcatattttaacaattacaatccccccccccccttttttttttttgagatggagttttgctcttgtcacccaggctggagtgcaatggcgctatcttggctcactgcaacctccgccttctgcgttcaagtgattctcctgcctcagcctcccaggtagct

SEQ ID NO: 686688 - DNA, 1152 bp, Homo sapiens
atagtatggatctatttattttaattagatattgaaaaaatgtcaaagtcatcataaaaatgaggcagtcacacagaagcattaaagtaaggattcctgctcagaaaaaggacgtctaaagagaccaggtcctctgttgcaccatcaaacgagaacttgcctccagcctctccgtagagcccctcttgcactattaaaccactctactattttctcctatggctacctgtacactgcgctctttcttacactgtttcttctacctggagtgttccacctccgagtagcaaaatgctatgtacctttcaaggcccactacaaaaatgagctcatttttctgaaatgcaaaatcaatatgaaattattataaaagctaaacaaaaagaaacascaaggatcaaattaataagtaccctttttccctctggtcctacaatctgatataaccactgtaaagctgaacgctgctgacttcgcggagatttccctgatggcttcccaagcctgtgccatctccttccctgcagctcagtataccattcctcttgtgtttactattttgccatccttataatttccttggcaacaaggattgtttctttacttctaacttaacagcatgcgacatattccttaaatactaagtggagtgagtaaaacataatagattctcaacgaatatttattgaatacattaataaattactggatatgttcatttaatatttaatgtgctattatgcccatgaaacattaaatcgcccccatgcaaagtgatgaacttaccatcacatcttggaaaagggtagttccagtttctgttgatcccatgctgacaagtgaggacaggatggcctattagaatgtacccaggataacactcgaaagatactgattgccccacgctgtaatccgagttgatcatgtacccattctgaaatgggggtggatctggacagttctgtaattcataggctgaaagaaacaaacagacaaaataaagcttatatttgtgaggttaaattacttcggaatttgcaggagtgtcatcacatgtgactgcttgagatgaagttgttggataagtttaataaggtatattttctaagtagtcagttgccatccagaccaatataattattattagtagta

SEQ ID NO: 686689 - DNA, 1152 bp, Homo sapiens
atagtatggatctatttattttaattagatattgaaaaaatgtcaaagtcatcataaaaatgaggcagtcacacagaagcattaaagtaaggattcctgctcagaaaaaggacgtctaaagagaccaggtcctctgttgcaccatcaaacgagaacttgcctccagcctctccgtagagcccctcttgcactattaaaccactctactattttctcctatggctacctgtacactgcgctctttcttacactgtttcttctacctggagtgttccacctccgagtagcaaaatgctatgtacctttcaaggcccactacaaaaatgagctcatttttctgaaatgcaaaatcaatatgaaattattataaaagctaaacaaaaagaaacaccaaggatcaaattaataagtaccctttttccctctggtcctacaatctgatataaccactgtaaagctgaacgctgctgacttcgcggagatttccctgatggcttcccaagcctgtgccatctccttccctgcagctcagtataccattcctcttgtgtttactattttgccatccttataatttccttggcaacaaggattgtttctttacttctaacttaacagcatgcgacatattccttaaatactaagtrgagtgagtaaaacataatagattctcaacgaatatttattgaatacattaataaattactggatatgttcatttaatatttaatgtgctattatgcccatgaaacattaaatcgcccccatgcaaagtgatgaacttaccatcacatcttggaaaagggtagttccagtttctgttgatcccatgctgacaagtgaggacaggatggcctattagaatgtacccaggataacactcgaaagatactgattgccccacgctgtaatccgagttgatcatgtacccattctgaaatgggggtggatctggacagttctgtaattcataggctgaaagaaacaaacagacaaaataaagcttatatttgtgaggttaaattacttcggaatttgcaggagtgtcatcacatgtgactgcttgagatgaagttgttggataagtttaataaggtatattttctaagtagtcagttgccatccagaccaatataattattattagtagta

SEQ ID NO: 686690 - DNA, 1152 bp, Homo sapiens
atagtatggatctatttattttaattagatattgaaaaaatgtcaaagtcatcataaaaatgaggcagtcacacagaagcattaaagtaaggattcctgctcagaaaaaggacgtctaaagagaccaggtcctctgttgcaccatcaaacgagaacttgcctccagcctctccgtagagcccctcttgcactattaaaccactctactattttctcctatggctacctgtacactgcgctctttcttacactgtttcttctacctggagtgttccacctccgagtagcaaaatgctatgtacctttcaaggcccactacaaaaatgagctcatttttctgaaatgcaaaatcaatatgaaattattataaaagctaaacaaaaagaaacaccaaggatcaaattaataagtaccctttttccctctggtcctacaatctgatataaccactgtaaagctgaacgctgctgacttcgcggagatttccctgatggcttcccaagcctgtgccatctccttccctgcagctcagtataccattcctcttgtgtttactattttgccatccttataatttccttggcaacaaggattgtttctttacttctaacttaacagcatgcgacatattccttaaatactaagtggagtgagtaaaacataatagattctcaacgaatatttattgaatacattaataaattactggatatgttcatttaatatttaatgtgctattatgcccatgaaacattaaatcgcccccatgcraagtgatgaacttaccatcacatcttggaaaagggtagttccagtttctgttgatcccatgctgacaagtgaggacaggatggcctattagaatgtacccaggataacactcgaaagatactgattgccccacgctgtaatccgagttgatcatgtacccattctgaaatgggggtggatctggacagttctgtaattcataggctgaaagaaacaaacagacaaaataaagcttatatttgtgaggttaaattacttcggaatttgcaggagtgtcatcacatgtgactgcttgagatgaagttgttggataagtttaataaggtatattttctaagtagtcagttgccatccagaccaatataattattattagtagta

SEQ ID NO: 686691 - DNA, 2911 bp, Homo sapiens
aaaaatgttgggtgaacatatacctaataattcccttttattttaaataggaaatatactaccagtctgagtactcctaactggaaaatatgtcgttatttggtttaactatacaaaaawaacaggaaaatccattgcagtttttttagtcttttttttaaaaaaaaaaaaaaaaaaaaaaaaaaacactgtataatccctaagctgacaactactatcagtacaattttttataacatgatttattgtgctttatcattcagtctttatgttccctagaataaactccaggtaagacaagagataataaatgtttgcagtctgtgtggtttaaacatttactcattaatgagtaagaattaactaatccataaatcaggtatcatctgatactgtaattttaaagctaaatgagcctctcgcccactctgggaagagggcgtgagtactcaatgcagtagaagccctctctagcatctttgaatatttaggcacacctttgtccataaaggcagttcccatgagactgggaacctgctcctaatgcagcagcaaagccacaccatgcagcaccagttctgggggaacctccgccctgccatgtaattctgctgaaaccaaccctcagcgccaggcaacacaatgagtttcaaaatagcatgaggtcaccggtcactgtcctcacaatcaactgaaaatcaagtcataaaataaagtctccgagcttctgcagaggggccttttctgtggagaatgaagtgaaatggaaatttcaattttatgtgtaaattccttaaccattgacaatattggagtgagcctgtagtttggaaacttgtaaacaaatgctggaaaaggaaacagtatattattatgacaggtgtttcccagaattctagacttttttgtttctgtgttcaggacctgagaaaaagagaggtgggccagaaagaagataggacagggcagaggggccagcagacaggggatgggaacacaaagagcttgatgcgggattactcagggattagatttaagaggcagctaaggctcagaatatgaatcagtctgtgttttatattaaagcaattggacatcaacataaagataatgtgagaacatatggaagacagcaaccaggcaacgcaatatgtgggcctacagcgtggccttggcgttcacaagattaatgtaagtgctgtttggagtttgtcttcattaacatttgccaaatgttaagcattccatagagccatgaggtttcgttattatccatagctttctcctatttaataaactaatgaaatggcattgttgcctctttaaaatgacaatgtgcaggctgggctcggtggctcatgcttgtaatcccagcattttgggaggccgaagcgggtggatcacaaggtcaagagattgagaccagcctgaacaacatggtgaaaccctgtctctactaaaaatacaaaaattagccagggggggtgaccggcacctgtaatcccagctacttgggaggctgaggcagaagaatcgcttaaacccaggagcagaaggttgcagtgagccgagatcacgccactgcactccagcctggcgacacagtgagactccatcacaaataaataaataacaatatgcaatgctagtgagtcatttcagtaactcaatgatggcaacattatttgccacaactgtttgggaaagtcattagaatagggccataaaaaatcagttgtaatattaaacctagtaatacatttacagaaatctctattatgagcataatttctaagcagaaaaaggtgaatgtttaaagatgttcattgcagcattatttacactacagaaatccaaacaacaacaaaaaaaaaatagggagagactcataaatgccagtgatgaaatgtcatatctttcaatagtcacagattgtatagatttctgtgtatttatttatattttcagtattgtaagcatactatgcagttgacaacagcttcctgtggttaagccctgactatagtcagcaggttaaaaaaaatcctttatttaacctttcagcatcccttggttttaattattttcatttatgcaatgatatgtctctgaacaagagtcagagacgcagcagaaaaatgattgagaacaagaaaaatcgagatcagaggacacatagtggcaaaagcatcttgagataattcctggcattggctcccccagggacgagaagtgggaagaacactatgtgagacaaattcctcccagagcgggagaggaggaaacttcacctggagggaagcgctgggcagcctctgaaacccagaaacccactggattatgtcgctcattactaacagagctttgggggctccctaagagctccagacatcacctcttttacctactatctaaagatgtaaaaggctgggagcagtgactcatgcctgtggtcccagttactagggaggctggggcaggaggactgcttaaggccaggagtcgaatgctgcagtgagctatgatcataccactgcactccagcctgggtgacagagcaggatcctgtctcataaaaagcaagcagacaaacaaacaaaaaacagatacaaaggagtattgcctaattaacaagatcagtgtgaatatcaagtaatttatatgataaaacttaataaactgtcataagttcaaataaagttattacattttatttataatgcacctaaatattatagagaattagctgtattttaggttggtgaaaatgtaattgcggtttttgccattactttcaatggcaaaaacctcaattgcctttacaccaacctaatgtatatcgataatatgaaattagaaacagtgtttgaaaatgagtattctgattaactcagtgctattcttttgagat

SEQ ID NO: 686692 - DNA, 2911 bp, Homo sapiens
aaaaatgttgggtgaacatatacctaataattcccttttattttaaataggaaatatactaccagtctgagtactcctaactggaaaatatgtcgttatttggtttaactatacaaaaaaaacaggaaaatccattgcagtttttttagtcttttttttaaaaaaaaaaaaaaaaaaaaaaaaaaacactgtataatccctaagctgacaactactatcagtacaattttttataacatgatttattgtgctttatcattcagtctttatgttccctagaataaactccaggtaagacaagagataataaatgtttgcagtctgtgtggtttaaacatttactcattaatgagtaagaattaactaatccataaatcaggtatcatctgatactgtaattttaaagctaaatgagcctctcgcccactctgggaagagggcgtgagtactcaatgcagtagaagccctctctagcatctttgaatatttaggcacacctttgtccataaaggcagttcccatgagactgggaacctgctcctaatgcagcagcaaagccacaccatgcagcaccagttctgggggaacctccgccctgccatgtaattctgctgaaaccaaccctcagcgccaggcaacacaatgagtttcaaaatagcatgaggtcaccggtcactgtcctcacaatcaactgaaaatcaagtcataaaataaagtctccgagcttctgcagaggggccttttctgtggagaatgaagtgaaatggaaatttcaattttatgtgtaaattccttaaccattgacaatattggagtgagcctgtagtttggaaacttgtaaacaaatgctggaaaaggaaacagtatattattatgacaggtgtttcccagaattctagacttttttgtttctgtgttcaggacctgagaaaaagagaggtgggccagaaagaagataggacagggcagaggggccagcagacaggggatgggaacacaaagagcttgatgcgggattactcagggattagatttaagaggcagctaaggctcagaatatgaatcagtctgtgttttatattaaagcaattggacatcaacataaagataatgtgagaacatatggaagacagcaaccaggcaacgcaatatgtgggcctrcagcgtggccttggcgttcacaagattaatgtaagtgctgtttggagtttgtcttcattaacatttgccaaatgttaagcattccatagagccatgaggtttcgttattatccatagctttctcctatttaataaactaatgaaatggcattgttgcctctttaaaatgacaatgtgcaggctgggctcggtggctcatgcttgtaatcccagcattttgggaggccgaagcgggtggatcacaaggtcaagagattgagaccagcctgaacaacatggtgaaaccctgtctctactaaaaatacaaaaattagccagggggggtgaccggcacctgtaatcccagctacttgggaggctgaggcagaagaatcgcttaaacccaggagcagaaggttgcagtgagccgagatcacgccactgcactccagcctggcgacacagtgagactccatcacaaataaataaataacaatatgcaatgctagtgagtcatttcagtaactcaatgatggcaacattatttgccacaactgtttgggaaagtcattagaatagggccataaaaaatcagttgtaatattaaacctagtaatacatttacagaaatctctattatgagcataatttctaagcagaaaaaggtgaatgtttaaagatgttcattgcagcattatttacactacagaaatccaaacaacaacaaaaaaaaaatagggagagactcataaatgccagtgatgaaatgtcatatctttcaatagtcacagattgtatagatttctgtgtatttatttatattttcagtattgtaagcatactatgcagttgacaacagcttcctgtggttaagccctgactatagtcagcaggttaaaaaaaatcctttatttaacctttcagcatcccttggttttaattattttcatttatgcaatgatatgtctctgaacaagagtcagagacgcagcagaaaaatgattgagaacaagaaaaatcgagatcagaggacacatagtggcaaaagcatcttgagataattcctggcattggctcccccagggacgagaagtgggaagaacactatgtgagacaaattcctcccagagcgggagaggaggaaacttcacctggagggaagcgctgggcagcctctgaaacccagaaacccactggattatgtcgctcattactaacagagctttgggggctccctaagagctccagacatcacctcttttacctactatctaaagatgtaaaaggctgggagcagtgactcatgcctgtggtcccagttactagggaggctggggcaggaggactgcttaaggccaggagtcgaatgctgcagtgagctatgatcataccactgcactccagcctgggtgacagagcaggatcctgtctcataaaaagcaagcagacaaacaaacaaaaaacagatacaaaggagtattgcctaattaacaagatcagtgtgaatatcaagtaatttatatgataaaacttaataaactgtcataagttcaaataaagttattacattttatttataatgcacctaaatattatagagaattagctgtattttaggttggtgaaaatgtaattgcggtttttgccattactttcaatggcaaaaacctcaattgcctttacaccaacctaatgtatatcgataatatgaaattagaaacagtgtttgaaaatgagtattctgattaactcagtgctattcttttgagat

SEQ ID NO: 686693 - DNA, 2911 bp, Homo sapiens
aaaaatgttgggtgaacatatacctaataattcccttttattttaaataggaaatatactaccagtctgagtactcctaactggaaaatatgtcgttatttggtttaactatacaaaaaaaacaggaaaatccattgcagtttttttagtcttttttttaaaaaaaaaaaaaaaaaaaaaaaaaaacactgtataatccctaagctgacaactactatcagtacaattttttataacatgatttattgtgctttatcattcagtctttatgttccctagaataaactccaggtaagacaagagataataaatgtttgcagtctgtgtggtttaaacatttactcattaatgagtaagaattaactaatccataaatcaggtatcatctgatactgtaattttaaagctaaatgagcctctcgcccactctgggaagagggcgtgagtactcaatgcagtagaagccctctctagcatctttgaatatttaggcacacctttgtccataaaggcagttcccatgagactgggaacctgctcctaatgcagcagcaaagccacaccatgcagcaccagttctgggggaacctccgccctgccatgtaattctgctgaaaccaaccctcagcgccaggcaacacaatgagtttcaaaatagcatgaggtcaccggtcactgtcctcacaatcaactgaaaatcaagtcataaaataaagtctccgagcttctgcagaggggccttttctgtggagaatgaagtgaaatggaaatttcaattttatgtgtaaattccttaaccattgacaatattggagtgagcctgtagtttggaaacttgtaaacaaatgctggaaaaggaaacagtatattattatgacaggtgtttcccagaattctagacttttttgtttctgtgttcaggacctgagaaaaagagaggtgggccagaaagaagataggacagggcagaggggccagcagacaggggatgggaacacaaagagcttgatgcgggattactcagggattagatttaagaggcagctaaggctcagaatatgaatcagtctgtgttttatattaaagcaattggacatcaacataaagataatgtgagaacatatggaagacagcaaccaggcaacgcaatatgtgggcctacagcgtggccttggcgttcacaagattaatgtaagtgctgtttggagtttgtcttcattaacatttgccaaatgttaagcattccatagagccatgaggtttcgttattatccatagctttctcctatttaataaactaatgaaatggcattgttgcctctttaaaatracaatgtgcaggctgggctcggtggctcatgcttgtaatcccagcattttgggaggccgaagcgggtggatcacaaggtcaagagattgagaccagcctgaacaacatggtgaaaccctgtctctactaaaaatacaaaaattagccagggggggtgaccggcacctgtaatcccagctacttgggaggctgaggcagaagaatcgcttaaacccaggagcagaaggttgcagtgagccgagatcacgccactgcactccagcctggcgacacagtgagactccatcacaaataaataaataacaatatgcaatgctagtgagtcatttcagtaactcaatgatggcaacattatttgccacaactgtttgggaaagtcattagaatagggccataaaaaatcagttgtaatattaaacctagtaatacatttacagaaatctctattatgagcataatttctaagcagaaaaaggtgaatgtttaaagatgttcattgcagcattatttacactacagaaatccaaacaacaacaaaaaaaaaatagggagagactcataaatgccagtgatgaaatgtcatatctttcaatagtcacagattgtatagatttctgtgtatttatttatattttcagtattgtaagcatactatgcagttgacaacagcttcctgtggttaagccctgactatagtcagcaggttaaaaaaaatcctttatttaacctttcagcatcccttggttttaattattttcatttatgcaatgatatgtctctgaacaagagtcagagacgcagcagaaaaatgattgagaacaagaaaaatcgagatcagaggacacatagtggcaaaagcatcttgagataattcctggcattggctcccccagggacgagaagtgggaagaacactatgtgagacaaattcctcccagagcgggagaggaggaaacttcacctggagggaagcgctgggcagcctctgaaacccagaaacccactggattatgtcgctcattactaacagagctttgggggctccctaagagctccagacatcacctcttttacctactatctaaagatgtaaaaggctgggagcagtgactcatgcctgtggtcccagttactagggaggctggggcaggaggactgcttaaggccaggagtcgaatgctgcagtgagctatgatcataccactgcactccagcctgggtgacagagcaggatcctgtctcataaaaagcaagcagacaaacaaacaaaaaacagatacaaaggagtattgcctaattaacaagatcagtgtgaatatcaagtaatttatatgataaaacttaataaactgtcataagttcaaataaagttattacattttatttataatgcacctaaatattatagagaattagctgtattttaggttggtgaaaatgtaattgcggtttttgccattactttcaatggcaaaaacctcaattgcctttacaccaacctaatgtatatcgataatatgaaattagaaacagtgtttgaaaatgagtattctgattaactcagtgctattcttttgagat

SEQ ID NO: 686694 - DNA, 2911 bp, Homo sapiens
aaaaatgttgggtgaacatatacctaataattcccttttattttaaataggaaatatactaccagtctgagtactcctaactggaaaatatgtcgttatttggtttaactatacaaaaaaaacaggaaaatccattgcagtttttttagtcttttttttaaaaaaaaaaaaaaaaaaaaaaaaaaacactgtataatccctaagctgacaactactatcagtacaattttttataacatgatttattgtgctttatcattcagtctttatgttccctagaataaactccaggtaagacaagagataataaatgtttgcagtctgtgtggtttaaacatttactcattaatgagtaagaattaactaatccataaatcaggtatcatctgatactgtaattttaaagctaaatgagcctctcgcccactctgggaagagggcgtgagtactcaatgcagtagaagccctctctagcatctttgaatatttaggcacacctttgtccataaaggcagttcccatgagactgggaacctgctcctaatgcagcagcaaagccacaccatgcagcaccagttctgggggaacctccgccctgccatgtaattctgctgaaaccaaccctcagcgccaggcaacacaatgagtttcaaaatagcatgaggtcaccggtcactgtcctcacaatcaactgaaaatcaagtcataaaataaagtctccgagcttctgcagaggggccttttctgtggagaatgaagtgaaatggaaatttcaattttatgtgtaaattccttaaccattgacaatattggagtgagcctgtagtttggaaacttgtaaacaaatgctggaaaaggaaacagtatattattatgacaggtgtttcccagaattctagacttttttgtttctgtgttcaggacctgagaaaaagagaggtgggccagaaagaagataggacagggcagaggggccagcagacaggggatgggaacacaaagagcttgatgcgggattactcagggattagatttaagaggcagctaaggctcagaatatgaatcagtctgtgttttatattaaagcaattggacatcaacataaagataatgtgagaacatatggaagacagcaaccaggcaacgcaatatgtgggcctacagcgtggccttggcgttcacaagattaatgtaagtgctgtttggagtttgtcttcattaacatttgccaaatgttaagcattccatagagccatgaggtttcgttattatccatagctttctcctatttaataaactaatgaaatggcattgttgcctctttaaaatgacaatgtgcaggctgggctcggtggctcatgcttgtaatcccagcattttgggaggccgaagcgggtggatcacaaggtcaagagatygagaccagcctgaacaacatggtgaaaccctgtctctactaaaaatacaaaaattagccagggggggtgaccggcacctgtaatcccagctacttgggaggctgaggcagaagaatcgcttaaacccaggagcagaaggttgcagtgagccgagatcacgccactgcactccagcctggcgacacagtgagactccatcacaaataaataaataacaatatgcaatgctagtgagtcatttcagtaactcaatgatggcaacattatttgccacaactgtttgggaaagtcattagaatagggccataaaaaatcagttgtaatattaaacctagtaatacatttacagaaatctctattatgagcataatttctaagcagaaaaaggtgaatgtttaaagatgttcattgcagcattatttacactacagaaatccaaacaacaacaaaaaaaaaatagggagagactcataaatgccagtgatgaaatgtcatatctttcaatagtcacagattgtatagatttctgtgtatttatttatattttcagtattgtaagcatactatgcagttgacaacagcttcctgtggttaagccctgactatagtcagcaggttaaaaaaaatcctttatttaacctttcagcatcccttggttttaattattttcatttatgcaatgatatgtctctgaacaagagtcagagacgcagcagaaaaatgattgagaacaagaaaaatcgagatcagaggacacatagtggcaaaagcatcttgagataattcctggcattggctcccccagggacgagaagtgggaagaacactatgtgagacaaattcctcccagagcgggagaggaggaaacttcacctggagggaagcgctgggcagcctctgaaacccagaaacccactggattatgtcgctcattactaacagagctttgggggctccctaagagctccagacatcacctcttttacctactatctaaagatgtaaaaggctgggagcagtgactcatgcctgtggtcccagttactagggaggctggggcaggaggactgcttaaggccaggagtcgaatgctgcagtgagctatgatcataccactgcactccagcctgggtgacagagcaggatcctgtctcataaaaagcaagcagacaaacaaacaaaaaacagatacaaaggagtattgcctaattaacaagatcagtgtgaatatcaagtaatttatatgataaaacttaataaactgtcataagttcaaataaagttattacattttatttataatgcacctaaatattatagagaattagctgtattttaggttggtgaaaatgtaattgcggtttttgccattactttcaatggcaaaaacctcaattgcctttacaccaacctaatgtatatcgataatatgaaattagaaacagtgtttgaaaatgagtattctgattaactcagtgctattcttttgagat

SEQ ID NO: 686695 - DNA, 991 bp, Homo sapiens
tgcttggcccagtgcactggctcacgcatggaatcccagcactttgggaggccgaggcaggcagatcacctaaggccaggagttcgaggccatcctgggcaacatggtgaaaccccgtctctactaaaaatacaaaaattagctgggtgaggtggcaggtgctacttgggaggttgaggtaggagatcgtttgaacctgggaggcggagcttgcaatgagccgagatcgcgccactgcactccggcctgggcgaccgagtgagactctgtctcaaaataaataaataaataaattaaaaagcaatagaatgatctacataatatttgacatgttaatattcgtacagcatctttgaacaaaggctgacaaatacaagtgataagtgtttgttaaatgaaaataaatgttgtacaatttcagtctttaagaaagacaacgcagactggttttagggttccagaccttccagatgtttttcttattttgcactgcatctttaaaatcttgcgtattattgataaggagtgctgggaagggaagagcgtgatgcctttaaatgatacggaagaggggaagggaagtgctgggtwgaggagggcgtggtccctggctagggctctacccccacggacctaggcgaggacaggcactcctgccttcctgcccaaatgttgcattttccaagaccaccttggcccaccacacccccaacctgggcctataaaaattcgagaccctagtaaggaaagagacacaagcggctggacgtgttgggaaacacatcggcagaagaagacacgagtggttatgtgtctggtcattagagagcatgtctgcggaagagcacatcgatagactcccgcacatggatcgatgccatcgacccgcgacctgcggaatgagggggagttggtccggggcagtcagaggagagccgggcagcgggtggcccaactctaggggaaggccatcttccttctggcttcctca

SEQ ID NO: 686696 - DNA, 1705 bp, Homo sapiens
  misc_feature 847, 848, 849, 850, 851, 852, 853, 854, 855, 856, 857, 858,859, 860, 861, 862, 863, 864, 865, 866, 867, 868, 869, 870,871, 872, 873, 874, 875, 876, 877, 878, 879, 880, 881, 882,883, 884, 885, 886, 887, 888, 889, 890, 891, 892, 893: n = A,T,C or G
  misc_feature 894, 895, 896, 897, 898, 899, 900, 901, 902, 903, 904, 905,906, 907, 908, 909, 910, 911, 912, 913, 914, 915, 916, 917,918, 919, 920, 921, 922, 923, 924, 925, 926, 927, 928, 929,930, 931, 932, 933, 934, 935, 936, 937, 938, 939, 940: n = A,T,C or G
  misc_feature 941, 942, 943, 944, 945, 946: n = A,T,C or G
atggaagtgctcagaaagtatgaaaatgtttatatcacatattaatgtccaaatatctatctatctctctatctatacccaaatgaacaagtgctgggcatctagtagaccagaggtcagcaaatattttctggaatggacagataactattttaggtttttcaggctacatattatccctgtcacatatttgtttttgtgcttgtttgtttacaagccattaaaaatatgaaaatcattcttaattcctggtctgtaaaaaaataggatataagctaaattaggcctgtagatcatagtcatctgactcctgaagtagacagatggctcagtcagttgacattagccagcctttgtcatcagccaccttagaactagcactatggacaaataaatcatgtggccacagtggctgaaagggaggccaggaatgcaggtggtagggaggagataatccctgatgagttgaagaagaatattttgggaaaggacatgtaaattaaacttggtagcttttacattgggttgcttggggaaaagcctgatggtcgaaatgtaatgtatattgttttttaaaaaattgaatattattatctttgacatgtgattagaattataaagaaattctaatgtgttatagtattaatcacaattgcctttagatgcatatttaccatagtctacatttcttgcttactcaattcttgcttccttctctacttgaatcttcttttagaagcataaactgagttaacaacctgataaatgaagtaagttctatttaccaacttggaaaattatacctgtgtgagtacacaatacttggattcactgaccatgccaaaannnnnnnnnnnnnnnnnnnnnnnnnnnnnnnnnnnnnnnnnnnnnnnnnnnnnnnnnnnnnnnnnnnnnnnnnnnnnnnnnnnnnnnnnnnnnnnnnnnnctgcctcagcctgcccagtagctgggactacaggtgttctccaccatgcccagctaattttttgtactttcagtagagatgggttacaccatgttggctaggctggtcttgaacttctgacctcaagtcatctgcccgccatggcctcctaaagtgctgggattacaggaatgagtcaccatgcctggccggaaaktattgttaatatataattcaactacttgaatatgtaaattaccagatggtatatcagtagaggcagagaataagctgatacctaaaccctgggttatataatatatactatattttcatctaattttatttaccagttaacatcctaatgcctgatttctccattacaaaatggactcagttttacagctgtcttctaaaaaatcatagagattaccaactatgtaaaatattaaaatactttagaaaacatttattccaaccctattatattaaaatgagtaaatttagattcactgtgataggtaatagctaccacttatatagtacatttcagctgttaaaaattgtttgtagattaccttatcatctgggtttcacataatcttagaggaaaaccaaaggacctgaccaaagtaccatgaatacatgagtagatatttgagatgttttctactttttgctatttaaatatatttgaaatgattatttctgaacaaatttctccgatggatttctagatctctttcagctattttagaaataaaattaaattataaaaaa

SEQ ID NO: 686697 - DNA, 1705 bp, Homo sapiens
  misc_feature 847, 848, 849, 850, 851, 852, 853, 854, 855, 856, 857, 858,859, 860, 861, 862, 863, 864, 865, 866, 867, 868, 869, 870,871, 872, 873, 874, 875, 876, 877, 878, 879, 880, 881, 882,883, 884, 885, 886, 887, 888, 889, 890, 891, 892, 893: n = A,T,C or G
  misc_feature 894, 895, 896, 897, 898, 899, 900, 901, 902, 903, 904, 905,906, 907, 908, 909, 910, 911, 912, 913, 914, 915, 916, 917,918, 919, 920, 921, 922, 923, 924, 925, 926, 927, 928, 929,930, 931, 932, 933, 934, 935, 936, 937, 938, 939, 940: n = A,T,C or G
  misc_feature 941, 942, 943, 944, 945, 946: n = A,T,C or G
atggaagtgctcagaaagtatgaaaatgtttatatcacatattaatgtccaaatatctatctatctctctatctatacccaaatgaacaagtgctgggcatctagtagaccagaggtcagcaaatattttctggaatggacagataactattttaggtttttcaggctacatattatccctgtcacatatttgtttttgtgcttgtttgtttacaagccattaaaaatatgaaaatcattcttaattcctggtctgtaaaaaaataggatataagctaaattaggcctgtagatcatagtcatctgactcctgaagtagacagatggctcagtcagttgacattagccagcctttgtcatcagccaccttagaactagcactatggacaaataaatcatgtggccacagtggctgaaagggaggccaggaatgcaggtggtagggaggagataatccctgatgagttgaagaagaatattttgggaaaggacatgtaaattaaacttggtagcttttacattgggttgcttggggaaaagcctgatggtcgaaatgtaatgtatattgttttttaaaaaattgaatattattatctttgacatgtgattagaattataaagaaattctaatgtgttatagtattaatcacaattgcctttagatgcatatttaccatagtctacatttcttgcttactcaattcttgcttccttctctacttgaatcttcttttagaagcataaactgagttaacaacctgataaatgaagtaagttctatttaccaacttggaaaattatacctgtgtgagtacacaatacttggattcactgaccatgccaaaannnnnnnnnnnnnnnnnnnnnnnnnnnnnnnnnnnnnnnnnnnnnnnnnnnnnnnnnnnnnnnnnnnnnnnnnnnnnnnnnnnnnnnnnnnnnnnnnnnnctgcctcagcctgcccagtagctgggactacaggtgttctccaccatgcccagctaattttttgtactttcagtagagatgggttacaccatgttggctaggctggtcttgaacttctgacctcaagtcatctgcccgccatggcctcctaaagtgctgggattacaggaatgagtcaccatgcctggccggaaattattgttaatatataattcaactacttgaatatgtaaattaccagatggtatatcagtagaggcagagaataagctgatacctaaaccctgggttatataatatatactatattttcatctaattttatttaccagttaacatcctaatgcctgatttctccatkacaaaatggactcagttttacagctgtcttctaaaaaatcatagagattaccaactatgtaaaatattaaaatactttagaaaacatttattccaaccctattatattaaaatgagtaaatttagattcactgtgataggtaatagctaccacttatatagtacatttcagctgttaaaaattgtttgtagattaccttatcatctgggtttcacataatcttagaggaaaaccaaaggacctgaccaaagtaccatgaatacatgagtagatatttgagatgttttctactttttgctatttaaatatatttgaaatgattatttctgaacaaatttctccgatggatttctagatctctttcagctattttagaaataaaattaaattataaaaaa

SEQ ID NO: 686698 - DNA, 1705 bp, Homo sapiens
  misc_feature 847, 848, 849, 850, 851, 852, 853, 854, 855, 856, 857, 858,859, 860, 861, 862, 863, 864, 865, 866, 867, 868, 869, 870,871, 872, 873, 874, 875, 876, 877, 878, 879, 880, 881, 882,883, 884, 885, 886, 887, 888, 889, 890, 891, 892, 893: n = A,T,C or G
  misc_feature 894, 895, 896, 897, 898, 899, 900, 901, 902, 903, 904, 905,906, 907, 908, 909, 910, 911, 912, 913, 914, 915, 916, 917,918, 919, 920, 921, 922, 923, 924, 925, 926, 927, 928, 929,930, 931, 932, 933, 934, 935, 936, 937, 938, 939, 940: n = A,T,C or G
  misc_feature 941, 942, 943, 944, 945, 946: n = A,T,C or G
atggaagtgctcagaaagtatgaaaatgtttatatcacatattaatgtccaaatatctatctatctctctatctatacccaaatgaacaagtgctgggcatctagtagaccagaggtcagcaaatattttctggaatggacagataactattttaggtttttcaggctacatattatccctgtcacatatttgtttttgtgcttgtttgtttacaagccattaaaaatatgaaaatcattcttaattcctggtctgtaaaaaaataggatataagctaaattaggcctgtagatcatagtcatctgactcctgaagtagacagatggctcagtcagttgacattagccagcctttgtcatcagccaccttagaactagcactatggacaaataaatcatgtggccacagtggctgaaagggaggccaggaatgcaggtggtagggaggagataatccctgatgagttgaagaagaatattttgggaaaggacatgtaaattaaacttggtagcttttacattgggttgcttggggaaaagcctgatggtcgaaatgtaatgtatattgttttttaaaaaattgaatattattatctttgacatgtgattagaattataaagaaattctaatgtgttatagtattaatcacaattgcctttagatgcatatttaccatagtctacatttcttgcttactcaattcttgcttccttctctacttgaatcttcttttagaagcataaactgagttaacaacctgataaatgaagtaagttctatttaccaacttggaaaattatacctgtgtgagtacacaatacttggattcactgaccatgccaaaannnnnnnnnnnnnnnnnnnnnnnnnnnnnnnnnnnnnnnnnnnnnnnnnnnnnnnnnnnnnnnnnnnnnnnnnnnnnnnnnnnnnnnnnnnnnnnnnnnnctgcctcagcctgcccagtagctgggactacaggtgttctccaccatgcccagctaattttttgtactttcagtagagatgggttacaccatgttggctaggctggtcttgaacttctgacctcaagtcatctgcccgccatggcctcctaaagtgctgggattacaggaatgagtcaccatgcctggccggaaattattgttaatatataattcaactacttgaatatgtaaattaccagatggtatatcagtagaggcagagaataagctgatacctaaaccctgggttatataatatatactatattttcatctaattttatttaccagttaacatcctaatgcctgatttctccattacaaaatggactcagttttacagctgtcttctaaaaaatcatagagattaccaactatgtaaaatattaaaatactttagaaaacatttattccaaccctattatattaaaatgagtaaatttagattcactgtgataggtaatagctaccacttatatagtacatttcagctgttaaaaattgtttgtagattaccttatcatctgggtttcacataatcttagaggaaaaccaaaggacctgaccaaagtaccatgaatacatgagtagatatttgagatgttttctactttttgctatttaaatatatttgaaaygattatttctgaacaaatttctccgatggatttctagatctctttcagctattttagaaataaaattaaattataaaaaa

SEQ ID NO: 686699 - DNA, 1261 bp, Homo sapiens
acagacctcagaacagccacagacctgctgcacagaggtaaagggctaagttcagcaccaacattgctttgcactgaaaagtcagacaggattgaagtcatcagtcactttgttcttcatgtataggtgtggaagatagattgatactctttgaggcaggttgagcacttggcctcttcgaaaatacaaaacacttttcaaacttcaggagaaagttcttaaaattcttgctaataatgctttaaacattattatttgtaagcattattattgcacattattataaaaaataaatgtagtatataatacttacaaactatatttgtggtaaagtttttaatcattaatttatttcaattcttaaacatttcatctgagttttacaaaggaaaaactccagaataggatctctttaatgtcttatcttgtcttctttgtcaaaaaaatattttagtgtacttgaaccttccaaactctaaaataatatgcctttcactagattgcattagaagaccaggtccagaaaarcaaatgtacatttgtgaatagatgatgtttcggtgtgttccatacagtgaaaaaaccaatttgtgagttttctaatatatgaaatgattataactgtgtattacagtgttcaccttttgcttccatagttgttttagttagaaaacttaaaactcccctcaaaattttttaaatgttagattatgttctaacagtttcaataaaggtggtaatcaaacacgttaggaggcccagttatgagaaaactttggattacaaattcatttgaacttatatttaataaaatgctttatttttacagcaattccttcctatttgcaaatttgctttgcattaaattgctgcttgtgggaacgtaaaattgtacagctactttgggaaatcatcctgtagttaaatacacatctattgtatgaaccagatatgttactcctaggcatttacttaagataaatgaatattttatatatatatatatatatatatacacacacacacacacacacacacacaaacacacacatatatatgtatatatgtatagatatgtgtatacacatatatatgtatacatatatatatatccatacaaaaacttgtacacagatattgatagaagcttttttgtaagcagaaatggaaataatcctaatgttcatcaacatgtaaatggattaatcaaatctggcatatcttcaatgaaaaattatttaccatttaaaatattgattca

SEQ ID NO: 686700 - DNA, 1261 bp, Homo sapiens
acagacctcagaacagccacagacctgctgcacagaggtaaagggctaagttcagcaccaacattgctttgcactgaaaagtcagacaggattgaagtcatcagtcactttgttcttcatgtataggtgtggaagatagattgatactctttgaggcaggttgagcacttggcctcttcgaaaatacaaaacacttttcaaacttcaggagaaagttcttaaaattcttgctaataatgctttaaacattattatttgtaagcattattattgcacattattataaaaaataaatgtagtatataatacttacaaactatatttgtggtaaagtttttaatcattaatttatttcaattcttaaacatttcatctgagttttacaaaggaaaaactccagaataggatctctttaatgtcttatcttgtcttctttgtcaaaaaaatattttagtgtacttgaaccttccaaactctaaaataatatgcctttcactagattgcattagaagaccaggtccagaaaagcaaatgtacatttgtgaatagatgatgtttcggtgtgttccatacagtgaaaaaaccaatttgtgagttttctaatatatgaaatgattataactgtgtattacagtgttcaccttttgcttccatagttgttttagttagaaaacttaaaactcccctcaaaattttttaaatgttagattatgttctaacagtttcaataaaggtggtaatcaaacacgttaggaggcccagttatgagaaaactttggattacaaattcatttgaacttatatttaataaaatgctttatttttacagcaattccttcctatttgcaaatttgctttgcattaaattgctgcttgtgggaacgtaaaattgtacagctactttgggaaatcatcctgtagttaaatacacatctattgtatgaaccagatatgttactcctaggcatttacttaagataaatgaatattttatatatatatatatatatatatayacacacacacacacacacacacacaaacacacacatatatatgtatatatgtatagatatgtgtatacacatatatatgtatacatatatatatatccatacaaaaacttgtacacagatattgatagaagcttttttgtaagcagaaatggaaataatcctaatgttcatcaacatgtaaatggattaatcaaatctggcatatcttcaatgaaaaattatttaccatttaaaatattgattca

SEQ ID NO: 686701 - DNA, 1261 bp, Homo sapiens
acagacctcagaacagccacagacctgctgcacagaggtaaagggctaagttcagcaccaacattgctttgcactgaaaagtcagacaggattgaagtcatcagtcactttgttcttcatgtataggtgtggaagatagattgatactctttgaggcaggttgagcacttggcctcttcgaaaatacaaaacacttttcaaacttcaggagaaagttcttaaaattcttgctaataatgctttaaacattattatttgtaagcattattattgcacattattataaaaaataaatgtagtatataatacttacaaactatatttgtggtaaagtttttaatcattaatttatttcaattcttaaacatttcatctgagttttacaaaggaaaaactccagaataggatctctttaatgtcttatcttgtcttctttgtcaaaaaaatattttagtgtacttgaaccttccaaactctaaaataatatgcctttcactagattgcattagaagaccaggtccagaaaagcaaatgtacatttgtgaatagatgatgtttcggtgtgttccatacagtgaaaaaaccaatttgtgagttttctaatatatgaaatgattataactgtgtattacagtgttcaccttttgcttccatagttgttttagttagaaaacttaaaactcccctcaaaattttttaaatgttagattatgttctaacagtttcaataaaggtggtaatcaaacacgttaggaggcccagttatgagaaaactttggattacaaattcatttgaacttatatttaataaaatgctttatttttacagcaattccttcctatttgcaaatttgctttgcattaaattgctgcttgtgggaacgtaaaattgtacagctactttgggaaatcatcctgtagttaaatacacatctattgtatgaaccagatatgttactcctaggcatttacttaagataaatgaatattttatatatatatatatatatatatacayacacacacacacacacacacacaaacacacacatatatatgtatatatgtatagatatgtgtatacacatatatatgtatacatatatatatatccatacaaaaacttgtacacagatattgatagaagcttttttgtaagcagaaatggaaataatcctaatgttcatcaacatgtaaatggattaatcaaatctggcatatcttcaatgaaaaattatttaccatttaaaatattgattca

SEQ ID NO: 686702 - DNA, 1261 bp, Homo sapiens
acagacctcagaacagccacagacctgctgcacagaggtaaagggctaagttcagcaccaacattgctttgcactgaaaagtcagacaggattgaagtcatcagtcactttgttcttcatgtataggtgtggaagatagattgatactctttgaggcaggttgagcacttggcctcttcgaaaatacaaaacacttttcaaacttcaggagaaagttcttaaaattcttgctaataatgctttaaacattattatttgtaagcattattattgcacattattataaaaaataaatgtagtatataatacttacaaactatatttgtggtaaagtttttaatcattaatttatttcaattcttaaacatttcatctgagttttacaaaggaaaaactccagaataggatctctttaatgtcttatcttgtcttctttgtcaaaaaaatattttagtgtacttgaaccttccaaactctaaaataatatgcctttcactagattgcattagaagaccaggtccagaaaagcaaatgtacatttgtgaatagatgatgtttcggtgtgttccatacagtgaaaaaaccaatttgtgagttttctaatatatgaaatgattataactgtgtattacagtgttcaccttttgcttccatagttgttttagttagaaaacttaaaactcccctcaaaattttttaaatgttagattatgttctaacagtttcaataaaggtggtaatcaaacacgttaggaggcccagttatgagaaaactttggattacaaattcatttgaacttatatttaataaaatgctttatttttacagcaattccttcctatttgcaaatttgctttgcattaaattgctgcttgtgggaacgtaaaattgtacagctactttgggaaatcatcctgtagttaaatacacatctattgtatgaaccagatatgttactcctaggcatttacttaagataaatgaatattttatatatatatatatatatatatacacacacacamacacacacacacacaaacacacacatatatatgtatatatgtatagatatgtgtatacacatatatatgtatacatatatatatatccatacaaaaacttgtacacagatattgatagaagcttttttgtaagcagaaatggaaataatcctaatgttcatcaacatgtaaatggattaatcaaatctggcatatcttcaatgaaaaattatttaccatttaaaatattgattca

SEQ ID NO: 686703 - DNA, 1261 bp, Homo sapiens
acagacctcagaacagccacagacctgctgcacagaggtaaagggctaagttcagcaccaacattgctttgcactgaaaagtcagacaggattgaagtcatcagtcactttgttcttcatgtataggtgtggaagatagattgatactctttgaggcaggttgagcacttggcctcttcgaaaatacaaaacacttttcaaacttcaggagaaagttcttaaaattcttgctaataatgctttaaacattattatttgtaagcattattattgcacattattataaaaaataaatgtagtatataatacttacaaactatatttgtggtaaagtttttaatcattaatttatttcaattcttaaacatttcatctgagttttacaaaggaaaaactccagaataggatctctttaatgtcttatcttgtcttctttgtcaaaaaaatattttagtgtacttgaaccttccaaactctaaaataatatgcctttcactagattgcattagaagaccaggtccagaaaagcaaatgtacatttgtgaatagatgatgtttcggtgtgttccatacagtgaaaaaaccaatttgtgagttttctaatatatgaaatgattataactgtgtattacagtgttcaccttttgcttccatagttgttttagttagaaaacttaaaactcccctcaaaattttttaaatgttagattatgttctaacagtttcaataaaggtggtaatcaaacacgttaggaggcccagttatgagaaaactttggattacaaattcatttgaacttatatttaataaaatgctttatttttacagcaattccttcctatttgcaaatttgctttgcattaaattgctgcttgtgggaacgtaaaattgtacagctactttgggaaatcatcctgtagttaaatacacatctattgtatgaaccagatatgttactcctaggcatttacttaagataaatgaatattttatatatatatatatatatatatacacacacacacacacacacacacacaaayacacacatatatatgtatatatgtatagatatgtgtatacacatatatatgtatacatatatatatatccatacaaaaacttgtacacagatattgatagaagcttttttgtaagcagaaatggaaataatcctaatgttcatcaacatgtaaatggattaatcaaatctggcatatcttcaatgaaaaattatttaccatttaaaatattgattca

SEQ ID NO: 686704 - DNA, 1302 bp, Homo sapiens
gcagtcaagagattgtgaaagatgtgtatacaaaagaggggccataccacagcagtaacttgaccacagcagtaactcaatgcatgatttgtgttcctgtatcttttaatggcacaagtcctgggacctttgatgaggctctgtctaatcatagaaggactctgccaccagaataacctagtttgcataaactttcctcgtgttttctttcactccgctatccagactgtagggtgtgccttacattatttagctgaattgtcaacaggtgtactgagtaaactgtttgatttataaatatctctgtatctaatcatgtatcaatttctcaaattayggtgtttcacatattggtttctctaaagattatttcatttcacaatttgaggcagttttgtgaaaagaaacatatacatatattttaatttctgcctgaaatatacaacattgaatttcattcaaatatttaatgccttcacaaataaaacgtagctagtgtttcatgttgctgtttagaagtttattgaaatatggcagataaaatgctatagagatattattatgtttaataattcagtagttgcttcaaatatgctataaagtgttggaatatggccagttaactttaaaatatagaataataaaataattggatttaaaattgcttcatattatttttgtttaataaaaagacaatccatgtcttaggtgtacccttttaaatcctatctactttctgattcttaggattcttaaaaagaatattgtaatgactgaacagaaatattatatctgattttgtactagaaaattgaagcagcatgggatcatggctaagtaagagctttatagcagtagcaaatagttacatgattactgaagtatagctgtcactggaaatagaaagctgcaaggaacctatcataaaagtagcaatttcagtttcactagtgtttaaaattaaagcctagtaattcattgtggatgtatttcctcaatggtttcaggaaagtatcctgctttcactgagcattttcactttgttccttatgtgtttcctttcataatgaaaaagttgtaatttcagattggtaaaacaattgttaggactttgtgaacaaacactcaaaaagttttgtgtcatgaaataatgattagtcaattgtatttattgttataacacactatgttaaaaattcactgccagatgatccacattatgttaggtaaaccaatttaatcaacagtttcctcttttgacatataattagctgatggatgaatttagaggtgtaaaaaacc

SEQ ID NO: 686705 - DNA, 1302 bp, Homo sapiens
gcagtcaagagattgtgaaagatgtgtatacaaaagaggggccataccacagcagtaacttgaccacagcagtaactcaatgcatgatttgtgttcctgtatcttttaatggcacaagtcctgggacctttgatgaggctctgtctaatcatagaaggactctgccaccagaataacctagtttgcataaactttcctcgtgttttctttcactccgctatccagactgtagggtgtgccttacattatttagctgaattgtcaacaggtgtactgagtaaactgtttgatttataaatatctctgtatctaatcatgtatcaatttctcaaattatggtgtttcacatattggtttctctaaagattatttcatttcacaatttgaggcagttttgtgaaaagaaacatatacatatattttaatttctgcctgaaatatacaacattgaatttcattcaaatatttaatgccttcacaaataaaacgtagctagtgtttcatgttgctgtttagaagtttattgaaatatggcagataaaatgctatagagatattattatgtttaataattcagtagttgcttcaaatatgctataaagtgttggaatatggccagttaactttaaaatatagaataataaaataattggatttaaaattgcttcatattatttttgtttaataaaaagacaatccatgtcttaggtgtacccttttaaatcctatctactttctgattcttaggattcttaaaaagaatattgtaatgactgaacagaaatattatatctgattttgtactagaaaattgaagcagcatgggatcatggctaagtaagagctttatagcagtagcaaatagttacatgattactgaagtatagctgtcactggaaatagaaagctgcaaggaacctatcataaaagtagcaatttcagtttcactagtgtttaaaattaaagcctagtaattcattgtggatgtatttcctcaatggtttcaggaaagtatcctgctttcactgagcattttcactttgttccttatgtgtttcctttcataatgaaaaagttgtaatttcagattggtaaaacaattgttaggactttgtraacaaacactcaaaaagttttgtgtcatgaaataatgattagtcaattgtatttattgttataacacactatgttaaaaattcactgccagatgatccacattatgttaggtaaaccaatttaatcaacagtttcctcttttgacatataattagctgatggatgaatttagaggtgtaaaaaacc

SEQ ID NO: 686706 - DNA, 749 bp, Homo sapiens
tagtaggaaaaatatcaaaaaatgcttataataatgataatagcaacaataataataacaatatattctacaacgctaatgttctctttgtgtttcaatggaaacaggtttagatcatattgccaaattttctggtatgtaattcattttcatttgcttgatttcaaaattttaaaaaataaaatcttattttaagaatttagaaacaaaaagttttgaaggaaaaaaaatgtaatagtcttcacagtttccactatcctccactcttaaattgtttttcactcccaatctttgtggtaaacaatgttaacagactaaaatttcaacctgttgtaacttattttatgctcatatacacagatatacacatagatgcagataactgtgattggaatattttgtgtgtttatgtttatggataggaaatcatatatacatgttgaacaaaaggaaagtccaatgtagttctattctttgctccttttaggtaaggtgttttgcttcctctggcttttttcaagatttattctgtctttgattttctgcagtttgaacatgawatgcctacatttagacttttatatttcttctgcttagtgttttctgaatgtcctatatctgtggtttggcaggtgaccttaattttaaaaaattattcgttactatgctttaaatatttcttcagtttctctatctctgtcttatacttctgatatttgtttattttacacctttaataatagtaccat

SEQ ID NO: 686707 - DNA, 607 bp, Homo sapiens
gaaaaagagattgagagagaaagagaggggtaaagaggtagggggaggagagagaggctggaaaggggacaatgtgaaagcaaacattaaaaaacatgccaaatgcagaattgaactatttataaaatccgctaaaatatctagacttattcaccagagaatgattaataccagttcttccacagagtatttatatttagcaaataaacaattttggtgctgaactacccatttacataaatagtgattgaataatcaatatattagtcaaaatgttgcaacatttttttcttaaaagtctttttaaaataaatgttatctgatagaagatacacaaattgttttaattaaataagmgtttctgtgagaaatatttaagtccctaagatcaaacacacagctttcaaaataaataatttgtgtatctctattaaaataagttgtatttacagacatagagatttatttcctaattttttctgtcaactttcatatgtaataggtaatcaaattacttgaaataagactgtagatgagtttcaaaatgatacttcattcaagaactttagattataatatgcagatgaattttttaacatttgtaagc

SEQ ID NO: 686708 - DNA, 607 bp, Homo sapiens
gaaaaagagattgagagagaaagagaggggtaaagaggtagggggaggagagagaggctggaaaggggacaatgtgaaagcaaacattaaaaaacatgccaaatgcagaattgaactatttataaaatccgctaaaatatctagacttattcaccagagaatgattaataccagttcttccacagagtatttatatttagcaaataaacaattttggtgctgaactacccatttacataaatagtgattgaataatcaatatattagtcaaaatgttgcaacatttttttcttaaaagtctttttaaaataaatgttatctgatagaagatacacaaattgttttaattaaataagcgtttctgtgagaaatatttaagtccctaagatcaaacacacagctttcaaaataaataatttgtgtatctctattaaaataagttgtatttacagacatagagatttatttcctaattttttctgtcaactttcatatgtaataggtaatcaaattacttgaaataagactgtagatgagtttcaaaatgatacttcattcaagaactttagattataatawgcagatgaattttttaacatttgtaagc

SEQ ID NO: 686709 - DNA, 617 bp, Homo sapiens
tgcataacaccatgttccaagtttgaaacgagatgcatcagaaacctcaatgtggaaggtaaaatgataaagtagaatatccttatttttagtgatatgtagcttgccactctggacagtaatctggcaatacaaaatttaagcatgtgaaaatcttagaaagtcagatcacagataaatattccaaagatattctcacacaagggaaagtatgcaaggatattcattctggtgttatcctgtgatgacawggccctggatgcaatctcaaagtcaatctctggagaacaatactgagaaactaaaagatagagaaaaggtgcacctattaacagagacaagtttttaaaaaaatgctgagcaaaagtacaatagaatgagaaagcattagagcacaataaactatgcaatcctaaaatgtatgtaaacagacaacagaaatactgcttacaggaatgtatttgaatgtatatatctttatgtacatattacatattcacacatacacataaatgtataatcaggcgggccttgcataggccagtggtgatgttttccatagaccaaataatatgattaattcaactatttgcaagtgaagaccacaaagaaaaata

SEQ ID NO: 686710 - DNA, 617 bp, Homo sapiens
tgcataacaccatgttccaagtttgaaacgagatgcatcagaaacctcaatgtggaaggtaaaatgataaagtagaatatccttatttttagtgatatgtagcttgccactctggacagtaatctggcaatacaaaatttaagcatgtgaaaatcttagaaagtcagatcacagataaatattccaaagatattctcacacaagggaaagtatgcaaggatattcattctggtgttatcctgtgatgacaakgccctggatgcaatctcaaagtcaatctctggagaacaatactgagaaactaaaagatagagaaaaggtgcacctattaacagagacaagtttttaaaaaaatgctgagcaaaagtacaatagaatgagaaagcattagagcacaataaactatgcaatcctaaaatgtatgtaaacagacaacagaaatactgcttacaggaatgtatttgaatgtatatatctttatgtacatattacatattcacacatacacataaatgtataatcaggcgggccttgcataggccagtggtgatgttttccatagaccaaataatatgattaattcaactatttgcaagtgaagaccacaaagaaaaata

SEQ ID NO: 686711 - DNA, 624 bp, Homo sapiens
tgtgacaagcactgtatttccatttgacagcgttgctttggagcctttcacagagccagccagcctctgctgaattcttctggtgatggggaacttacacctcatgagacagctcatgctaaaggcattaacactggagacgcccttggaggtcgtcttccyactgccatcccaccctctagtcctgctagccctgtgctgcctggtggggagggcctattctctctaaggggcccacctgcagacttttgaagatgatcagctaagatcccagttaaatgcccctgatgcctttagctgatcttcccggtcaaccttccaaaacacacagtggcttggcagtgacggcacggcactggatgcgccagcgggtctaggtggctctgaccccatcccgtccgctcactgggtgatggggcagggggcctgggaggaaaatggtgagctggagccacccctggatctcagactttgctgattttaccccaggccttctcccaccgtgtcttgccatgcagctggagatggcttcattttttacatcatccacctatcggaatggactctccatgggtcattctgagaccctctccccacgctgagtacagagctttgcacacgcca

SEQ ID NO: 686712 - DNA, 2533 bp, Homo sapiens
cgccgcatcctccacggaagcttccggtgcctggtgatgtttacctcagcaagggagactatctgtgatttcaccttgattgagcacacacggagagcaaaagcaacggaattcacgacgcgtcccccaggaagaccctgggtcctctcagggccagtccctctcccccggccagccccctcccctccccttacaatacttgaaggcactcacagccctctcccccggagccatttactggcttgcaataggatggaataagattctcttttataggagactgcagtttaataataaagtaattaccgtgacaaaatcccatttttcgagcttggggttttttcctcctatcctctcaaacttggtccrctggatcccaggccagggcctcccagagagtcctgctgatggtctagattttcagatgagctccttcttgccctgaaaggtgaccagtatcagccccaaccctcctcactggccatcatgcaccagcaacaaaagcttcagggttcctaggaggggtcagatgttgggggaccacggcacggggctacccttcagggagctaggccggcgcccaagtggggctcctggaggtgggctgagtgggcaggaaagcttcaaagggcatgaagtgagtgtggcccagggtcacccctcatgagctcttaacaaacaccagagcccaatgcacagctggagttctcctggtgtcagatgatccgaaatcatcccgggatggtcggaactcagaaatatcacctccgctgctgggagaggggctgagaagacagagggaccaacaacaagtgcctctaattaatcacagaactgttgtgtctcaggagggacacaccccatccccagcctacctagggtccaacccaaggcagcaggaaaaggctcatgcttcagtagaacggaattccgctgggtgaggttttagttggtaatttccagtgtgaaagactataggcttagaaagcctgtttaaatgctgcatcttaatgtgcctcaaactacgtctcctgtcttgcttgatttcacgtcttttgctcccgctcttgttatcaaatgtgctgttgagattgaatgtacagcctacatatggtgccaacactcacgcagaggacctgcagcccccacctgggaggctggagcaccacaggctctcatttctagaggcctggccgggtatggccctaggcccctcctcctgtggcctttacctccgggggctgctgcaggctctggctcattccaaaggtggtttgggataagcgggttcccaaactaaatgtcgttatttgtttcttaacggttctggaccgccccagctgtgtgtgctcacctaaaaacatacacccacaaatagccaggaaatggctgcattctagacctttccggagtccaccgagacacatggccaaccaccccagcagaacagccgcgggcgagggaaggaaagtgaatgctcaaagcccggggcaacagcaggctctggctttcccagggacaattcgggatggctatggctccgtggacatctttttgccttcccactgcccctacagaaagctccaaatgccacaagtcagggatgcattcacctagctctggagaaatcggggtgtcttccccgtgggtcatgttggtggactcaccccaactatgagcgctggtctaattctaccgagacagcgccaaatgtgtggctgccatttttcggaggcttgcctctacttcatcttaactcagccctcacattcagccagtgaggactatgtcattcaaggaagacactgaggttcagagtggtgataactaagacaacagaatcaataaaccatggattggtctccagaccaggacccttactctaaatcctacactctatctgcagaaacccagagctacgcttcctgctgcctgggacattcctgccatgcctgggtggctgtacagcagatctgtccccaataacctgacctggccaccccagagattcccaagtcagtcctatgctcatggaaaaccgggaggggctgggaacctgacctcggaggcctatcctgactccctgtgattcagtgtcaactgggaatttagggcaatggccatggcctgggattggatgacttcctgcctgtcagtttgggggctccccagtggctcctgggctgtgtccaggagtccccagatgtcacaggtggtcctgggaagatggcaccaaagatcaagggccctgggctgcaggccactgccggccaccctctgccactgccggccaccctctgccactgctggccaccctctgctcctggaccagcctctgctcctgaccatcacacagttcccctgtccctctgcggctgctacgtttggcagtccctcatgcatgggcccttgtaacgggctgacccaagtgcccaggggctagctgccctgggccagctcggaaggtcccatctttgccttctctgtccattgctccaccttaaaccaccttctatagctccttggagggcca

SEQ ID NO: 686713 - DNA, 2533 bp, Homo sapiens
cgccgcatcctccacggaagcttccggtgcctggtgatgtttacctcagcaagggagactatctgtgatttcaccttgattgagcacacacggagagcaaaagcaacggaattcacgacgcgtcccccaggaagaccctgggtcctctcagggccagtccctctcccccggccagccccctcccctccccttacaatacttgaaggcactcacagccctctcccccggagccatttactggcttgcaataggatggaataagattctcttttataggagactgcagtttaataataaagtaattaccgtgacaaaatcccatttttcgagcttggggttttttcctcctatcctctcaaacttggtccactggatcccaggccagggcctcccagagagtcctgctgatggtctagattttcagatgagctccttcttgccctgaaaggtgaccagtatcagccccaaccctcctcactggccatcatgcaccagcaacaaaagcttcagggttcctaggaggggtcagatgttgggggaccacggcacggggctacccttcagggagctaggccggcgcccaagtggggctcctggaggtgggctgagtgggcaggaaagcttcaaagggcatgaagtgagtgtggcccagggtcacccctcatgagctcttaacaaacaccagagcccaatgcacagctggagttctcctggtgtcagatgatccgaaatcatcccgggatggtcggaactcagaaatatcacctccgctgctgggagaggggctgagaagacagagggaccaacaacaagtgcctctaattaatcacagaactgttgtgtctcaggagggacacaccccatccccagcctacctagggtccaacccaaggcagcaggaaaaggctcaygcttcagtagaacggaattccgctgggtgaggttttagttggtaatttccagtgtgaaagactataggcttagaaagcctgtttaaatgctgcatcttaatgtgcctcaaactacgtctcctgtcttgcttgatttcacgtcttttgctcccgctcttgttatcaaatgtgctgttgagattgaatgtacagcctacatatggtgccaacactcacgcagaggacctgcagcccccacctgggaggctggagcaccacaggctctcatttctagaggcctggccgggtatggccctaggcccctcctcctgtggcctttacctccgggggctgctgcaggctctggctcattccaaaggtggtttgggataagcgggttcccaaactaaatgtcgttatttgtttcttaacggttctggaccgccccagctgtgtgtgctcacctaaaaacatacacccacaaatagccaggaaatggctgcattctagacctttccggagtccaccgagacacatggccaaccaccccagcagaacagccgcgggcgagggaaggaaagtgaatgctcaaagcccggggcaacagcaggctctggctttcccagggacaattcgggatggctatggctccgtggacatctttttgccttcccactgcccctacagaaagctccaaatgccacaagtcagggatgcattcacctagctctggagaaatcggggtgtcttccccgtgggtcatgttggtggactcaccccaactatgagcgctggtctaattctaccgagacagcgccaaatgtgtggctgccatttttcggaggcttgcctctacttcatcttaactcagccctcacattcagccagtgaggactatgtcattcaaggaagacactgaggttcagagtggtgataactaagacaacagaatcaataaaccatggattggtctccagaccaggacccttactctaaatcctacactctatctgcagaaacccagagctacgcttcctgctgcctgggacattcctgccatgcctgggtggctgtacagcagatctgtccccaataacctgacctggccaccccagagattcccaagtcagtcctatgctcatggaaaaccgggaggggctgggaacctgacctcggaggcctatcctgactccctgtgattcagtgtcaactgggaatttagggcaatggccatggcctgggattggatgacttcctgcctgtcagtttgggggctccccagtggctcctgggctgtgtccaggagtccccagatgtcacaggtggtcctgggaagatggcaccaaagatcaagggccctgggctgcaggccactgccggccaccctctgccactgccggccaccctctgccactgctggccaccctctgctcctggaccagcctctgctcctgaccatcacacagttcccctgtccctctgcggctgctacgtttggcagtccctcatgcatgggcccttgtaacgggctgacccaagtgcccaggggctagctgccctgggccagctcggaaggtcccatctttgccttctctgtccattgctccaccttaaaccaccttctatagctccttggagggcca

SEQ ID NO: 686714 - DNA, 2533 bp, Homo sapiens
cgccgcatcctccacggaagcttccggtgcctggtgatgtttacctcagcaagggagactatctgtgatttcaccttgattgagcacacacggagagcaaaagcaacggaattcacgacgcgtcccccaggaagaccctgggtcctctcagggccagtccctctcccccggccagccccctcccctccccttacaatacttgaaggcactcacagccctctcccccggagccatttactggcttgcaataggatggaataagattctcttttataggagactgcagtttaataataaagtaattaccgtgacaaaatcccatttttcgagcttggggttttttcctcctatcctctcaaacttggtccactggatcccaggccagggcctcccagagagtcctgctgatggtctagattttcagatgagctccttcttgccctgaaaggtgaccagtatcagccccaaccctcctcactggccatcatgcaccagcaacaaaagcttcagggttcctaggaggggtcagatgttgggggaccacggcacggggctacccttcagggagctaggccggcgcccaagtggggctcctggaggtgggctgagtgggcaggaaagcttcaaagggcatgaagtgagtgtggcccagggtcacccctcatgagctcttaacaaacaccagagcccaatgcacagctggagttctcctggtgtcagatgatccgaaatcatcccgggatggtcggaactcagaaatatcacctccgctgctgggagaggggctgagaagacagagggaccaacaacaagtgcctctaattaatcacagaactgttgtgtctcaggagggacacaccccatccccagcctacctagggtccaacccaaggcagcaggaaaaggctcatgcttcagtagaacggaattccgctgggtgaggttttagttggtaatttccagtgtgaaagactataggcttagaaagcctgtttaaatgctgcatcttaatgtgcctcaaactacgtctcctgtcttgcttgatttcacgtcttttgctcccgctcttgttatcaaatgtgctgttgagattgaatgtacagcctacatatggtgccaacactcacgcagaggacctgcagcccccacctgggaggctggagcaccrcaggctctcatttctagaggcctggccgggtatggccctaggcccctcctcctgtggcctttacctccgggggctgctgcaggctctggctcattccaaaggtggtttgggataagcgggttcccaaactaaatgtcgttatttgtttcttaacggttctggaccgccccagctgtgtgtgctcacctaaaaacatacacccacaaatagccaggaaatggctgcattctagacctttccggagtccaccgagacacatggccaaccaccccagcagaacagccgcgggcgagggaaggaaagtgaatgctcaaagcccggggcaacagcaggctctggctttcccagggacaattcgggatggctatggctccgtggacatctttttgccttcccactgcccctacagaaagctccaaatgccacaagtcagggatgcattcacctagctctggagaaatcggggtgtcttccccgtgggtcatgttggtggactcaccccaactatgagcgctggtctaattctaccgagacagcgccaaatgtgtggctgccatttttcggaggcttgcctctacttcatcttaactcagccctcacattcagccagtgaggactatgtcattcaaggaagacactgaggttcagagtggtgataactaagacaacagaatcaataaaccatggattggtctccagaccaggacccttactctaaatcctacactctatctgcagaaacccagagctacgcttcctgctgcctgggacattcctgccatgcctgggtggctgtacagcagatctgtccccaataacctgacctggccaccccagagattcccaagtcagtcctatgctcatggaaaaccgggaggggctgggaacctgacctcggaggcctatcctgactccctgtgattcagtgtcaactgggaatttagggcaatggccatggcctgggattggatgacttcctgcctgtcagtttgggggctccccagtggctcctgggctgtgtccaggagtccccagatgtcacaggtggtcctgggaagatggcaccaaagatcaagggccctgggctgcaggccactgccggccaccctctgccactgccggccaccctctgccactgctggccaccctctgctcctggaccagcctctgctcctgaccatcacacagttcccctgtccctctgcggctgctacgtttggcagtccctcatgcatgggcccttgtaacgggctgacccaagtgcccaggggctagctgccctgggccagctcggaaggtcccatctttgccttctctgtccattgctccaccttaaaccaccttctatagctccttggagggcca

SEQ ID NO: 686715 - DNA, 2533 bp, Homo sapiens
cgccgcatcctccacggaagcttccggtgcctggtgatgtttacctcagcaagggagactatctgtgatttcaccttgattgagcacacacggagagcaaaagcaacggaattcacgacgcgtcccccaggaagaccctgggtcctctcagggccagtccctctcccccggccagccccctcccctccccttacaatacttgaaggcactcacagccctctcccccggagccatttactggcttgcaataggatggaataagattctcttttataggagactgcagtttaataataaagtaattaccgtgacaaaatcccatttttcgagcttggggttttttcctcctatcctctcaaacttggtccactggatcccaggccagggcctcccagagagtcctgctgatggtctagattttcagatgagctccttcttgccctgaaaggtgaccagtatcagccccaaccctcctcactggccatcatgcaccagcaacaaaagcttcagggttcctaggaggggtcagatgttgggggaccacggcacggggctacccttcagggagctaggccggcgcccaagtggggctcctggaggtgggctgagtgggcaggaaagcttcaaagggcatgaagtgagtgtggcccagggtcacccctcatgagctcttaacaaacaccagagcccaatgcacagctggagttctcctggtgtcagatgatccgaaatcatcccgggatggtcggaactcagaaatatcacctccgctgctgggagaggggctgagaagacagagggaccaacaacaagtgcctctaattaatcacagaactgttgtgtctcaggagggacacaccccatccccagcctacctagggtccaacccaaggcagcaggaaaaggctcatgcttcagtagaacggaattccgctgggtgaggttttagttggtaatttccagtgtgaaagactataggcttagaaagcctgtttaaatgctgcatcttaatgtgcctcaaactacgtctcctgtcttgcttgatttcacgtcttttgctcccgctcttgttatcaaatgtgctgttgagattgaatgtacagcctacatatggtgccaacactcacgcagaggacctgcagcccccacctgggaggctggagcaccacaggctctcatttctagaggcctggccgggtayggccctaggcccctcctcctgtggcctttacctccgggggctgctgcaggctctggctcattccaaaggtggtttgggataagcgggttcccaaactaaatgtcgttatttgtttcttaacggttctggaccgccccagctgtgtgtgctcacctaaaaacatacacccacaaatagccaggaaatggctgcattctagacctttccggagtccaccgagacacatggccaaccaccccagcagaacagccgcgggcgagggaaggaaagtgaatgctcaaagcccggggcaacagcaggctctggctttcccagggacaattcgggatggctatggctccgtggacatctttttgccttcccactgcccctacagaaagctccaaatgccacaagtcagggatgcattcacctagctctggagaaatcggggtgtcttccccgtgggtcatgttggtggactcaccccaactatgagcgctggtctaattctaccgagacagcgccaaatgtgtggctgccatttttcggaggcttgcctctacttcatcttaactcagccctcacattcagccagtgaggactatgtcattcaaggaagacactgaggttcagagtggtgataactaagacaacagaatcaataaaccatggattggtctccagaccaggacccttactctaaatcctacactctatctgcagaaacccagagctacgcttcctgctgcctgggacattcctgccatgcctgggtggctgtacagcagatctgtccccaataacctgacctggccaccccagagattcccaagtcagtcctatgctcatggaaaaccgggaggggctgggaacctgacctcggaggcctatcctgactccctgtgattcagtgtcaactgggaatttagggcaatggccatggcctgggattggatgacttcctgcctgtcagtttgggggctccccagtggctcctgggctgtgtccaggagtccccagatgtcacaggtggtcctgggaagatggcaccaaagatcaagggccctgggctgcaggccactgccggccaccctctgccactgccggccaccctctgccactgctggccaccctctgctcctggaccagcctctgctcctgaccatcacacagttcccctgtccctctgcggctgctacgtttggcagtccctcatgcatgggcccttgtaacgggctgacccaagtgcccaggggctagctgccctgggccagctcggaaggtcccatctttgccttctctgtccattgctccaccttaaaccaccttctatagctccttggagggcca

SEQ ID NO: 686716 - DNA, 2533 bp, Homo sapiens
cgccgcatcctccacggaagcttccggtgcctggtgatgtttacctcagcaagggagactatctgtgatttcaccttgattgagcacacacggagagcaaaagcaacggaattcacgacgcgtcccccaggaagaccctgggtcctctcagggccagtccctctcccccggccagccccctcccctccccttacaatacttgaaggcactcacagccctctcccccggagccatttactggcttgcaataggatggaataagattctcttttataggagactgcagtttaataataaagtaattaccgtgacaaaatcccatttttcgagcttggggttttttcctcctatcctctcaaacttggtccactggatcccaggccagggcctcccagagagtcctgctgatggtctagattttcagatgagctccttcttgccctgaaaggtgaccagtatcagccccaaccctcctcactggccatcatgcaccagcaacaaaagcttcagggttcctaggaggggtcagatgttgggggaccacggcacggggctacccttcagggagctaggccggcgcccaagtggggctcctggaggtgggctgagtgggcaggaaagcttcaaagggcatgaagtgagtgtggcccagggtcacccctcatgagctcttaacaaacaccagagcccaatgcacagctggagttctcctggtgtcagatgatccgaaatcatcccgggatggtcggaactcagaaatatcacctccgctgctgggagaggggctgagaagacagagggaccaacaacaagtgcctctaattaatcacagaactgttgtgtctcaggagggacacaccccatccccagcctacctagggtccaacccaaggcagcaggaaaaggctcatgcttcagtagaacggaattccgctgggtgaggttttagttggtaatttccagtgtgaaagactataggcttagaaagcctgtttaaatgctgcatcttaatgtgcctcaaactacgtctcctgtcttgcttgatttcacgtcttttgctcccgctcttgttatcaaatgtgctgttgagattgaatgtacagcctacatatggtgccaacactcacgcagaggacctgcagcccccacctgggaggctggagcaccacaggctctcatttctagaggcctggccgggtatggccctaggcccctcctcctgyggcctttacctccgggggctgctgcaggctctggctcattccaaaggtggtttgggataagcgggttcccaaactaaatgtcgttatttgtttcttaacggttctggaccgccccagctgtgtgtgctcacctaaaaacatacacccacaaatagccaggaaatggctgcattctagacctttccggagtccaccgagacacatggccaaccaccccagcagaacagccgcgggcgagggaaggaaagtgaatgctcaaagcccggggcaacagcaggctctggctttcccagggacaattcgggatggctatggctccgtggacatctttttgccttcccactgcccctacagaaagctccaaatgccacaagtcagggatgcattcacctagctctggagaaatcggggtgtcttccccgtgggtcatgttggtggactcaccccaactatgagcgctggtctaattctaccgagacagcgccaaatgtgtggctgccatttttcggaggcttgcctctacttcatcttaactcagccctcacattcagccagtgaggactatgtcattcaaggaagacactgaggttcagagtggtgataactaagacaacagaatcaataaaccatggattggtctccagaccaggacccttactctaaatcctacactctatctgcagaaacccagagctacgcttcctgctgcctgggacattcctgccatgcctgggtggctgtacagcagatctgtccccaataacctgacctggccaccccagagattcccaagtcagtcctatgctcatggaaaaccgggaggggctgggaacctgacctcggaggcctatcctgactccctgtgattcagtgtcaactgggaatttagggcaatggccatggcctgggattggatgacttcctgcctgtcagtttgggggctccccagtggctcctgggctgtgtccaggagtccccagatgtcacaggtggtcctgggaagatggcaccaaagatcaagggccctgggctgcaggccactgccggccaccctctgccactgccggccaccctctgccactgctggccaccctctgctcctggaccagcctctgctcctgaccatcacacagttcccctgtccctctgcggctgctacgtttggcagtccctcatgcatgggcccttgtaacgggctgacccaagtgcccaggggctagctgccctgggccagctcggaaggtcccatctttgccttctctgtccattgctccaccttaaaccaccttctatagctccttggagggcca

SEQ ID NO: 686717 - DNA, 2412 bp, Homo sapiens
tctgcgcttctgttaccacattaagatggaaattgaatttggcagcgactgcttttgcttgctcagctttttagaaatccttgtggtagcagtgggactgtcaagttcagtctttccttctcccagtttcagttgagggataagccaatcaaactctctttctcaggaatctgaatctctaatgaagttacaaatgataaaatgtattctatcaccagcttgtagatgaaatcatccatgtgttcctgcctgaaatttccaaagctgcttgtctaattatttacaatacgcagttttagttgttcaacttttcctttaaatatacaagctaccaagtatctttacaatacagtcctttttgcggcatgcaaccaaagaattttcactgaaacaaaaactttttcattaatttttaccactgacatatctctttcaagtgtcagagctatgcttaatccccaaatgccaatgagcattgagaatagtgtcacattcaggatgggtcaatatgtatattgacaagggagattttgtagttctctcaggagtcaagaagtttcaagatcactgctacacattatctatgtaatttatacataaacaatgatcagaagtctctttgggaatctttctctacagataatgttgcattcctaattgtataatcattcatgcaattatgaatttatctatacctggtacattgcaatatttctctgctttggaaagttgtgccctacctacagtatgcaaaattattttattatcaataagcatataaacaatagaagtaatcatgatggaaaagatcagcgatgtaattcaaaaattttaaattctggacatagaaaacatggaaactttttgatttagcaattcttcttttggaaatgtagtctctgcacatatttccaaatatgaaagttcgttgaattattaggctgagttggcacataacctaaatattcagtgataaggagggtgatatagttattcaatggagtattgcacagccactcaaaatgctcaggttctgtcatagaagttgcgaggagagctggagttccatcctaacctaatcactttcttgagaaatctttggcaagttacttgaccaatctgtgcctcaatgccttcatttgtaaaatgttcataataataacacatataatattaccatgagatctaaatgtgttactactgtatacataaaattcttataatgatgcccagaaaaagcaccattaagacagacacaaattctgtgatcttaactttgttttaaaaagaaatggaatacattcaaaaccctagagcaagcttttccagcccacagcccgtggaccacatgcagcctaggatggctttgaatgtggcccaacacaaattcataaactttcttaaaacatgaagagatgtttttgcgatttttttttaagctcatcaactrtcattagtgttagtgttttgtgtgtggcccaagacaatttttcttccaacatggcccagggaagccaaaagattagacatccctgccctagagagattcattaaggtgtaacaattatttaacgggatagtggaattacagctgacttttttctatcagatttcttttttttttttgaatgacattttacaatgaaaaaggatgcctcaaaaataatacttatctgagtcactttttatacaaatcaaatcatccaattaactgtgcaaaattacatgtatgcacatgtagctttattgggagttaagagggcctcatttagagaaacttagaattcaattcatccatagatgtttctttcaagaaaatagttttttatggaaaaatcgcattgttattattcccaaagaaataatgtccttttatatgttcacatgtaggcattggctaaaatcaaagtttgatgactttacattaattttaatacagaaaacatattaaaggattatagcacaaaccaggctactcagtacaatctaatgacagtcacactttcttgggaagggaccaatcatccttggtcaagatccatgttaatttcagagaagcttttaggggaaagattttctgatttggaaaacacttctaaagaacttaaagtgctcccaggtctatttgaaacctcatttgcaatgatcagagctgtgtaccagctatactatgatttctgataatgggttctgcattaatttctgttgtttcaggagtttatgtagataaaactcatctaggcttgtcagtcttatcacactgagatggtaagagagttagatgtagacttactggaatgcctaaagatgggctataggaggagaaggccctacccaacttacccagtaaaaatacctatcacttaatgagtgcttaaaaggtggctgatatccttcctagtgtgattagtt

SEQ ID NO: 686718 - DNA, 1688 bp, Homo sapiens
tacacttaataaatgataactattattagaaacacaagaaagaaagaggaaattaattttcttcttctaccccttctctataacctgatttcagaatcaaacttgctgttgctaaagagaaagtggctgcagtttccttctgacctggctgcgtatttcttcatcactgcctgtccttcattgagctaaaggaatcagtgtcacacaaaatcattctgccttccaaaggtttggactcttaaagaagaccatactggtgattgttatttttatatttgatttttgttttaaggcagtttttttaaaggcattgccagtaagtcacattgtctagttatccaaagcccaagccaattagcaagtgaaaagaatgttctgaacctaatgatctctaagttgcttctttatattaactctttaattctatatatgaaaattagttcttatcttataaaatgtcattccttctttcattctcttagattctcaatcattttgatttggggaaagaattagggaaattttcttgaagtgacagatatttttaatgagttatgagactttgaacaatagacgttattctagagcagaaaagtctttaaattcaagcctttttgcctgcagttcaaagttctttgtagtaaaagactaatatatatataatagtatagtgtttaccgtccagaattaggctttttttcatgatgttttcatgaatctgtagagcatggacatgactgtgtccatcaatatttgctatgaattccttttgtgaaaatgcaactttatctgtatacctaggttagaatgacctacacaaaaaagaagtaagtccacagaagggcagtgaggggacagaaatgagaagtggtgtctttttgtttaagcctagactgaaattttgtatcagggcactgattggttggcttatatcttaaccacgctactccacgacaaaaattccagttcstttaacttatacttaaatgtttcattcatttctgattttctttacatttgaagatctttaaaatctaaaatgaatattctttattactttaaacataccttctgtattctgttatgaaagagaataataaaaattatgtcagattttgaaaacaacatgcatcttaaagtttaatgtcaactatttgttaaatatcatactatataaaatattaatgattattttaaatgtttgaatttatattagaataatgatgagaataaagagctttggcaaaaaccagttagatccgagaaaattttagtaacgtttaaaataatataaaaatatagagagcttataaatcaagttagatatccaaaacctggtactgactgtaaaggaaatctcattctaaacaatgcagccaacatagagaaaagacacatgaaaagaaaggaaattactgaagctattacacacacaacacactcagataggagtccagctgctgaaggaagctgttggttcttgatctatggaagttcctaattagaatacaagttagaaatataacagaaaacataaaaaagaaagaaatttactgtaagactaaggttttgttttgcttctttaaatgttagcaaaaacagacttagagaagcctggctaaataagtaataaataatttttataactactgacttttgataccaattatactttatcaaagtttcca

SEQ ID NO: 686719 - DNA, 620 bp, Homo sapiens
gcaggcattaaaccaaagattttgacttctcaaaacgatctttttccccctttgaactctccataaccctactcaaacccacgaacacaaactttatagttttctcacrttcatttaacacaggtcatgcgtcctgatagacacctaattcattcaataaacatcgagaaatattaacactattttaccatgcatttgcagagcttttgtgtctgtgatatttttctaactcttttaaaatttcaaagccttggaattattcaatggcaatgacactctctttttctttataaatatcctgtctagaaataatattaaaactctaatatgatttgatcatttaaaagtataagttaaaatgtgagatttcttgtgttcttatgcttccattttgcttttgaatagtaaaacttctctttcctattcttactacttttaaaaatgtggctccctcaaaaatatcactgcaaaagggtttaaagtaagcagtaccaatgaaaagtatagaaagccctattcacttagtcttgaacatactttctagtctgtatactgttggatattttccttctgataatgtgttttactcctgtcttccttttctgcaatgttgcattcaa

SEQ ID NO: 686720 - DNA, 668 bp, Homo sapiens
aacattgcctaaatgaaaaattttatgtattccttacttcctgaaggaactgccacggggtcggtcctaatcagcacttcattttaatacagtatcatcgagttctaaggattaattttataaacgattaatgaaagtacttaattgaatgtcactctctgctgccttcagctattacaggttgttgctctcactgattccagatcgatgcttttttaaacactcagctttgcagtactttaaactactttgcagtctctaaacttcatttagagactcacctgtggctcaaataaaacaatctgggatttgagttattgttgttgttgtttttggaatgattgtacaatgcttgaccagcgacagttcatgttgatttcctccaacagttcatgtttgctttcctccatagaaacagaaactcaaccgggcatggtggctcatgcctgtaatcccagcactttgggaggccgatgcgggtrtatcacgaggtcaggagtttgagagcagcctggccaatgtggtgaaaccctgtctctaccaaaaatacaaaaattagctgggtgtggtggcgggcgcctatagtcccagctactcaggaggttgagacaggacaatcacttaaacttgggaggtggaggttgcagtgagccaagaacgcgtcactg

SEQ ID NO: 686721 - DNA, 633 bp, Homo sapiens
ttttttaaactttgttaatagaggaatggtgaagaaatatcaatgaaatttggctaaggtttcttgagtcagcaaaaatcccaatttatgtatctttatgcagttgggggaagaccccaaacttattacaagaaccaacaaattttgctaaacataaaggaaataatacactgattacraaattaaatgtaactttccaaatatttttcaaacttactggttacttccttacctgtcccagagaagatgaggacattttcactccaactggctttaaaattcctaaatgaaaaccattcaatttgtaattgttatcaaataattaccacaatatctgttagaatacagtttgggcatacatttgtgtagccataacaaaaataaataatattcaaggactaaagtcacttttcacatattgaaaatattgggttcaattattacaaagcttaaggttcttagtaatgtctctaatcaaataaagataatttaggtaatagagactcaatgcttctgttgattacataaaaatacatttcccaagtcattaatatagaggaagtattatgtctcaataggctttatcctctgtctttaattaattgttattattccccaatgtgctgggtgtac

SEQ ID NO: 686722 - DNA, 633 bp, Homo sapiens
ttttttaaactttgttaatagaggaatggtgaagaaatatcaatgaaatttggctaaggtttcttgagtcagcaaaaatcccaatttatgtatctttatgcagttgggggaagaccccaaacttattacaagaaccaacaaattttgctaaacataaaggaaataatacactgattacgaaattaaatgtaactttccaaatatttttcaaacttactggttacttccttacctgtcccagagaagatgaggacattttcactccaactggctttaaaattcctaaatgaaaaccattcaatttgtaattgttatcaaataattaccacaatatctgttagaawacagtttgggcatacatttgtgtagccataacaaaaataaataatattcaaggactaaagtcacttttcacatattgaaaatattgggttcaattattacaaagcttaaggttcttagtaatgtctctaatcaaataaagataatttaggtaatagagactcaatgcttctgttgattacataaaaatacatttcccaagtcattaatatagaggaagtattatgtctcaataggctttatcctctgtctttaattaattgttattattccccaatgtgctgggtgtac

SEQ ID NO: 686723 - DNA, 633 bp, Homo sapiens
ttttttaaactttgttaatagaggaatggtgaagaaatatcaatgaaatttggctaaggtttcttgagtcagcaaaaatcccaatttatgtatctttatgcagttgggggaagaccccaaacttattacaagaaccaacaaattttgctaaacataaaggaaataatacactgattacgaaattaaatgtaactttccaaatatttttcaaacttactggttacttccttacctgtcccagagaagatgaggacattttcactccaactggctttaaaattcctaaatgaaaaccattcaatttgtaattgttatcaaataattaccacaatatctgttagaatacagtttgggcatacatttgtgtagccataacaaaaataaataatattcaaggactaaagtcacttttcacatattgaaaatattgggttcaattatkacaaagcttaaggttcttagtaatgtctctaatcaaataaagataatttaggtaatagagactcaatgcttctgttgattacataaaaatacatttcccaagtcattaatatagaggaagtattatgtctcaataggctttatcctctgtctttaattaattgttattattccccaatgtgctgggtgtac

SEQ ID NO: 686724 - DNA, 592 bp, Homo sapiens
ttgagccaaatagagagaggtgccagaatacaaatgacacagagaaatgtgtctgtgtctttacctcagttaatccaacataaattagaggtagatatcaaaagaagactaataacacacagggtgagaaattggtcaaaagagggaaatttttaagtttgggtcacaatagatattattcttgttattctttataagactcaggattccatttctctacttttccttaattcatatttcttgtactttgtagatattttaactttaacatatttacttttttctttcttgttatacaaattctattgtaacaacacacacaaaaataaaartaaacccaatgcaaagccacggtcaacatgtggttcacctagatattttatattaatatgaaatactgatttatgcacacacatgtgagcatatacagacttgcacagatgtacattgagagaagataattttgatttgctacctatttttacacttgactatgtattagagatcatgacattatcaggttttaatgggctcacagttctccattgtatggaggaaatatgactctttaatagagggttagcatcttgta

SEQ ID NO: 686725 - DNA, 592 bp, Homo sapiens
ttgagccaaatagagagaggtgccagaatacaaatgacacagagaaatgtgtctgtgtctttacctcagttaatccaacataaattagaggtagatatcaaaagaagactaataacacacagggtgagaaattggtcaaaagagggaaatttttaagtttgggtcacaatagatattattcttgttattctttataagactcaggattccatttctctacttttccttaattcatatttcttgtactttgtagatattttaactttaacatatttacttttttctttcttgttatacaaattctattgtaacaacacacacaaaaataaaaataaacccaatgcaaagccacggtcaacatgtggttcacctagatattttatattaatatgaaatactgatttatgcacacacatgtgagcatatacagacttgcacagaygtacattgagagaagataattttgatttgctacctatttttacacttgactatgtattagagatcatgacattatcaggttttaatgggctcacagttctccattgtatggaggaaatatgactctttaatagagggttagcatcttgta

SEQ ID NO: 686726 - DNA, 1913 bp, Homo sapiens
taactagaatgaaaacataatgttaaatattttctaataaactgctattttggaaatagtggaataagaaagttcaaccagttgttttcatgatctacaggmcagaattaaatcacttgcttttacgtcagtgtctgtgtatttgggggaaacatttataaaacatgaataaatattcacttgaaattctataattatgacaaatccattccattcaggcctatccaactgagctttgctcatggagatatcgttactgtaacaatgttctcctgagtgaaacaaaaggaatttagcaaaaccaataagcaatcatgtttttttacttaaaacgtcagcatacaggctggcaccttggctcactcctataatgctaaaactttgggaggttgaggtgggtagatcacttgagctcagaagttcaagaccagtctgggcaatatggcaaaactccttcttgacaaaaagtacaaaaatcagtcgggtgtggtggcatgtgcctgtagtcccaactacttgggaggctgaagtgagaggattgcttgagcccaggaggtggaggttgccgtggaccataattgtgccacaacacttcagcctggatgacagagtgagaccctgtagttaagtggaattacaaaaatcactaaatatagagattcttcctcaaataaacttattttcttcccttacccttatgcatatccactagtgaaccttaaaaatcataaaaacattatgttcaaaatagttattaattattctatgctgtaaagctaaaaatggcataggattcatgaggatcagaaggataaaagtactcctaaagtgaacataaaacagtgaaatgttcttttcatttaactgagagaaataaagaaacagagctaaaagggaagaaattaagatgagatttgaaaataatttccatatttctattttgtttctgatagctttgttgtagtcattcaggccaaggatgttgtttatgcttaaacatttctcttgccacactgatttttttcacgaatatcagcaaaaatatgtcattagaaatacacacatatacatgcatatgtgtatttctattaaacatcagctttttcagatgcattgctcctacttagccgaatttcccaccatttatttgaggcacaggggagctgaagacaagatgaattttaaggttatatatctggagtaaaatagtctctacctatttaatggtatgaattcagaattaacagcaaaggaactcaaaggaatatacctaaaactggtcacgttaaagagccagaattctcacattgactacatcaataggtcgttaagaatctaagaccttatagaatgttggcataaggtgaacaaattaatctgtgatttcccagtattgatttagcttgaattcatttgtgagattgttttaacagaaaacaagccttgtggttcagagtctaagacacatcagtttgggatgggaagaagtctaaatcaagagacagcatgcattctgccttgaatggtgaaaataaaattaggcatttagctaagaatcaattgtatttatacaacaacataaaataaaaaccacttactttaactgacttgtgcagatagcttcaaaagtcagatgcgacttcatagaacatgtatccaacacttcaaccttcccttcatgtaagaatcttttctatctgactgaaaatcatttggcctctcctgaaacaattttagtgatggatggatcattacttcaaaaagaagctgcatacgtggggatgcctggcactagaaagagcttctccttgccattctcagttctagctttggggtagtccagagtaaatttaagcccatgtttacctgatagccctagacacatatgagatgcttttcaaattcttccctaa

SEQ ID NO: 686727 - DNA, 3642 bp, Homo sapiens
taagtcacatgccaagtgtgatgtagaatatagtgacaaaaaaagacaaacgaaagacacagataagcaacaaaacaatgcctgctctcagagatgttacaatgaactgagaaagacaaaagtgtaagcaactaactatactaaagagtagaaacaaaaagagcccaagctttaaataatgtttaatgaaatgataaatttttctgaggaacttgaaaggcagctcaaaagtgtgaattggagcttgttcttaaagaatgaaaagtagagaagaaagggggaagaaacacagaaaaagaataagcagagaaattgggtagggtattcaaagctgaacaactaatggttcaagggtatcactatcattaacacatgctttagtcaccaggaactgctaattttacttctcaaatctctcaattacatctgcttctccatttttatttccattgccatcattgcttgtcactgaatttattgtaataacttcttcataagaatttattgttagatggatttattgtctgttgctatatttcaggcacagaattaagcaccttttgcacagcctcacttaattctgaggtatggtgtattctattattagccccatttgatagaaaaggattctgaggcttgaagacgttggtggaagaaacagaacttgcctccaactagcatgacttctaagaatgtgttgtcaagggcgtaagtgactcactcaccttgctctacagcagggggtccctttgttccatccccaggccaaatcctgctgctgcctgttattgtaaataaaatttgttttaacacatttacatccttatgttgacatattgtttatgggtgcttttgtgttacaatgacagaattggtgcagagttgagtggttgcagcagaaaccatctggcccccaaagctgaaaattatttactatctggcccttgacagaaagagtttgtacccccgtgaagcaccctgatattttgtagttttgaaattatctagtatatcttcttgttattgcaaacaattgttccatttaaaagaaaatactggttaaatattattagatgccaggtactgttctaggtgctaggacaaaagcagaacaaaacaggtatagctgcttctttgtggagctcatatcttaaaatgctgaggagaaagaggagaaagaatgagaaagataagcaaacatgtaaatgcataggatactattaaatattagcaaaaatgctgtgaagggaatgagttcaactgatgggatggaatgaggctggtgtgtgtgggtgatacttttcacttttatgaatggtttggctaatcaggtgtttcatgaatgggaacctgagacatatgaaggatcaactgtgtgtagattgagattagaatgtttcttgtagaactgaaagtgcaaaagctttgtgtagaaataagcttggaatgttcaaggaacttgaagaaagcaagtgaagtttacaaggcaagaatcgaagttaaaaaaagggggctggagacagagaagactgaactttgttaaccgtcaagttgagataatattaaatattttagtgcatttggaaaatgtttgagaacattagtagagaaatggtgtggtctgatttacatatgaggagatataattataaagtaaagccaacggatttgttgttagacagtagaaatatacacccacactgtgaccagcattgtgctgtttaccaatacatgattctctgctccttttaggcaaatgagacattgtatgtcctcaccacctttcaattagactcagccatttgacttgctttaggtaaaaaatataagagactaaatctgagtcaaagtaattactggcacttttacagaattgcagttgagcaactctccagcacacttctccctgccaccaacaatggaagcacatgtctgtaagtgggtggcatgagctctaaccagacattcaaactgagccaacatgtatagaacagctgccctggagagtcagctagacctgcatcgaactttgtcaaaagggagaaaaagctttatttttatttttaattgatggtaaacaaaccaaaatattggggtttcttgttcctgaaacatatattagcctctcctgactaatatgaatgcctactatcattggtttttctccacttgaatttcaatatccaacttaaatcccacttgttatggaacatcttcaacaagcatttattgagtacctagcatgtgccaagtactgcatcagctgttatatgactacaggaataaacacttcatctcccccgcaacctggcagaaactcaaaaactaaaaaagaaaagcatgcattattaatcataatataatgtggtaggtgttgtataagaaggaaaaacaggccgagcgtggtggctcacacctgtaatcctagcacttcgggaggccgaggcaggcggatcacgaggtcaggagtttgagaccagcctggctaacacggagaaaaaataaaaattagctgagtgtggtggcacacgcctgtagtcctaggttttcaggaagctgaggcagaaaaatctcttgaacccgggaggcgaaggttgtggtgagccgagatagcaccattgcactccagcctgggcgacagagagtagagagaatcctttaaaaaacaaacaaacaaacaaacaaacaaaaaaggaaaaacagcatatcatggcccatagaagaacaatccaaaaagagctgagagcgtgacatttaagcaggaccttcctgtccacacatagccctatttacattgctgcatttcacattcccaataatcctgaaagatacgtaaagcaagtatcattactctcattttatagataaaaacaatgaagcttgaagattataaagagcttatctgtgatgaactagtcatagttataaaaaatcaagccttgtctttgattcaaaatttagtctatattttgcttaaaacaacaacagagaataaagtgaccctagattccctaagttaacaataaaaggcaagaaactttgaaagcagaattcagttttgcaaaactttccatttagtaacctcattgatttggattgaatcgctttggaatctctgacattttaataaaaagtttactttggttaaaattgttttattaaaaaataagactaattagttggataaagaagctcacagggggcatgtttaaaataatcatgagcgcaatctgttttcaaatactacacaataattaggaaaaatctatttacatatgaatgatcaatgatctcaccatgaccatagcaacttagagatgaaacagattcttagatattatttaacttaattatcttgcctgaaaaattgaggcaactgatactgaagttaaaaaagaaaatatattagacaattcattgtgagcctagctatagcttctgtaggaacaaaagcarcattctttgcaacccaatcatagtcagtactagtgtctacgtgggtattattggcttggcatcttcagactggagatgacttagaaaccaggtagagccataggatcaagaccaggacatgcagttaggaaagatacaacctaggacacagatgactctagccagctacatagtcatcttcaagtg

SEQ ID NO: 686728 - DNA, 596 bp, Homo sapiens
tgtcctcagatcagcagcttctgtgtttaattaagaagaaaataagagtcattgcaaatataagacagagctgrcatatcctggtattatattaagaaacattcatggaaacttgctcaaacatgacaaaactgctcccagaatgtgaaataaaacaagctcattcttcatttagagatattaattattaattggtaatacattaaagacaaacacactccagtgaaatctccgtattccaaaattttaaaatcagagtacagatcacaaagtctttctcacatgcacttcacatgccttcaatgcacgcttataattatgctttgcacaccttttcattagaatacagacatctaaaaaatctagatagaagacgtagatagtagtttacatcaccctacttaactaggtgtgtgacttccgatgtgttgctttacgtctctcagcctcaacattttattccaagaaaaaagatattgggcaagatgagccctaaaactctgcaagctgtaatgttccacagtgtagatgtcagagtaacaccttgaaataggaattttctcccttttcctccatgaaatatatgattatataca

SEQ ID NO: 686729 - DNA, 596 bp, Homo sapiens
tgtcctcagatcagcagcttctgtgtttaattaagaagaaaataagagtcattgcaaatataagacagagctgacatatcctggtattatattaagaaacattcatggaaacttgctcaaacatgacaaaactgctcccagaatgtgaaataaaacaarctcattcttcatttagagatattaattattaattggtaatacattaaagacaaacacactccagtgaaatctccgtattccaaaattttaaaatcagagtacagatcacaaagtctttctcacatgcacttcacatgccttcaatgcacgcttataattatgctttgcacaccttttcattagaatacagacatctaaaaaatctagatagaagacgtagatagtagtttacatcaccctacttaactaggtgtgtgacttccgatgtgttgctttacgtctctcagcctcaacattttattccaagaaaaaagatattgggcaagatgagccctaaaactctgcaagctgtaatgttccacagtgtagatgtcagagtaacaccttgaaataggaattttctcccttttcctccatgaaatatatgattatataca

SEQ ID NO: 686730 - DNA, 2099 bp, Homo sapiens
tgcctttttaaatgttgccagaataaacagaagtctgcaatctactgagagttagagaactacatttcttaagagaaaacaaacatcaaacttttcaataattccaactggatgttgctctgaaatactctgaatttatgagggttgacaataaggcctcattattcttagcaatgcctggacagtaatcacttcatagatgaaataataatgtcctccatcagcccatatttattaaatagctacgatgtgccttactcatgccaagctgtgagtggaaaccaaatatgtataatgcaaagctgtattccttgcctgcaattcattaattatctagttacaagaatacartatgtttaatgaactagctgataaatgagagtatattaacagattgttacaattatttagttccatacaatgtctaagttagagtgtgaatgaacatagtgaatggtaacattgtcggcaaaggtgggacttaagctgtaccttacaggactaatgatatatagataggttagaatgaaaggaaaattccacgtggtgaaaagtaaattataataataattattataacaacagtcaccagaatctactacctctcacgcactttactggcatcttctcaactgtcttagatgctaacacaatagccccaactcataggggaaaaagctgaggctttagtgaatgatacagcctggatttgaacacagactggctagattccaaagcctatgaatttaattgctaaatcttactccacaggaccaaagagtcattgttaagagagaatatagaatatgtggggatcagcaatccttcaggatgaaaatgatgagtactcatgggaggatctgtcagaatgctgttatatcaatagcatttggacttaagaagatctgaatgtcattcagatccacgggatgcagtctgagtgggtagtttaccaagtatttcctattactaatagaacattatgctttatattctacctttcagaaggtttccccattgcttttcttatatggggcaagcacagggaagatctaaaaagcataaagaagctgacctcgatgttgtgttcttctatagtgttatcatggtgaaaaggtgaattgagtgcccctgggggcacaacatggcctggatttgggcaactggaaatattgaggagctgtgattgagaaaattttccacacatttaagttgaactttcttgacatttagtgtctttacaagcagaccaaagggaattaggaaggatttatttttgtggctcttactcccagtggtttagaattagcttaacattttataatgctgcatggagggactgagccacgttttaaattccacctattctacctgagtgaatagagtttttcatgcatcatttctgattgccttgagaaataacacaaatcaacattagttcatatggatctgatgactcttgcataattgttctgtacattccctctcccattccttgatttaatcagactggtttagttttttttctactgatttatgcattgtcttatttttttagagacagggtcttgctcttttgcccaggctggagtgcagtggtgcaatcatggcttattatttcagtctcagcctcttgggctcaagctactctcctgcctcagtcttctgagcagccaggattaaaggcacatgccaccacatccagctatttaaaaaaaaaaaattgtagagatgaggtctcactatgttgcccaggctgatatcaaactcctggcctcaagcactcaagcaatcaaatcactgagataacaggcatcatccactgcatctagtctccctgatttatgtttctatgtgtttacaaccccccaaaccatgaccacaatctcactgtgtccactcctgtgcatatattgtggaaagataaacctccctgattttgacatatttttgtcatactgctaaaatcatgtctcatacataaagaaataaaatctagtggaaattgctaaaaatttttagtaattcatatttaccaaaatataactagtgttatctgttttctctagtccatttcttagatattcccatgttaaaca

SEQ ID NO: 686731 - DNA, 1276 bp, Homo sapiens
gtattaaaaatgaccataaaacaaaatagcagaaataaaattaagcatataaatcatgttaataaaatgatcaggatgaactcttattttgaatcacagactcacatttggttaagagtaaaatctaaatactgcgttagtgtacccagttaatccaaaaatattaaaaataaggcaatgggcaatgatatagtgaatgaatcccaacaaaaagagacaggagtgtgaatatgaacaggagacaaggtggaactcaaggccaaaacagctaaaagaaaaaatccacaatgaaagaatgacaattttgcacacttctatggtgattaaaaaaaagcatcaaatgtaattaacaaaagttttagcaatacaaaagaaaataagggaagcactgttgttgtagtaatgttaacaaacttgtgttgcaagaaatcacgtggacaacaaccaataagggagtagaggattcaaaccatgtcacgtatttgtattgcacaaatggataatgtatttttccaaaatatacttagaatattgatctacaaattgatcataaaaacatcttaacacacttcccaattaccagttaaaatttgcattagtgcctagtttttggttgtgtcataaaacacccagtgctgttgggggatcctcacaatgatggctattgttatcataaaatattgactgagagcctgcaacgcacatgtgcccctgcagggtggcatagacggcgagcccagggaggccactgacatgcattcaagagaaaagaaaagaagccaggctttggtcagttgtgaatataccatctcctgactcccaagcattggttcatcatccagctggcaattgttgagcctcagccaatggtggaaccaaaatctagtatctctggagtaatttccatttccaacagaaggagagtgactttcactgactcttactctccatttggatttcaggcataagtgcttcatggtggagtgagaatggcttgccctggaagggtcatgttttagaaggagtgatcttcattgtgaagtctaaactgttctggaaatataagctttgaaacccaggtaggcaggtttcattttaagcaatattgcaggatcacaggataattattggtttataaggtgattcttcactgtacaaagtatcttaaatactaaacatgctgatgtgttgcaaatttgattaggttttcacaagacttctctagaatgygtttatgtgtacctatgaggaaaaattattgactcttttaccaggg

SEQ ID NO: 686732 - DNA, 1335 bp, Homo sapiens
  misc_feature 432, 433, 434, 435, 436, 437, 438, 439, 440, 441, 442, 443,444, 445, 446, 447, 448, 449, 450, 451, 452, 453, 454, 455,456, 457, 458, 459, 460, 461, 462, 463, 464, 465, 466, 467,468, 469, 470, 471, 472, 473, 474, 475, 476, 477, 478: n = A,T,C or G
  misc_feature 479, 480, 481, 482, 483, 484, 485, 486, 487, 488, 489, 490,491, 492, 493, 494, 495, 496, 497, 498, 499, 500, 501, 502,503, 504, 505, 506, 507, 508, 509, 510, 511, 512, 513, 514,515, 516, 517, 518, 519, 520, 521, 522, 523, 524, 525: n = A,T,C or G
  misc_feature 526, 527, 528, 529, 530, 531: n = A,T,C or G
tctaagtaagtatatgcaactagtatttagatttaaattaaatgtagatcatcctatcaaaagagagcaggggtgtctgggaacggactttcattatgaatgaaagcaaatggggctgtgatgtcagatagctctttcatgacatcgctggtagaacatcagcaactgctcacaggtactttcgggccctcttaggaaagggtgccagtgatgaatactctgagccacagaacaggtattcacagctccaggctagggttacatccttacttttaaaaccagctgagttgtgtccaatgtacccattatcatttatattccaagatgcttcttttggaaataaaatggaaatgtttgaaaatgacctttctagataattctaatcccatcattagcctaagaaaaatagttgttcagtacaccaatacactnnnnnnnnnnnnnnnnnnnnnnnnnnnnnnnnnnnnnnnnnnnnnnnnnnnnnnnnnnnnnnnnnnnnnnnnnnnnnnnnnnnnnnnnnnnnnnnnnnnntactttaataaaatgcttttcttaacccgggtctcaagagaagaaatttataactgcaagacacaattgctacttgactttttaggtgataaacaagaataatagttggtcatttattatttataaaaaggcaacatgattctatacaaataacacagttcttgtaataaaaatccctaagttaaattcctcctgtctctttgggacgggtttggggtatcggtttcattttttgctgcttgtttgtttatttgcttgcttttgaaagatggagatactataatatgtcaaaaatattttgtgagcgtctactaagttaacaaacgagaawgattctaacatagttctggcccatggtagatagtaaacaaatgttaattttttgattactttatattagatggtaggtatgggtgctattctctagcagaaatctgattttttttccctaaatttaggcaaggtggaaacacagcacatccccctcttcttgaagcaaggggaggccttatgacttcttttggcaatgaaatgtgggtagatgtgatggttggtggaaatgccatatatcacttctggatagaagcattaaattgctaatattccacactctagtttatgcttcactctgtgaatatgatagtgaaatgtgtgttgataagaggtgttggaaatttaaagccacctaaaatgctgaaccaacccatgtgtatgtctgctgttgaatactacctggactagaaatagtctttgggtaagctaaaaataagtatttggtatataaaccacctatggccaggcgcg

SEQ ID NO: 686733 - DNA, 700 bp, Homo sapiens
tttgaatcaggttgtgaacccaggtgacctggctgcagagtgtgtactgataaccatcataccatcccgcttcacacatgtgatttttctctttgacgattgttgcaaagattaaccatgtctttccagctattctctgcctgagattttggtgctttaataatttaatcctttgtacccccaatcttaaaatgtcatttgggacatgcctgaatgtctccatcataattattaarttattcaggagaattcagatgtgcttttgtactccctgatgttggtatcaggaaggcaggcaaagaactcttgatggtttcccatgattgttgatcacaacaaatttgggtagttgccaaaggaaaatgttaagtgagaatttattatataaaaaatagattattgttaagtaaaaatatatatgtatgtgtattactatataaacacacatatgtatatatgtgtatatatttgtgtattactaaatactagaatcttgttttacccctatattttattatagtaccctatagtcctatataaaagactaattatattaaatttcttaaatttataatttcaaatatttgtttccttggttccaatcctctcaatgcagatactgcctattttctctgcaatgtctttttcatttttctggatcactctctgaatagaatctctagttgatgctatttccttc

SEQ ID NO: 686734 - DNA, 612 bp, Homo sapiens
taagtcaaaggggatttcaaagtgtaactatttacaagttaaaatgagaaggaagcaagtctctaaaaaataaaagtttatcgtaagactgaggaaaatagtcaaaacaatgactactgagaaaatattatgattattatattgttattatttttgcccaaggtctctaggcatttgaagaagaaagattaaacaaaaacaaacatttcatytgtaggtagactcaaaaaaataactgagtaaccttgacctccatcagcacacaaaatcctacatagccaatgacagacttcattgtttaaagactacttgggaatgattaagaaaaagatgatgtaatctaatatgtgataaagagagatataatattctctactggaaggcattcctatcatgtcatatcaaagtctagcaaaacgttgaaagttagaaatgttatcaagcattagcaggcatttaaagaacgtctcttgaatatttctagcataaaaaagtatttcatgtgatgtaaatgaatggtaattttctgactttaaaagagagctgtgccagtacatttcagcgttctggacccaattctgcaaacatggagacgctttcaatttgctctgc

SEQ ID NO: 686735 - DNA, 1634 bp, Homo sapiens
taagagctgcagtttagaggagacagtatcctcccagcagagtcgtgtgctttttgaactaaagccaaaaaacataaattgagtggaattttgtataaatgtcaggttgttttgatttattaaccactcttatttatccaagttaaaattctcgtgaaggagctcatatttcctttttgtagttgatctgagaacacattaagatgtgggagagggggagaaatgaaaagtatttatccagtctatcccacaaaatcaatccctttttaaatccatgtcagtaaaaccatctggtaaagccatcacttgacatgttgtttttattaacattatctctgtgaataaagataaacatatatagagcatagagaataaacccmgccatagaaaaagcccacacactaggttttaaaaatatgtatgatcaaaataaatggaaaatttgattcatttaaaaaaatgtaccttattttctgtcaaagttcacatcttattagaatattaacttcttaaaaatgtagctatattcagaataattctattaaaattttagcttcatctagtgtgatgatatctgtcatttccaaccctctgacttttctcctgcattaaactttctgtagtatacttcagattctggatttcatccttccggtttgaacccatttttttgtccatggttagcggtaatgattttagatactctcatctctgcaccttatgcctcccagtcaatcaaagaatttacagtattatataaatgcctctttaatatttttagaggatggtaagaatagtagttatttcaacagcctgttagcaggttcttggagacaaaacttatatgaaagccctgcacactgctatcaccaactgcaacagaaggctaaatttatttccaaattaccgaaaatcaattggtctattatccttgaatatatcatatttgcctattcttgaaaacccaggaatacttttataaacttattattagtgtccattacattcaagaaatcaccaaaattctgttgattcaattctaaaatatgtcttaaatctattaactctttttcatactcaagcctactgcctctgttgaggactagtttttttttttttttcccccacaatgttcaccagtcttttgccttgacatccagccttttgtcctgctcccatcccaatctccagcttagtactcatacttccatctatgttaactcaacttcgtttaaaattgctttaagggccccttcaattcctcatagcccactggataaaatgcagactccttgaatatgggaccctaacatgccttattcaactatgtggtttcattttctacttcagtgcctggcactgtgaagatagtcaaggtgtgattgagaaatgaaacaaatggtttaaaattggaacagatggctgtttgttgaggaggttaagaagtattccactgttgtcatagtagcagggagtcttatttgcagagttaacttgtatgtgaattagcagactcacaggtcatgtgagtagttgaaggaagctcattttcattttgccaatcatatgcgaaaaatcagtacaggtgacaaaaagacaggaaaaaatttcctactgttttttaaatgtgaaat

SEQ ID NO: 686736 - DNA, 1634 bp, Homo sapiens
taagagctgcagtttagaggagacagtatcctcccagcagagtcgtgtgctttttgaactaaagccaaaaaacataaattgagtggaattttgtataaatgtcaggttgttttgatttattaaccactcttatttatccaagttaaaattctcgtgaaggagctcatatttcctttttgtagttgatctgagaacacattaagatgtgggagagggggagaaatgaaaagtatttatccagtctatcccacaaaatcaatccctttttaaatccatgtcagtaaaaccatctggtaaagccatcacttgacatgttgtttttattaacattatctctgtgaataaagataaacatatatagagcatagagaataaaccccgccatagaaaaagcccacacactaggttttaaaaatatgtatgatcaaaataaatggaaaatttgattcatttaaaaaaatgtaccttattttctgtcaaagttcacatcttattagaatattaacttcttaaaaatgtagctatattcagaataattctattaaaattttagcttcatctagtgtgatgatatctgtcatttccaaccctctgacttttctcctgcattaaactttctgtagtatacttcagattctggatttcatccttccggtttgaacccatttttttgtccatggttagcggtaatgattttagatactctcatctctgcaccttatgcctcccagtcaatcaaagaatttacagtattatataaatgcctctttaatatttttagakgatggtaagaatagtagttatttcaacagcctgttagcaggttcttggagacaaaacttatatgaaagccctgcacactgctatcaccaactgcaacagaaggctaaatttatttccaaattaccgaaaatcaattggtctattatccttgaatatatcatatttgcctattcttgaaaacccaggaatacttttataaacttattattagtgtccattacattcaagaaatcaccaaaattctgttgattcaattctaaaatatgtcttaaatctattaactctttttcatactcaagcctactgcctctgttgaggactagtttttttttttttttcccccacaatgttcaccagtcttttgccttgacatccagccttttgtcctgctcccatcccaatctccagcttagtactcatacttccatctatgttaactcaacttcgtttaaaattgctttaagggccccttcaattcctcatagcccactggataaaatgcagactccttgaatatgggaccctaacatgccttattcaactatgtggtttcattttctacttcagtgcctggcactgtgaagatagtcaaggtgtgattgagaaatgaaacaaatggtttaaaattggaacagatggctgtttgttgaggaggttaagaagtattccactgttgtcatagtagcagggagtcttatttgcagagttaacttgtatgtgaattagcagactcacaggtcatgtgagtagttgaaggaagctcattttcattttgccaatcatatgcgaaaaatcagtacaggtgacaaaaagacaggaaaaaatttcctactgttttttaaatgtgaaat

SEQ ID NO: 686737 - DNA, 1182 bp, Homo sapiens
ctcacctaagggttgcagttcttatggcttagactgcctttcaagtttacttggagacacagagcactgtagcctttggaggggaggttttcaggaactcaagttcaggtagctgggataagtaatttccctctggttagggctgatttaaatcctccctctgtggatgggcattagctgagtttggtccagatttcctttctgatctaccaggacagcactgagttcattgcctcacaattactgtgttctctcttctccagggcccagagatgctctctgtcccatgctgccactgcagaagggtgggggtgggggcagggtggcataggcatttcagtgttttttctmtctcttcagtgcttctttcaacattgtgaagttagaaccagctactatgagtgctcatctgatttttggttctggttctcatgaaggtgtttttttttttttctttctttctgtctttcttctgtgtagatagttgttaaattggtgtccttgtcggtgggggaacggtgatcagtggactcttctactgcatcattctgctccttcctttttccttttcccctttaattttgtgactaaaatttgatgggactcctgaaaagatgaaaaggatacttaatttagttttgaatatatgcttactcttggccgatatctcgctattatacactttcagtagattggtggagccgaaatgagttaatttatcaatgtctttcagagaccagattgtacaataccataatatacttgggaatgaaatgaaggctgggtgtggtggctcactcctgtaattccagcactttgggaggccaaggtggatcacctgaggtcaggagttcgagaccaccctggccaacacagtgaaactctgtcactactataaatacaaaaattagccaagtgcggtggcctgcacctgtaatcctgcctcctcgggaggctgaagcaggagaattgcttgaacccaggaggcggaagctgcagtgagctgagattgagcgactgcactccagcctgggcaacagagtgagagtctgtctcaaaaaaaaaaaaaaagaaaaaatcaaaagtagatatgtgtttgtgtgcattgtgaagaggatgtttatacaaatatgctaatacatacacacacacaattgttcttttaaccaaaaatttgggaca

SEQ ID NO: 686738 - DNA, 1182 bp, Homo sapiens
ctcacctaagggttgcagttcttatggcttagactgcctttcaagtttacttggagacacagagcactgtagcctttggaggggaggttttcaggaactcaagttcaggtagctgggataagtaatttccctctggttagggctgatttaaatcctccctctgtggatgggcattagctgagtttggtccagatttcctttctgatctaccaggacagcactgagttcattgcctcacaattactgtgttctctcttctccagggcccagagatgctctctgtcccatgctgccactgcagaagggtgggggtgggggcagggtggcataggcatttcagtgttttttctatctcttcagtgcttctttcaacattgtgaagttagaaccagctactatgagtgctcatctgatttttggttctggttctcatgaaggtgtttttttttttttctttctttctgtctttcttctgtgtagatagttgttaaattggtgtccttgtcggtgggggracggtgatcagtggactcttctactgcatcattctgctccttcctttttccttttcccctttaattttgtgactaaaatttgatgggactcctgaaaagatgaaaaggatacttaatttagttttgaatatatgcttactcttggccgatatctcgctattatacactttcagtagattggtggagccgaaatgagttaatttatcaatgtctttcagagaccagattgtacaataccataatatacttgggaatgaaatgaaggctgggtgtggtggctcactcctgtaattccagcactttgggaggccaaggtggatcacctgaggtcaggagttcgagaccaccctggccaacacagtgaaactctgtcactactataaatacaaaaattagccaagtgcggtggcctgcacctgtaatcctgcctcctcgggaggctgaagcaggagaattgcttgaacccaggaggcggaagctgcagtgagctgagattgagcgactgcactccagcctgggcaacagagtgagagtctgtctcaaaaaaaaaaaaaaagaaaaaatcaaaagtagatatgtgtttgtgtgcattgtgaagaggatgtttatacaaatatgctaatacatacacacacacaattgttcttttaaccaaaaatttgggaca

SEQ ID NO: 686739 - DNA, 1248 bp, Homo sapiens
ttgcttaggattgtcttgtctatataagctcttttttggttccatatgaaatttaaagtagtttttttctaattctgtgaagaaagtcaatggtagcttgttgggaatagcactgaatctataaataacttcaggcattatggccattttcacgatacttttttttcgtatccatgggcatggaatgcttttccatttgtttgtgtcctctcttattctgagcagtggtttgtagttctccttgaagagagccttcatgtcccttgtaagttgtattcctaggtattttattgtctttgtagcagttgtgaatgggagttcactcatgatttggttctctggtttttctattattggtgtataggagtgcttgtgatttttgcatattgactttgtatcttaaaacttcactgaagttgcctatcagcttgagattttgggctgagatgatggggttttctaaacatacaatcatgtcatctgcaaacagagacaatttgacttcctctcttcctatttgaatacgctttatttatttctcttgtgtgattgcccttgtgtaacatacatcaagttgttttctgcagaaaagtcttgtccatgwtgtccattgtctcacatgaatctcaatatgggcatatctctttagattcttcaattttcaaaagagatattaacctaaacatccttccagttgatttttatgtgctcataattctgcgtttaaatagaagcatagaatatctgcattcaaagacttatccagaaaaaaatcataaaatctctgactcccaacattcaacaaaagatgagttgagagaactagtactccagaaatcttgaccatccttctctacttttgagtttcttaaaggtgtttacaaactaagccaaacattcattcattacatagccagactatatgattctgaaccttccacactcaataatcatttttaataagatgtgttttgtgcttttgctctagttgatttatcttgggcaattttagcactatttttctttttgtattttgtattatatttgtaatccttcaaggacttgtttattgacaaaagtttgtccatctgcaattcttgacttttaagattgcctgctacatcaccataaagccaatagattgggcaagagaatgcataaaagttgaaaagtaaggcatttaggtcccaggcttgaattgtcatatctcacttatcttcacattctattggtcagacctctgtttca

SEQ ID NO: 686740 - DNA, 981 bp, Homo sapiens
  misc_feature 881, 882, 883, 884, 885, 886, 887, 888, 889, 890, 891, 892,893, 894, 895, 896, 897, 898, 899, 900, 901, 902, 903, 904,905, 906, 907, 908, 909, 910, 911, 912, 913, 914, 915, 916,917, 918, 919, 920, 921, 922, 923, 924, 925, 926, 927: n = A,T,C or G
  misc_feature 928, 929, 930, 931, 932, 933, 934, 935, 936, 937, 938, 939,940, 941, 942, 943, 944, 945, 946, 947, 948, 949, 950, 951,952, 953, 954, 955, 956, 957, 958, 959, 960, 961, 962, 963,964, 965, 966, 967, 968, 969, 970, 971, 972, 973, 974: n = A,T,C or G
  misc_feature 975, 976, 977, 978, 979, 980: n = A,T,C or G
ccttgggatggaacgaacacaaactttttattcagaaggcaagacagtgcctccgatcaacagcttaacatctctaaggagactacctgctggcctgagccctgccctcgaatctgccacataacatggcctcctactgctgacacagtaaaatggaatgatccatctgtaaaaggtccataaggaaaaaagggaaggataaatttcaagttttaatttttatctaataatcttggcttggcaaaataaattcatagtcaggcttgatcaaccagcctgaaatttgaatatcytgaccacacactgattctccaattaagaacaatgttctcctaccacctggttcagtaaaagaccaccaatggtgcttgagattctatagcagctaccttcttcactagactataattttcaatgggtcaataaataagagtcttcacaacccctatattcccagcttaaagcacagttccaggcacagaaggtaaacatatatgtttactaagtgagttgaaactgaaaactcatcaatggagtaagaccaccctcttaagtgaaatttaattttaatagttttaagattattcacttactgaaccctaatgcataacaaatgacaaccaccacaacttccaccccacgtatgtctcatttatcacttttcccctattctcagtgcctttgtcccatccacatcctctgtcttcaacacggtccctcccctctatgggacatttcatcattgagaagattaggtggataatgcctacctacttatgtaatggtgtattcctatcaaaatcccaagaagagtttttatagatacaaacaagatacttttaaataaatttggaaaaagtaaactggatatccagcaaagnnnnnnnnnnnnnnnnnnnnnnnnnnnnnnnnnnnnnnnnnnnnnnnnnnnnnnnnnnnnnnnnnnnnnnnnnnnnnnnnnnnnnnnnnnnnnnnnnnnnt

SEQ ID NO: 686741 - DNA, 1116 bp, Homo sapiens
cagaaggaggagatttttagaggtgataacagtaatatctgttgtaaggaaacaacagagggatgactgataatgagagagtgaaagctgcaacgttgaaaaaaacatccagatcaccaaatgttgaatctgaaaactttcacattccctaatggtatatagataaatatatattccagatttacctttttaagaattgcttctaaggcagcttctccagaagcctgtccagatatgtcctggatttcttgaccaaagtcaaaaacatgcaactgggagagcctctccaaggttaatggaatttcagcatccactagagtggcatcaactgtttgttcaatagctgcccaatgtcttgccttcaaagtcgggttcctcaagtcaatgataactggaagctgaaaaacaaacactctcagagacatgaagctttttatcttaaaaatataacccacaggttctggtttcaatttgtgcatgtagagagctggaaaagagcaccacttaccctctttccacagagcaaaatctggatgactgcaaattaatgactctaattgagcctattagaaaaccaagtttgcgggggcagaacaaactccaaatttggagagagattgataccgacaggtttctccacaaggagaaacagcaactgaaaattttcctacctggggcagattccttgggatgacatacaaactattaagaagattcagctaaattttaaaaatagagcgctaaatattaagtgcggggtagaatgagaatggaaaacctctgagcctacaaatacagtggaaattgacagtgaagactgaaaggactcccaagaaagcttcccttatgatgctggcttggggagggaaacagcgtccattatagtagctccaacaaatttatctgccttagctcccttgtggaacaaatcccttgatgtacagggaaaagwgtaacaaactgtgccaccttaaggcactagtgataactcattgaagatatctcttcctataactggaggaatagaacatggaaaaaaacaatttacccttgagggagggacaaaaataagtgctaggctcagcactatagctggaaaagggggaggagcacctg

SEQ ID NO: 686742 - DNA, 1116 bp, Homo sapiens
cagaaggaggagatttttagaggtgataacagtaatatctgttgtaaggaaacaacagagggatgactgataatgagagagtgaaagctgcaacgttgaaaaaaacatccagatcaccaaatgttgaatctgaaaactttcacattccctaatggtatatagataaatatatattccagatttacctttttaagaattgcttctaaggcagcttctccagaagcctgtccagatatgtcctggatttcttgaccaaagtcaaaaacatgcaactgggagagcctctccaaggttaatggaatttcagcatccactagagtggcatcaactgtttgttcaatagctgcccaatgtcttgccttcaaagtcgggttcctcaagtcaatgataactggaagctgaaaaacaaacactctcagagacatgaagctttttatcttaaaaatataacccacaggttctggtttcaatttgtgcatgtagagagctggaaaagagcaccacttaccctctttccacagagcaaaatctggatgactgcaaattaatgactctaattgagcctattagaaaaccaagtttgcgggggcagaacaaactccaaatttggagagagattgataccgacaggtttctccacaaggagaaacagcaactgaaaattttcctacctggggcagattccttgggatgacatacaaactattaagaagattcagctaaattttaaaaatagagcgctaaatattaagtgcggggtagaatgagaatggaaaacctctgagcctacaaatacagtggaaattgacagtgaagactgaaaggactcccaagaaagcttcccttatgatgctggcttggggagggaaacagcgtccattatagtagctccaacaaatttatctgccttagctcccttgtggaacaaatcccttgatgtacagggaaaagagtaacaaactgtgccaccttaaggcactagtgataactcattgaagatatctcttcctataactggagraatagaacatggaaaaaaacaatttacccttgagggagggacaaaaataagtgctaggctcagcactatagctggaaaagggggaggagcacctg

SEQ ID NO: 686743 - DNA, 1014 bp, Homo sapiens
tggcattgcctcctaccccaggatacaagccacagatctggttggccatctccatgtcttccctctatttcatttccttacctctgtatctaatccgttcctaaaacttacctagttgtctcctcgttatctgtcattctatccacatctccactcaactacctcactttagatctgcaacatgactcataatgtattacagaaactcctggcctctgggttctctccaaaccatccaactcagggcagacagagcaatccttttttaatgtatatctgatcatgtcacttctctgcttaaaatatttcaattccggcgcagcacactggctcacacctgtaagtaatcccagcactttggaaggccaaggcaggaggattgcttgaggccaggagttcaagaccagcctgggcaatatagtgagatcctgtctctacaaataataattttaaaactatttcagatacttcccactgccctcagaatgaagtccatactcctagatatctctctagctacatcttttaccactccctgccatctctgccctagtctaattgaaataattgtagtttcataagtggcccttactgctttctctcctgagctttttgcagtatcgtcttctctcccttgtttttacctctgttgtaacacttatcacactaaattgaaagtgattgttctcatgtctgastttcccattagactgtaacctctttgagggcagggaatggttcttatttatctttgcagtccaaatgccaggcatagagaaggcattttttggacacataaatgaatgatgtgagaagaaatatatcatgacagaaaggagtaagatcaaattggatatgagagcaaagttgagcagaagggctgaatagtaaatttaaaactgctgacagttttagcattgtatcagtgtagcctctgtctatccctcactcccactcccaatagcctgaaagtttgcatcactcagccaaattttcactggccccttttgctca

SEQ ID NO: 686744 - DNA, 2897 bp, Homo sapiens
  misc_feature 1997: n = A,T,C or G
tttcagccttctttaaccttacctcccaatgcttttctctgtgataaagacaacattcttactgtttttgatttataaagtacatccacatgcctcctgccccagccaaactataccccacttgtctccttgcctttgctgtcaaattttgtctcagttgcccttccccatctatttcacaatcttgcacattcttcaaggcccagctaatctcctccatgaagcctttccaacctaacatcatccagactgcctgtgagctctgagcatcttttagctgagagcagtttataaccagattctcaaattcatatgctcaaccaagtattgtctatagattaaataattaacatgtcttgcacatgtatttacccctgtttttcaaaagtgtgaaagtattgttttcattaataaattacgtattcttaggaaaaatgtgtcacggacctgtagttccccaaactccattctctcctttccatggtagatatcagacccaytgctatcccaaattaagactacattttctagtttcccttgcagccaaacatggtcacagaaccaaattctggccaatacgatgtaggcagaagtgttgtgtcctacttctctggagagctgatgtttatagagatcaaataatggacccttaggtcacacagctagtaattagttgagccacagttagaagctgggctattctaactttaatacttacataagtgtagaaggaaagaatgagccctttttcttcttttctgccagctggaatacagttgtgatgctggagctaaagcagtcatcttaaatcatgagatggatgtggcatcttgaggatggtggagacataagatcagaggggcctgggtccctgatatttgggaagccacaatgccttatgattaatgtcttatgattacaactgcttttgattacatgagaaaaatattttattattttatttaagtagtttttttttttggtttcgtgctcctgtgttcatactagcttttttttcatattgtattttctcagtggatctaaaagtaccatgctgttatagacatctgcaaaataatatttgaacctcaacatggggtcttcattctcaaaggatagaataactcatttagaataaattatttgtttgttagggacacataccttgtatatatttttaattttttacctaggtgtaagatacacattgagaaagtttaaagtgagagtgaattacaaaatttacacattaaaatttagggctgggcgcagtggctcatgcttgtaatctcagcactttgggaggtcaaggtgggcggatcatgaagtcaggagatcgagaccatcctggttaacacagtgaaaccttgtctctactaaaaataccaaaaaaaaaaaaaaaaaaaaaattagctgggcatgcctgtagtcccagcaactcgggagggtgaggcaggagaatcgcttgaatccaggaggcagaggttgcagcgagctgagatcacgccaccacactccagcctgggcaacagagcgagactccatctcaaaaaaaaaaaaaagaaatttaggagtcactgtcactttaaacttacagctaaagtaaggtgtaaggtacacattcagaaagtttaaagtgagaatgactcttaaatttttttatcattaaaatagagtgcattaatagcgaagatttaagagcctgacttttacattcaaaataatatctttttcttgtgccttaaaagtagttagtttgcaactatgcaagtaagtgtgccagacttcaaaaaaagtctttatcaagtcttccatcaaaaaatggaatccaggaaagaaaattctttatggagtaaaaacattgtagtgtaatgatctattttgttgaaggttttctgatttagaaaacccacagttttattaacgttaaaactggattaaaagctgtttaaaaaaggaaaagttaaaaaagagactaccttgtaatcttactatcnaattaagataaactttagctttaagcagtatttacttgtattttagttgttaaaagtggtattcatttttaactaatttttagtctgttcaaatttctattttgttatttttacaggttgaatgaaattataataaacatagggtatttcccaagcatgaagacattctcattattttaacatacagtaacatagttgactctccatatccatggattccacatctgtggattcacccaaacttggattgaaaatattcagaaaaaggccaggtgcaatggctcacacctgtaaccccagcactttgggaggccgtcgcaggcagatcacctgaggtcaggagttcgagaccagcctggccaacatggtgaaactgcgtctctaccaaaaatacaaaaattagctggacgtgatggcacatgcctgtagtaccagctacttgggaggctgaagcaggagaattgcttgaacccaggaggtggaggttgcagtgagcccagatcatgccattgcactccagcctcggtgacagaatgagactacgtctcaaaaaaaaaaaaaaaatcagaaaaaaatacaaactttaaaaatataggataacaaccatttacataacatttacattgtattaggtattgtaagaaatctagagttgatttaaagtacataggaggttgggtgtaggttatatgcaaatactatgccattttatatgaggtacttgaacatccccagatttcagtgtctgtggggggtcctggacccaatcccctgtggataccaagggacaactgtatagaataaaggtccataattccagtcctcctaaacaagactaattacttggcaattaatgaccacttggtggtttttttcaaacaaaatatgttaaattacaca

SEQ ID NO: 686745 - DNA, 616 bp, Homo sapiens
atctgtctggtcctggactgtttttggtcggtaagctattaattattgcctcaatttcagagcctgttattggtctattcagagattcaacttcttcctggtttagtcttgggagggtgtatgtgttgaggcatttatccatttcttctagattttctagtttatttgcgtagaggtgtttatagtattctctgatggtagtttgtatttctgtgggatcggtggtgatatcccctttattattttttattgtgtttatttgattcttctctcttttcttcattagtcttgctagtggtctgtcaattttgtttatcttttcaaaaaaccagctcctggattcattgatttttttgaagggtttttttgtgtctctatctgcttcagtagtgcttttccttcttaaattcagaggcaactgtgatgttttcttaggtgaatccatggaatgtattaatcttccctgaatatgtcactggacttattacatgtaagtattttgccaatacgcaaataaattttgttagcaagtattattctggtgtgaaaatacgtactgacttttaaaaattatyacatttaaatcacaatgtgatgtaaatttactgataacaac

SEQ ID NO: 686746 - DNA, 648 bp, Homo sapiens
tttaacatttgctttttaaaagactggaaacaagaaatatgaagcagcactgcacacaaatatttacttcatattcaaaattataaatcagttcaagatacctatcaatgaaaataatggcaaaaaaccttgtgtgmacttgttaatatgtaatccaaaattgttttaaaagtgcttgagtataaatttacttaagatatttgctgaatttgtcttgcttataatattaaaaatacttattaaacacaacaatttttacaatggcagcatgtcataaaatgacaaaatgtcccttctgacaagtcaaaccagagtcaaccctcactttcccaactctggttacccaaatttaaggaaacgaacagatttggaaagttttgaaatacctctggaatcaccaataaccaaattcttactacttgctacctgaaactcagaaaccaaacagatttcaatagtaggcctctccttagctacctgaactcatagcccaaactttctctgtttgcactcagggaccgaaaggattcagatgtctgggaatacttattttcttttgttttgttgttgtttttgttttctgagacaggtcttgctctgtagcccaggctggagtgcaatggtgtgatcatggttcactgcagcctc

SEQ ID NO: 686747 - DNA, 1701 bp, Homo sapiens
gaaacgttaaaaaagcaaatgagattcagagtctaagggattacactcaattccccagctggcgaatggaagaacagagacaggaaccccaatgtccgggctctgagtgtattgctctctacatttgaacatcctcatcagtgctcagcacttgcctggatggctagtacagctgtctgccaagaagatgtccttgtgtttttcctcattgctgtacatacagccttcagacaattccatagctccatggacatttgaccacccacaactcaagaacaactttccttttgccattggctcttagcacacataaattgctaatcctttcttaaactgctaggtgaacctcaaattctcatgggactcaaatttcttccagagggctcattaggtaaagggagattccaaggaactctttccygattgttcctcactggaacagttcagtgtgaaaaataatgaccactcctaagttcatgtacctaattgcctctgtctatcctgtggccttcaattaaagtaagatcaccatccggttttttccaactttttgtagcaagattgagaagggatggggtgggttttattggacactgagaggaaggttcctgtaacagccacataaagaggtaatgtgggaaagccaaagtaagcagacggatttaaaaccagctggaacaccaccaggaaagaggttaacaccctaagctttccatgaacttttctactgcgagtcctaagccagaggatccttcatcatcagaaatgattggaaacctggtttcaaactccctggaaagatgagacaagaaatgcataacagggaaggatttacttaggttaattgattaattaatgaccacacttcaacggctcaagcttactttgtgggtgtaaatgtatgagtaatactcaaaaccacaaacctaggagcaataaaagagcttgggttgaaagttctactttcagaattatcctgattttcctctgggcaactagggagacgaaaataaagaaaccaacaggaaaactcataaatctgtgactctggaaggagagggtcacattctacttggagagaagacgctttacccaggtccagtaggaattactttctgtgatgtgttgggaagtgaatccagagcagaaaggtccttttcaatttgtatctggactcgtctacctcgccattttgttcacccacacattaccactgcctttaccccaggtgagctccacacaccaagtcacctttgaaatagaattacacttctgatggacctacctcctaaatagctctccaaccagggatgagtacctggggacccagtagaaccctcaatttgtattgactcagaacccaaaagaaaacagagaagaacatgtgaaattatcaaggtttttggtcaattctctggctatgagttagtaatttctttccaccagatttctggcttctccttgttatggttgaattgtattaaccattacccaaattcatatgttgaagttctaacccccagtacctcagaacgtgaccttatttggaaatagagatgttgcaggtataaccggttaagatgaggatatactgaagtagggtgggcccctcatccagtatgactggtgctcttataaaagagggacatttggacacagacactcactgaggaaaaatgatgtgaagacacacaagagtca

SEQ ID NO: 686748 - DNA, 651 bp, Homo sapiens
tctgcaaaatgcctttgccatctaagataacataatcatgggcatgatatccyatcacaatcacagtttcttgtcttgaggattagggcaagagcagttgggccatctttagatttcggcccatcacagttgacatctgcaattaaaacaactattttccactctcccccaatagaaaaagggctcttttggaacactcagttccacatccccaaattccaatgcctgtcatttccctctcctaccacatgaggcttctagaatgaattcagtcttccctacacttttcacttaggttttgctgaaatattttagcatttatttaaatatttataataatgtgtttcctgtgtttcagcaattcttacattctgttgctgatgtgcagacattttgcagtcattcatgaagattcaattattgtctatcttatccactgcagtatccccattgtcaacaactaagtttggcatatattaggcattcaataaatatttgttgattgaatgaattaatatgtatgtatggcaaggctcattgtttattttttttctattcactctatcttttctttggcttgagttcttatttttggttcagttatattttatctcgactgtctcaagtatttttctcagaggggttacatgg

SEQ ID NO: 686749 - DNA, 861 bp, Homo sapiens
tagaattcaaaagcatcaacaaatataaattttgcacatattgtaaaataataaaaacacaggaaatatagaaataaaactagcagatsaggcaaataaacttgagaaaggtcaggcatgagcctcagagttaaatataatgttctatttcttaaatattgaaggttgatatacttagacacttttgatcattctttatgcattatacatatataaaacattattttatatataataaatgtttaatcaataaagataaataatacagacaaaaaaaactatagctgtgctcactaaatgcttgtttccgactacactcttctacttgatgactgaatagtgattagttggtgacaaataatagaacaattaatatttaggaagaaattctgaaagagaaagaaaaaaatcaagagagtgggagtgatatagggaggggtgatgaggaaggaaaggagaaagagagtgatataaagaagaaaaaatttaaagagaggaagaaaatgaaaacttgtcagagatgtatcattaaatatcaaacattgtgttacaactttctgcatgttttatttaaccctcatatgaaaactgtaaggaaggtatattcatttataatttaaagatgggaaaagtaacttatattaaatatccaaatattagggagggaggagaaaagggagggagggaagagagggagcttatacagtttggctctgtgtccccacccaaatctcatctggaattataatgcccataatccccccgtgttgagggaggaacctgatgggaggtgatgagatcatggtgctatttcccccatgcttttcttatgatagtgagctgtcacaagatctgatggtt

SEQ ID NO: 686750 - DNA, 861 bp, Homo sapiens
tagaattcaaaagcatcaacaaatataaattttgcacatattgtaaaataataaaaacacaggaaatatagaaataaaactagcagatcaggcaaataaacttgagaaaggtcaggcatgagcctcagagttaaatataatkttctatttcttaaatattgaaggttgatatacttagacacttttgatcattctttatgcattatacatatataaaacattattttatatataataaatgtttaatcaataaagataaataatacagacaaaaaaaactatagctgtgctcactaaatgcttgtttccgactacactcttctacttgatgactgaatagtgattagttggtgacaaataatagaacaattaatatttaggaagaaattctgaaagagaaagaaaaaaatcaagagagtgggagtgatatagggaggggtgatgaggaaggaaaggagaaagagagtgatataaagaagaaaaaatttaaagagaggaagaaaatgaaaacttgtcagagatgtatcattaaatatcaaacattgtgttacaactttctgcatgttttatttaaccctcatatgaaaactgtaaggaaggtatattcatttataatttaaagatgggaaaagtaacttatattaaatatccaaatattagggagggaggagaaaagggagggagggaagagagggagcttatacagtttggctctgtgtccccacccaaatctcatctggaattataatgcccataatccccccgtgttgagggaggaacctgatgggaggtgatgagatcatggtgctatttcccccatgcttttcttatgatagtgagctgtcacaagatctgatggtt

SEQ ID NO: 686751 - DNA, 861 bp, Homo sapiens
tagaattcaaaagcatcaacaaatataaattttgcacatattgtaaaataataaaaacacaggaaatatagaaataaaactagcagatcaggcaaataaacttgagaaaggtcaggcatgagcctcagagttaaatataatgttctatttcttaaatattgaaggttgatatacttagacacttttgatmattctttatgcattatacatatataaaacattattttatatataataaatgtttaatcaataaagataaataatacagacaaaaaaaactatagctgtgctcactaaatgcttgtttccgactacactcttctacttgatgactgaatagtgattagttggtgacaaataatagaacaattaatatttaggaagaaattctgaaagagaaagaaaaaaatcaagagagtgggagtgatatagggaggggtgatgaggaaggaaaggagaaagagagtgatataaagaagaaaaaatttaaagagaggaagaaaatgaaaacttgtcagagatgtatcattaaatatcaaacattgtgttacaactttctgcatgttttatttaaccctcatatgaaaactgtaaggaaggtatattcatttataatttaaagatgggaaaagtaacttatattaaatatccaaatattagggagggaggagaaaagggagggagggaagagagggagcttatacagtttggctctgtgtccccacccaaatctcatctggaattataatgcccataatccccccgtgttgagggaggaacctgatgggaggtgatgagatcatggtgctatttcccccatgcttttcttatgatagtgagctgtcacaagatctgatggtt

SEQ ID NO: 686752 - DNA, 861 bp, Homo sapiens
tagaattcaaaagcatcaacaaatataaattttgcacatattgtaaaataataaaaacacaggaaatatagaaataaaactagcagatcaggcaaataaacttgagaaaggtcaggcatgagcctcagagttaaatataatgttctatttcttaaatattgaaggttgatatacttagacacttttgatcattctttatgcattatacatatataaaacattattttatatataataaatgtttaatcaataaagataaataatacagacaaaaaaaactatagctgtgctcactaaatgcttgtttccgactacactcttctacttgatgactgaatagtgattagttggtgacaaataatagaacaattaatatttaggaagaaattctgaaagagaaagaaaaaaatcaagagagtgggagtgatatagggaggggtgatgaggaaggaaaggagaaagagagtgatataaagaagaaaaaatttaaagagaggaagaaaatgaaaacttgtcagagatgtatcattaaatatcaaacattgtgttacaactttctgcatgttttatttaaccctcatatgaaaactgtaaggaaggtatattcrtttataatttaaagatgggaaaagtaacttatattaaatatccaaatattagggagggaggagaaaagggagggagggaagagagggagcttatacagtttggctctgtgtccccacccaaatctcatctggaattataatgcccataatccccccgtgttgagggaggaacctgatgggaggtgatgagatcatggtgctatttcccccatgcttttcttatgatagtgagctgtcacaagatctgatggtt

SEQ ID NO: 686753 - DNA, 1690 bp, Homo sapiens
gtaaaaagaggggaaaaagatattgcaaaatgatttcttctgggttgtgtaaatattgctttctctgagtgagacaagagagcccctcttttcctgctagcctcatgcagagatgcttctctccaatggccataaacaaaacatcagcagatgcgaggaataagtgaatatcaaggagacagtcaccatggcaaccataaccatggaaagtcctctccacaccgacctctgcatcagcagccagttagcaattcagagcattagctcatggaaatacagaagaaagagccaaaagaacttcagtgcagtgggcagaaatggactcagtttaaaaatctgaagccttgtcagaagtttcacttctctgtccttgcccaagggcttgcttaaggcagaatgatgaagggaaatattttctgtggcttttctttgcctacaggataaagggtgtgtgtgtagtccttgacctgatatttgagggtttttgcagtctatattttttggattatttgtatcttgtcttgatggtatagctgctcaagtcaaaatagtgtaactcattctctcccccccaccccggaaataacacatgcatttctaatatctattcatattccatcaattgtttgtttctctttcagaaagttctcagattcacctattgaaaaaagccctggacaactgtctgaatctttgaacttttatttcattcatgaagtcttccccagacaatacaattgacagttatttcaactgtcaacagttgtgtgaggacaaaattcttgggttcacttctcaattagatatttaaaattgagtggcattggacttaacttctcacatgttaaataatgttagttaatagtttttgaaaatcaaatgagaggctgcgtgcggtggctcactcctgtaatcccagcactttgggaggctgaggaggacatatcacgaggtcaggagttcragaccagcttgaccaacatggtgaaacgctgtctctactaaaaatacaaaaattatctggttgtggtggcatacacctgtaatcccagctactcagcaggctgaggcatgagaattgcttaaacccaggaggtggaggttgcagtgagctgagatcacaccatggcactccagcctgggcgacagagtgagactttgtctcaaaataaataaataaataaagaaaaataaagaaaaaaaaagaaaaaaagacagaatgtagggaaactaaatacataaataatacagggttgcaattcatattataatgttttaatataaactcaattttattttagattcagaaggtacatgtgcaggtttgttacatgagtacattgcatgatgctaaggtttgggatatcaattattttgacacaaatattgtttttcatttatgtaactttctattttcataccaccttcatggaagagtcccagttggcataataaatacgtgctgaatgtacaagtgcatgaagaatgtggaatatggaatgctagggcagagaatcattgaacttccattaatggcatggaatgatgtggaagaaggtacatttggaggaatacacacacacaaacacacacactaacacacacacatatataaaataccattgtaaaccaacttattttatcttctttcaaaaaagctatagcttccctataattaaggacttaattg

SEQ ID NO: 686754 - DNA, 604 bp, Homo sapiens
taaggaacatagcctctaattcagcctgtcccaagcaacaactctgccaatcctcagatcccagcctgaagccctcacccaagcagatcccaaatagcagaattgcccagccagaaaatacatyttgtgaccagcctaagctgaagctatcacagtacccagccaggagctctgcctaacagcaaagcccagtcagttgtctcactgggcaatgaagcccagccagcagccacaccaaacatctcagcaaaggcagaggtccagcaaactagagaactcaacataagctccacctacctgatgtttttactttggggcccatccagaatcacaagttagactacatagtgaaggtctatccttgtggaaaaacaaaaacaaaaacaaaaacaaaacaaaaaaacctgccaaggccagaagagggagctatctcctcaaatgtgtagcaattaatgcaaaagcacaaggattacaatcagggaatcataacacttccaaaataaactaataaaatttccataataggcctcaaagaaaaggagatctgcaaaatgactgacaaataattcagactaatacttataaagaagttcaataaactaca

SEQ ID NO: 686755 - DNA, 961 bp, Homo sapiens
gacatgacaacaaatcaaacaatgcaatcctgctagcccttctccagctgacaggttaaaaattttaaatatattcttccacacaattttccatgccaattaaaatagcttcaaactcaattactcatgtaggtattctaatttctccattcttccccacagcagatgcccttgatgccccagggtccccatagtcaccacagtccataggcaacctgcattccttggcaggtattgcagtactttgtacagcacattgacaacttctcacttgaatcatctaagtctttcttctttggggccttagaggcagtgttagcatcatgaaagtttgtgtagccaagacattagaaatcacagggtagggaggtgaggattcttacaacataaagaacagaagtctatggataaatacctacaattttccctctgtcctccagtggaaccttatgagacacacttcaaactatttcagagggactctgacaggtgttttctaggataaccttctaaataatctatctgcagtcaactttttgcctctgggtttgctttgaggaaaatcctaatcaagactcccactaaatgttatcataccatatgtattaatctgagactagatttttttataccaataagacattatatatattgctagctattttgttttacatatagttatatatttatacagtttatactatgctgctacatatatgtttgtgtgtgtgtatgtatatatatatacatatatatatatatatactttcagttcattattttttatggctgaatagtactccattgtgtttatacaatgtagccacatacacacacatatatgtagctgcattgtataaacatatatgcaactacatacgtstgtgtgcttagctgcatggtataaacttcaatctgcaatctgaggtatggattaaatagcctacaggtatataacttc

SEQ ID NO: 686756 - DNA, 649 bp, Homo sapiens
gccagaacaccagctgtctttgttggcttgtgttgccataaaggaatacctgagattgggtgatttataaaggttaatgtggctcacagctgtacaaaaaacatggagcctgcatctgcttgacttttgatagggcctcaagcagtttccactcatagaaggmggctaaggaaggcagatgtgtgcagatgcagatcacatggcaagagaggaagcaagagagacacaatggaggaagtgccaggctcttttcaatagccagttatcccaggaactaagaatgagagttcaccactccctcaaaaatgccactaagccgttcatgagagatcagcccctgtgatttcaccagggcctacctctaatagtgaggatcagacttcaacatgagactcagtgggaccaaacaaaccatatccaaatcatagtaccaacttctgtaatttccatgtttgccccagtgatggagagctacagcgatttgctctccaacttgacacttgctggtctaccagcacctatcatcaggggtgatggatgtgtggattgtccatgtcgtgatctcacaaccaaaaaggtcatttatgtgtcatcaaatatggaaaaatccaatctcaaaatcccatctacaagttggcttttctggaat

SEQ ID NO: 686757 - DNA, 649 bp, Homo sapiens
tttttttttgagacggagtcttgctctgttgcccaggctggagtgcagtggcgcgatctcggctcactgcaaactccgcctcccgggttcacgccattctcctgcctcagcctcccgagtagctgggactacaggcgcccgctaccacgcctgctaatttttgtgtgtgtgtttagtagagacggggtttcaccgtgttggccaggatggtcttgatctcttgacctcgtgatccacccgcctcagcctcccaaagtgctgggattacaggcgtgagccaccgcgcctggcctgtatgccattactttaaggggatcaggatatctgaatattatggtgaccttaaaataacctcacaaaaatgaattttatgttaaatttaataatgattttctaccaaataaggttctattttatatattttcatttcatacgcatatatacgtttaggggcgtrtgtgtgtgtggggtgtgtgtgtgtgtgtgtgtgtatatatacgtatatatacacatatatacgtatatatacgtgtgtgtgtgtatatatatatatatatatatatataaaatttcctatgactttaggatctgccctctgggcctatagctcatacttctaggcccaattctttgccttcagagttatttt

SEQ ID NO: 686758 - DNA, 649 bp, Homo sapiens
tttttttttgagacggagtcttgctctgttgcccaggctggagtgcagtggcgcgatctcggctcactgcaaactccgcctcccgggttcacgccattctcctgcctcagcctcccgagtagctgggactacaggcgcccgctaccacgcctgctaatttttgtgtgtgtgtttagtagagacggggtttcaccgtgttggccaggatggtcttgatctcttgacctcgtgatccacccgcctcagcctcccaaagtgctgggattacaggcgtgagccaccgcgcctggcctgtatgccattactttaaggggatcaggatatctgaatattatggtgaccttaaaataacctcacaaaaatgaattttatgttaaatttaataatgattttctaccaaataaggttctattttatatattttcatttcatacgcatatatacgtttaggggcgtgtgtgtgtgtggggtgtgtgtgtgtgtgtgtgtrtatatatacgtatatatacacatatatacgtatatatacgtgtgtgtgtgtatatatatatatatatatatatataaaatttcctatgactttaggatctgccctctgggcctatagctcatacttctaggcccaattctttgccttcagagttatttt

SEQ ID NO: 686759 - DNA, 1388 bp, Homo sapiens
tttcagaattttatttaccatgtggttctggattagaatctaatgatagaaatgctttgtagatatctgaaaaatgaaaaagaaagacatgttattttctggagatggggagacaagtgaacagatgtggagtttactgaagcttcaaagtgagtctttctaaactaccagctttatttttgcatattgagatagaaccttacaaaatcattggaaggaataggggagagactggtagagaagctgtcaccaatgcttttatttgcagaaacaaaatgggcttaatgtgaatctccagatcctttgtagattttttgcaacaccttggcttacatgcagtcttcctgaacctgaaatgaacacatggatccaaagatggtgtagtgacagtttgactcaccttcaatgatcacttccacctctggggtgtggagctgccaatgccagagggtttgttgcatctttttaaatttggcatgtgaggcagccagcatcattgtcttttcttgatcaagaacaattttctttttgaaaatattgagagacagagacttcctggatgactcagccataaatggaaggggactgtcagcaaacctttgcctttttgcatttgattttcattaaaagaatgccccttagagtcttggggcattctttaatgtcagcgaaggcaaaatagagcttctatttaattatattttaaccttttaaaatttggattgttgtctatggtttaaaattaacataatagttctaatattatttaacttatagaatacaatattaatatctatctcttgtagatataagccagtaaaatgttgctgctattagttataatcaacattgtttgagaataattgaactgcataatgtattatcaattggtaaacgaaaactattggtatttttttaataggcatcttggtttatatgcaatgctacgactaatggacagtaaattggaaaaggtttatatcaaattgtggaagcaactttgagctcatcatataaattgtggtcataacttttcaagaaataaayaatagtggagtcaattaatgtgaattttcttgtgtctcactgacaactccttggttataacatacacttccctggcctttgattgctttactttctcctagcttgtgtgcaatacctgtgtagttctgagtatttatctgatctctttagtagtagattaaaaagtgattcctgttcaaagacatgagttcagattcaagtcaaaataatacttctgtgccatataaatttcccagtgtcaagttacttctaagttaacaggtaatgtcccctcccacctccatcataagatgttagcttttactgtattcagaggagcttacattgtgagtgtcatgaca

SEQ ID NO: 686760 - DNA, 662 bp, Homo sapiens
ttctcacattgttaaaaaaaactacttgagactgggtaatttataaagagaaaaggtttaattgcctcattattccacaggctgtacaggaggtacagctggggagaactcaagaaacttacaatcatggtagaaggtagagaggaaggaggcatgtcatggccagagtgagaggaagagagtgaaagtggaggtgctacacactttcaaacaaatagctatcataagaactcactcactatcatgagaatagcaaggaggaaatccacccctatgatccaatcacctcccaccaagcccctcctccaacactgggaattacaattcaacatgagatttgggaaaggatacaaatccaaatcatatcacccaccactgtaaaaaattacaaagattagctaccataattttcttgctggcaccttatggcatgtaaatattactttatttttttaatttaaaaaattcatgaaaactctcaaagttttatatataatttaggaacatttctataaatcttatrtgtataaatagcatcttatatgatcactttaaaaatatattttatcatttgcaaaaaactaataaaagcaaagataaatgtatattcacattcatttgcttattagaaagattgagaaatattcaatgaaaggactaac

SEQ ID NO: 686761 - DNA, 649 bp, Homo sapiens
tccatttcccacatctcatcaccatctttttgtgtccttccctctctccttgctttctgactgtgtctctgttctgtgtctctttctttctttctttctttttttttttttgagacagagtcacattctgtcatgcaggctggagtgcagtggcgtggtcttggctcattgcaacctctgcctcctgggttcaagcaattctcatgcctcagccttctgagtagctgggattacaggtgcgtactaccaccaccagctaatttttgtatttttastagagacagggtttcagcacgttggccaggctggtcttgaacgcctgacctcaagcgatccacccgcctcagcttcccaaagtgatgggattacggcgtgagccactgtgcccggcctctccttgctttctgactgtgtctctgttctgtgcctgtttctttctccctgccctggtttctgtctctgtggcccaggccctctcctcatccttggcccctcaccaggtgacagtgggaactggatcgagatcgcctatggcaccagctcagggggcgtgcgggtcatcgtgcagcacccggagactgtgggctcggggcctcagctcttccagaccttcactgtgcaccgcagccctgtcaccaagatcatgctg

SEQ ID NO: 686762 - DNA, 649 bp, Homo sapiens
tccatttcccacatctcatcaccatctttttgtgtccttccctctctccttgctttctgactgtgtctctgttctgtgtctctttctttctttctttctttttttttttttgagacagagtcacattctgtcatgcaggctggagtgcagtggcgtggtcttggctcattgcaacctctgcctcctgggttcaagcaattctcatgcctcagccttctgagtagctgggattacaggtgcgtactaccaccaccagctaatttttgtatttttagtagagacagggtttcagcacgttggccaggctggtcttgaacgcctgacctcaagcgatccacccgcctcagcttcccaaagtgatgggattacggcgtgagccacygtgcccggcctctccttgctttctgactgtgtctctgttctgtgcctgtttctttctccctgccctggtttctgtctctgtggcccaggccctctcctcatccttggcccctcaccaggtgacagtgggaactggatcgagatcgcctatggcaccagctcagggggcgtgcgggtcatcgtgcagcacccggagactgtgggctcggggcctcagctcttccagaccttcactgtgcaccgcagccctgtcaccaagatcatgctg

SEQ ID NO: 686763 - DNA, 609 bp, Homo sapiens
  misc_feature 84: n = A,T,C or G
acactggaaaagctggcagccctgggctcatgatcccctgtggcattaattgccagggggtcaggggggtggggagggatgcangctctctcattcccagcagcccccacccaatcctcctcaatgtctgctgccctctgtgaactcaccggccctgctcgtctgacccttcaccagcttcccgcactgtgccttacctgcctgtaggcatttgagtgcctgaatcygtcctacaatgtgtgatgattattttggttgcttggagatctgtttttgcttaattcctgcatctcgcttgtggccaaagagtttgaggttgccagccaggcacaactaaagccttagacacagatgaagatggagtggtcttggtggagatgagaggactcatcaaaaagcattgccttaaaaaaaaaaaagattcaatagccactcattctgcagagggtgatgaagaacggcaaggatgtgagagtaggtccgactcgggttccagtcctgcccctcccctgaccggcatctgcctcagcctttgtaaactcacctgcagtggaagcagagctcgtggaagattaatgagaactaactcattgtgagggaagagaaatc

SEQ ID NO: 686764 - DNA, 609 bp, Homo sapiens
  misc_feature 84: n = A,T,C or G
acactggaaaagctggcagccctgggctcatgatcccctgtggcattaattgccagggggtcaggggggtggggagggatgcangctctctcattcccagcagcccccacccaatcctcctcaatgtctgctgccctctgtgaactcaccggccctgctcgtctgacccttcaccagcttcccgcactgtgccttacctgcctgtaggcatttgagtgcctgaatctgtcctacaatgtgtgatgattattttggttgcttggagatctgtttttgcttaattcctgcatctcgcttgtggccaaagagtttgaggttgccagccaggcacaactaaagccttagacacagatgaagatggagtggtcttggtggagatgagaggactcatcaaaaagcattgccttaaaaaaaaaaaagattcaatagccactcattctgcagagggtgatgaagaacggcaaggatktgagagtaggtccgactcgggttccagtcctgcccctcccctgaccggcatctgcctcagcctttgtaaactcacctgcagtggaagcagagctcgtggaagattaatgagaactaactcattgtgagggaagagaaatc

SEQ ID NO: 686765 - DNA, 1262 bp, Homo sapiens
aagcttgctatggcttctctgtctgtgacactacctgcccccaccccaacttaccttgctcttccagggacacactgcttttctctacttccctagcaaccccactgggagacaaaatttctttcccttctggtgttaactgcccagctgttaacactaaatgcccaagcaaagataacaacaacaacaacaataaaacccacaaatgaaaactttatctttgactatattctgttaagtttcaaggaacagcgtaggtaactatttgtctttctgcacaacaacttttctctgattccgaatgtcgcatccgaggaaaaagaagttgagaaattccaagagacactatttgacaatccagctgctgccagagatgatccatatctagaacatcccatcctttatatcttccgaacactttcaaataaatggaaacaaaagtcttaaaatagagataggcagtgatttcttgcaacttctaattttaatagccttattaaattctggaatcattttcagtttattcaatccactcttatactagctcctttcccacagagccggccatttgcctgagtttagacagtttgttagggcagagggcttggatagatcccaaaaagcagacgtttcttctgctttcctagaaattaaatcaggaataaatttgcctccaagatacatcctgtgtttgtacctaactggagacaatttttgcatttgatgctctcactgggtaacgtagttttaagttcacattttatatttagccatctatccttttattttttatttttatttttatttttttttgagacggagtctcgctctgtcatccaggctggagtgcagtggcacaatctcagctcactgcaagctccgcctcctgggttcacgccattctcctgactcagcctcctgagtagctgggactacaggcgcccgccactaggtccggctaattttttttgtatttttagtagagatgggatttcaccrtgttggccaggatggtctcgatctcctgacttcgtgatccgcctgccttggcctccttgacctcccaaagtgctgggattacaggcgtgagccacagcgcccggcctgccatctatccttttagatgacatccttaaactctatactctctcctcaaaaacaatgggaaaagcgttataaatggaataggtccagtccaggttcactttggttggggtcttcagggctaatattgtagctttgatttttacccttcaatatgt

SEQ ID NO: 686766 - DNA, 1262 bp, Homo sapiens
aagcttgctatggcttctctgtctgtgacactacctgcccccaccccaacttaccttgctcttccagggacacactgcttttctctacttccctagcaaccccactgggagacaaaatttctttcccttctggtgttaactgcccagctgttaacactaaatgcccaagcaaagataacaacaacaacaacaataaaacccacaaatgaaaactttatctttgactatattctgttaagtttcaaggaacagcgtaggtaactatttgtctttctgcacaacaacttttctctgattccgaatgtcgcatccgaggaaaaagaagttgagaaattccaagagacactatttgacaatccagctgctgccagagatgatccatatctagaacatcccatcctttatatcttccgaacactttcaaataaatggaaacaaaagtcttaaaatagagataggcagtgatttcttgcaacttctaattttaatagccttattaaattctggaatcattttcagtttattcaatccactcttatactagctcctttcccacagagccggccatttgcctgagtttagacagtttgttagggcagagggcttggatagatcccaaaaagcagacgtttcttctgctttcctagaaattaaatcaggaataaatttgcctccaagatacatcctgtgtttgtacctaactggagacaatttttgcatttgatgctctcactgggtaacgtagttttaagttcacattttatatttagccatctatccttttattttttatttttatttttatttttttttgagacggagtctcgctctgtcatccaggctggagtgcagtggcacaatctcagctcactgcaagctccgcctcctgggttcacgccattctcctgactcagcctcctgagtagctgggactacaggcgcccgccactaggtccggctaattttttttgtatttttagtagagatgggatttcaccgtgttggccaggatggtctcgatctcctgacttcgtgatccgcctgccttggcctccttgacctcccaaagtgctgggattacaggcgtgagccacwgcgcccggcctgccatctatccttttagatgacatccttaaactctatactctctcctcaaaaacaatgggaaaagcgttataaatggaataggtccagtccaggttcactttggttggggtcttcagggctaatattgtagctttgatttttacccttcaatatgt

SEQ ID NO: 686767 - DNA, 1689 bp, Homo sapiens
cctggctggtagcatgaccagaggacagcctgtcagactgagtgggcggagtgagcccaactggctggagcaaagcccaggcagaggtgccacgggccacagagattcccagctggtgaagtggcactgaaataattctgtgtcataattaccgtttattttaagtcttttaacgtattttaaaaagctgtttttctctcctcatgtgataaagacaatattaaagcaatattaggttgtgtttctattgaccaattaaaaaaaatagaccatgcttccttgctaatttacatggttgaattatattttctttctttatagggtattaattatattttgtcagacgattaaattaccccggatttttgttgcttctgctagtcttggttttagtctctgttaaggtaggtcgattttgattttgtcattagttagagggtgcacctttattccaaagccatgtcttttctgactctcaattaaatatctgcaatcttcagcaatgtgtctcatttctttatgggccagaattgcaatatttttatcctggtgtgatctctgttatcttcattcattctcagcccagcaccagcacatttctgctaagtgtcgctgagtcgttctgtgagcattacacaacaaggccctcagtcaaaataataataataaaataataataataataataataataataataataataataccccagtgtgagtcctcacagacatgtggggcccctctgttcaacttctttctttctaggaacctgccttgaaaattccgtctacttcagcaatatagaattccaaactctgcttccttggctcagcaataccactgcgtcacttgagctccgtttccgtaagacaagtagagaaagtacccctactcagaatgttgttgatgtcttctgtcgaggattatagtcctgctttgcctattgttcaatgcatgaaaataatcacttcatatattttgtccaagtttacacttatttacagtggaagggcaagtcaagtagcagttatttattgatggatggacattgaattgccacataaatatatttttattattatttcaatgatggaaatttctgactagttaaaagtaaatttgcatcactattaatttatcactctaaargttttatagtcatcaatatttttggcatatttatcacccacccttggaatatattcgtgctgttgcaaaagttttaaaaacctctgatttttagtataaaatttatgctctaattcgttgaaaatttgtttgtgatattctaagccaaaccctttgaatcccaaacaattattatattttgccagtatgtgattgtggaaaaaaaagtcatattttactgcataaaatcaggaaaggtgagtatgattttcaagactattttggaatttgtacccaagaaatcaagactatttatatttataccttttagtataccctttccttggataataagcatcacctcaaagtctagtttaaatgggaaaaggaacatacagtcaaaggtattactgagaaagaaaaatacacaagagaataaatcaaaacattatccactaaatcaatcacttccctaggctcaataatctacaagtagagaccattatttcatgttctcattttatgcacgtaaaataccatctgagagtcatgttactt

SEQ ID NO: 686768 - DNA, 524 bp, Homo sapiens
tttaaaaatgaacaatttggctgggcatggtggctcatgcctgtaatcccagcactttgggaggctgaggtgggcggatcatgaggtcaagaggttgagaccatcctggccaacatgttgaaacctcgtctctactaaaaatacaaaaattagccgggcgtggtggcagttgcctgtaatcccagctactcaggaggctgaggcaggagaatcacttgaacccaggaggtggaggttgcagtgagccgagatcgcaccactgcactccagcctggtgacagmgtgagactctgttaaaaaaaaaaagaacaattaattcttgtgtgtacataatagctctctgttaactaaggctattctattcttcacttgtttcaaataaatatctcccctactagatctcaatacagtggtcttaagtcaatttaatcccagtaatgttttatagtcattttctcagaatttctctcatgttcaggtaaggattacataattgaacacaaaattttatcttgtctaagtac

SEQ ID NO: 686769 - DNA, 613 bp, Homo sapiens
cttttgaacacttaaaaggccccattaccaggcagaggttgcaatgagctgagatggttccactgcactccagcctgggtgacagaatgagaccctgtctcaaaacaaacaaacaaacaaacaaacaaacaaacaaacaaaatgccccattgcctaaactctgaaaaagtcaatacggggttgttgacaaaatctattattaytgcccatctggtgatctgctgctcccctaccagtgaggaagcttcttgaggtcggggactctgtcttgtttgctattttgtttgttcaattcctaacagggatcagaggacaccatagataggtaataaacgtgtggggaagatgggaggacaggagagcaggaagagagcagggaaagctgaaggtacacacacttctgaggcttttgttaaaattaagtatttaatgcgatcactttggggaaaccacattgattaaactgacgggaggcatgaaaatgacataattgatacaaccgataattttattcttcaacaaaatctactattggccagagtgcccctttgagagataatggttcatatcagggagcaatttgctttcaccccttgcatacaaagcgggtttc

SEQ ID NO: 686770 - DNA, 950 bp, Homo sapiens
gcattactctttgaagctttgatttcttttgttcctgctgctggagcctccttggctgattaagtctgaggcttcttccaggttttgttggtccatgaatggagcctcttcagtgctcactggagtgcggtatcattgatacttcctccgcctggctccctccctctcccagcccagcagagctgatggattaatcctattgtgcgcttgtaagtctcccaggcagaaatgtaagctagggtagaaaaagacggctcaggttggatgggaccacagagaccttcctttctaatactcctcattttacttaattaggcttcaagaggtatagggcagagcagtgaagggcctggcccaagtctctcagagggttggggcaagtctagacttccccagggctttctactttacttgttccagcacaggcccttctcagtgggaagcctgcaagaatttttttgcccttgctgtagaacagtaacattgtatctacatacagaacaataacactgtatctagatgcatcttttacatttttacagcaaagtgaaggacctgctgactaaaatcatagatttttcatatgggaagtgaagggaatctgtagtactttctaayaagagtcggaaaactgtcttgtttgctaataattgctttgcctataatttttattttcctgccatatcctccagtttcacacatatgtccccaaacccttaagtctgtggattgcctgtctccagcataggaagagaccatggcttatgacaattttcttctttagagacaacattttatagcattcatcacttcctgacattatatacacttatttgtctgtcttccctcactaaaatataggcctcattaggatataggttttgttttgttcactgatgtgtccctctccaatgcctataattggagtctacatcagagtaagcactcaa

SEQ ID NO: 686771 - DNA, 950 bp, Homo sapiens
gcattactctttgaagctttgatttcttttgttcctgctgctggagcctccttggctgattaagtctgaggcttcttccaggttttgttggtccatgaatggagcctcttcagtgctcactggagtgcggtatcattgatacttcctccgcctggctccctccctctcccagcccagcagagctgatggattaatcctattgtgcgcttgtaagtctcccaggcagaaatgtaagctagggtagaaaaagacggctcaggttggatgggaccacagagaccttcctttctaatactcctcattttacttaattaggcttcaagaggtatagggcagagcagtgaagggcctggcccaagtctctcagagggttggggcaagtctagacttccccagggctttctactttacttgttccagcacaggcccttctcagtgggaagcctgcaagaatttttttgcccttgctgtagaacagtaacattgtatctacatacagaacaataacactgtatctagatgcatcttttacatttttacagcaaagtgaaggacctgctgactaaaatcatagatttttcatatgggaagtgaagggaatctgtagtactttctaataagagtcggaaaactgtcttgtttgctaataattgctttgcctataatttttattttcctgccatatcctccagtttcacacatatgtccccaaacccttaagtctgtggattgcctgtctccagcataggaagagaccatggcttatgacaattttcttcttyagagacaacattttatagcattcatcacttcctgacattatatacacttatttgtctgtcttccctcactaaaatataggcctcattaggatataggttttgttttgttcactgatgtgtccctctccaatgcctataattggagtctacatcagagtaagcactcaa

SEQ ID NO: 686772 - DNA, 950 bp, Homo sapiens
gcattactctttgaagctttgatttcttttgttcctgctgctggagcctccttggctgattaagtctgaggcttcttccaggttttgttggtccatgaatggagcctcttcagtgctcactggagtgcggtatcattgatacttcctccgcctggctccctccctctcccagcccagcagagctgatggattaatcctattgtgcgcttgtaagtctcccaggcagaaatgtaagctagggtagaaaaagacggctcaggttggatgggaccacagagaccttcctttctaatactcctcattttacttaattaggcttcaagaggtatagggcagagcagtgaagggcctggcccaagtctctcagagggttggggcaagtctagacttccccagggctttctactttacttgttccagcacaggcccttctcagtgggaagcctgcaagaatttttttgcccttgctgtagaacagtaacattgtatctacatacagaacaataacactgtatctagatgcatcttttacatttttacagcaaagtgaaggacctgctgactaaaatcatagatttttcatatgggaagtgaagggaatctgtagtactttctaataagagtcggaaaactgtcttgtttgctaataattgctttgcctataatttttattttcctgccatatcctccagtttcacacatatgtccccaaacccttaagtctgtggattgcctgtctccagcataggaagagaccatggcttatgacaattttcttctttagagacaacattttatagcattcatcacttcctgacattatatayacttatttgtctgtcttccctcactaaaatataggcctcattaggatataggttttgttttgttcactgatgtgtccctctccaatgcctataattggagtctacatcagagtaagcactcaa

SEQ ID NO: 686773 - DNA, 950 bp, Homo sapiens
gcattactctttgaagctttgatttcttttgttcctgctgctggagcctccttggctgattaagtctgaggcttcttccaggttttgttggtccatgaatggagcctcttcagtgctcactggagtgcggtatcattgatacttcctccgcctggctccctccctctcccagcccagcagagctgatggattaatcctattgtgcgcttgtaagtctcccaggcagaaatgtaagctagggtagaaaaagacggctcaggttggatgggaccacagagaccttcctttctaatactcctcattttacttaattaggcttcaagaggtatagggcagagcagtgaagggcctggcccaagtctctcagagggttggggcaagtctagacttccccagggctttctactttacttgttccagcacaggcccttctcagtgggaagcctgcaagaatttttttgcccttgctgtagaacagtaacattgtatctacatacagaacaataacactgtatctagatgcatcttttacatttttacagcaaagtgaaggacctgctgactaaaatcatagatttttcatatgggaagtgaagggaatctgtagtactttctaataagagtcggaaaactgtcttgtttgctaataattgctttgcctataatttttattttcctgccatatcctccagtttcacacatatgtccccaaacccttaagtctgtggattgcctgtctccagcataggaagagaccatggcttatgacaattttcttctttagagacaacattttatagcattcatcacttcctgacattatatacacttatttgtctgtcttccctcactaaaatataggcctcattaggatakaggttttgttttgttcactgatgtgtccctctccaatgcctataattggagtctacatcagagtaagcactcaa

SEQ ID NO: 686774 - DNA, 781 bp, Homo sapiens
  misc_feature 743: n = A,T,C or G
cacacacactcacagacacacacacacatactgagggcttactggtttccagaagaaaggagagaacaaagatgtgcagacaaggcacctgcagaatgagactatggctgatatcattaaacaagagcttcatttaamcttagaccatactctaggaatgcttacacagtagtttaatttttttcagttaagattcatgttacacttaataagtgagggatgctttaatgagattcaaaatgaaactcttgcatgcacttctgcataaaacctttcagggtcctagagttacttgtttcttaacatatagcagttgcaatactttgtattatgcctttccacagaacatctagctgggcatatttctttttgttctacatctagctaggcatgcttctttttgttctatgttcagacagtcttctagtgaagtaggttgagattatgcatcatgcctaagtgggatgcttaatctcatttaataagtgggaaaactgaggttgcgtttcttatggctgcttattacgcctatgtgtgccaccataatcacctgggccaacttcgtcaatagggtgatcattgtccttgaactgatggtggtgggaatgagcatatcgtcatcacccttccttaggaagtgccagaaggaagacaggcgattaagatgccacataaaactcagtaaccttactggaaagagtgccttctctgtgctagtctaaatgccacactctgtgtctttntcaggtgctgaaagtatctggaagattccattattatc

SEQ ID NO: 686775 - DNA, 781 bp, Homo sapiens
  misc_feature 743: n = A,T,C or G
cacacacactcacagacacacacacacatactgagggcttactggtttccagaagaaaggagagaacaaagatgtgcagacaaggcacctgcagaatgagactatggctgatatcattaaacaagagcttcatttaaccttagaccatactctaggaatgcttacacagtagtttaatttttttcagttaagattcatgttacacttaataagtgagggatgctttaatgagattcaaaatgaaactcttgcatgcacttctgcataaaacctttcagggtcctagagttacttgtttcttaacatatagcagttgcaatactttgtattatgccyttccacagaacatctagctgggcatatttctttttgttctacatctagctaggcatgcttctttttgttctatgttcagacagtcttctagtgaagtaggttgagattatgcatcatgcctaagtgggatgcttaatctcatttaataagtgggaaaactgaggttgcgtttcttatggctgcttattacgcctatgtgtgccaccataatcacctgggccaacttcgtcaatagggtgatcattgtccttgaactgatggtggtgggaatgagcatatcgtcatcacccttccttaggaagtgccagaaggaagacaggcgattaagatgccacataaaactcagtaaccttactggaaagagtgccttctctgtgctagtctaaatgccacactctgtgtctttntcaggtgctgaaagtatctggaagattccattattatc

SEQ ID NO: 686776 - DNA, 781 bp, Homo sapiens
  misc_feature 743: n = A,T,C or G
cacacacactcacagacacacacacacatactgagggcttactggtttccagaagaaaggagagaacaaagatgtgcagacaaggcacctgcagaatgagactatggctgatatcattaaacaagagcttcatttaaccttagaccatactctaggaatgcttacacagtagtttaatttttttcagttaagattcatgttacacttaataagtgagggatgctttaatgagattcaaaatgaaactcttgcatgcacttctgcataaaacctttcagggtcctagagttacttgtttcttaacatatagcagttgcaatactttgtattatgcctttccacagaacatctagctrggcatatttctttttgttctacatctagctaggcatgcttctttttgttctatgttcagacagtcttctagtgaagtaggttgagattatgcatcatgcctaagtgggatgcttaatctcatttaataagtgggaaaactgaggttgcgtttcttatggctgcttattacgcctatgtgtgccaccataatcacctgggccaacttcgtcaatagggtgatcattgtccttgaactgatggtggtgggaatgagcatatcgtcatcacccttccttaggaagtgccagaaggaagacaggcgattaagatgccacataaaactcagtaaccttactggaaagagtgccttctctgtgctagtctaaatgccacactctgtgtctttntcaggtgctgaaagtatctggaagattccattattatc

SEQ ID NO: 686777 - DNA, 781 bp, Homo sapiens
  misc_feature 743: n = A,T,C or G
cacacacactcacagacacacacacacatactgagggcttactggtttccagaagaaaggagagaacaaagatgtgcagacaaggcacctgcagaatgagactatggctgatatcattaaacaagagcttcatttaaccttagaccatactctaggaatgcttacacagtagtttaatttttttcagttaagattcatgttacacttaataagtgagggatgctttaatgagattcaaaatgaaactcttgcatgcacttctgcataaaacctttcagggtcctagagttacttgtttcttaacatatagcagttgcaatactttgtattatgcctttccacagaacatctagctgggcatatttctttttgttctacatctagctaggcatgcttctttttgttctatgttcagacagtcttctagtgaagtaggttgagattatgcatcatgcctaagtgggatgcttaatctcatttaataagtgggaaaactgaggttgcgtttcttatggctgcttattacgcctatgtgtgccaccataatcacctgggccaacttcgtcaatagggtgatcattgtccytgaactgatggtggtgggaatgagcatatcgtcatcacccttccttaggaagtgccagaaggaagacaggcgattaagatgccacataaaactcagtaaccttactggaaagagtgccttctctgtgctagtctaaatgccacactctgtgtctttntcaggtgctgaaagtatctggaagattccattattatc

SEQ ID NO: 686778 - DNA, 652 bp, Homo sapiens
tctctagatcagttaggcgactgttctctgtaattttactctgcctccctccttgtgatcactgctccctaacctcctttttagccatgtttcttaaaagtgtgctccataccccatctccagaccccyacaacacatttcagtgaaacacagttttcctccaatgctccattccctaaagttgcagaatgacttcttactttgccacaactaaggacacgtttaataccttacttgacttctgcacactatcactaagcatctataatcctcctgaaaggcagtggcatagcaccataaaaaggacgcgaatttaaaggcaaaaagaatctctggtccttcttacaacgcctcagtctgctcatttataaaatgctgttagtaatgcaaatgtacaggtcactgtgagaattaattaagatatcatagtataagagttctattctgaaaaaaataagttcctctgcatcccatatgttaatggaataaaaaaaaaatgtgtcctgcgccaagacctcttgtctatgttccagattcatatttccattttccacctgctaccctgctactcatgaatcctcccttcctatttgcccagtctctctaagtctaaccacttagtaggttcttctatttctccagtctacctccc

SEQ ID NO: 686779 - DNA, 652 bp, Homo sapiens
tctctagatcagttaggcgactgttctctgtaattttactctgcctccctccttgtgatcactgctccctaacctcctttttagccatgtttcttaaaagtgtgctccataccccatctccagacccccacaacacatttcagtgaaacacagttttcctccaatgctccattccctaaagttgcagaatgacttcttactttgccacaactaaggacacgtttaataccttacttgacttctgcacactatcactaagcatctataatcctcctgaaaggcagtggcatagcaccataaaaaggacrcgaatttaaaggcaaaaagaatctctggtccttcttacaacgcctcagtctgctcatttataaaatgctgttagtaatgcaaatgtacaggtcactgtgagaattaattaagatatcatagtataagagttctattctgaaaaaaataagttcctctgcatcccatatgttaatggaataaaaaaaaaatgtgtcctgcgccaagacctcttgtctatgttccagattcatatttccattttccacctgctaccctgctactcatgaatcctcccttcctatttgcccagtctctctaagtctaaccacttagtaggttcttctatttctccagtctacctccc

SEQ ID NO: 686780 - DNA, 640 bp, Homo sapiens
atctattttttaaaatattttaccataggctaaaaaagttgtattaaaaccttcataaccagtatatttgcatcaatatattcttataayggttgagataaaagatgaagtggtccaattctttatttgattgggataataacactattattattaaatactcaaaaagggaaggaaaagctcctcttcagatgtgtaggaaaagtccacctctatgttagcacatgaaatacgaattcatataaaattctaaagaaattcaataacggcaaaactaaaatattctcaaataagtatttttacagatttaaaaatcagtaaggccaattaatttttccttttttgttcttagattgaaatttaatttcattttgaaatttgctattcactaataaagtaatttgttctcactgttttagagattaatggaatatttctctttctttctttctttttttttttttttttttttggagactgagtcttgctctgtcgctcaggctggagtgcaggggcgtgatctcggctcactgcaagctccgcctcccaggttcatgtcattctcctgtctcagcctcccaagtagctgggactacaggtgcccaccactgcacccggctaattttttgtatttttagta

SEQ ID NO: 686781 - DNA, 599 bp, Homo sapiens
gaagacttcagtggctttgttaaaggcatgtgttcatcagtgttgaagtaaaactyacattttgtgactctgagctgttcactataatatgaaacctaatcctaaaacacaatattaaaacagaaaaatgtgaagccatagatctgtaataaagggccacctgattgtttcctggtggaataaaaagacagttttatttataagatatatcatttttatagataacaatgattcatattaggaataaagtaacagtttcaaactaaaataatgctaaagtttttcaagtactacttgaaaatagctatatttactttcaaaccttttcctctttgagtcattaggttcatgatattatatagcaatagggaatgaaagagaagcaaggagaagcaatactgggagattacagagaagaaaggaaaaaaggctgagagaaaagaggttgaggaagaaatcataaatctggattgtgagaaagtgtttaatatttagccactagatggcgatgtaatgtaaggtgctgtcttgactttttttttttttttttgaaacaagctatttgctgatttgtattaggtaccatagagtgaggcgag

SEQ ID NO: 686782 - DNA, 636 bp, Homo sapiens
cctagaaagccatattggattgtataaggcgcaggtacacttattttctgaccaggaggcactgtgatgtagttttagggtcatataactaagaccatcatgattaaggatgatttcatctccatagtgactcatttaatcaccctatatttaaattcttctctcctctccccttctctggctttttaatagatttaaacaaaatggctatcagtctctgacttcagtgatttctgtcattgaccattcagacattttccttattcttcaccatcactgtgtgatccatcggccttgtacgattcttggccaatggccatattaattttctacttgaaaggacacaaatagaatactgcttatgatgaaggtagtcagacgagcttgggraatagctggtcatcttgctgcatagcaattagcttggcaaactgaaacagtcacacgattggatctgatacctagccaaaactgccagaagaaaaaaactcattctgttgggggtgttaaatggctttttaaatagtgactatcacagttctatttgcccttttggaaatggtacaggcagtgtgacatcagagatctccgtttccacggtgattattagtgatggcatttcagacgttgtggtta

SEQ ID NO: 686783 - DNA, 656 bp, Homo sapiens
cctagagacggaagcagtgaaagggaggcaaagaaaagctatcaacccaagtaaatcgttcctaacgtagccagaggggtcctcagcatctccgcacatctgctcccccagccccgggtctactggctggactaatagactaaacgggaggtctgtaggctgtgactcgataggcacagtggcaagccccttcccggggaacagttcttgctggtattcggagcccatgcgaaatagtgcccttgttttacagttcttttctttgcaagtgctctttgagcctgatggcactgataacctgaccacgaatgaatgtgctcagtttccattgcctagaagggtcaaagtctaagggtagcagaaaagaggaaggtagtatagggtcaggggaaaggaaggcagaaccctaagaccagctgtgacaagttctgtctagaggtgggcctgcaccccaacacctttccttcctaggacatcattacactttctgaatagtgttcttttttttttttttttttttttgagatggrgtttctttcttgttgcccaggctggagtgcaatgtgcacaatctcggctcactgcaacctccgcctcctgggttcaagcgattctcctgcctcagcctcccaagtagctgggactacaggcaccca

SEQ ID NO: 686784 - DNA, 598 bp, Homo sapiens
gtaagtttcatggggataatggggagtagttcaaatgggtgtamacgttctctaggttcatgtaactgctaaagaaccctatggttcaaaacccctaatttttgaaagggtctgctagcatatctgcccaatcttttacccagagaaaaatattgtctttactatcttggctagggaaaaattcagccttctactccagagggagacagtatctctgtcttctgaagctatttgctatatcaatctccttgcaaaaaaaaaaatagttcagagcaaaagtcttcaaggcatcttcacaagacatgcagaaactcaagcaacccatggagaattgttgcccaacaatgatcaccctctcaaaatcaaaggtgtttcagtcccatgggtatgcttcccccattctctgataaaaaaaaagctatatacaaaggagtaactatgagtgaatatcagtcatggcaaacagtcactgtgcagaaattgtctcttaacttgaaataactgagaaacaaattaatcttggtaaatcacatagcagacatattcaggttggatatagatagtgcacactctaaactatgtgtatttttttaacctc

SEQ ID NO: 686785 - DNA, 2651 bp, Homo sapiens
  misc_feature 881, 882, 883, 884, 885, 886, 887, 888, 889, 890, 891, 892,893, 894, 895, 896, 897, 898, 899, 900, 901, 902, 903, 904,905, 906, 907, 908, 909, 910, 911, 912, 913, 914, 915, 916,917, 918, 919, 920, 921, 922, 923, 924, 925, 926, 927: n = A,T,C or G
  misc_feature 928, 929, 930, 931, 932, 933, 934, 935, 936, 937, 938, 939,940, 941, 942, 943, 944, 945, 946, 947, 948, 949, 950, 951,952, 953, 954, 955, 956, 957, 958, 959, 960, 961, 962, 963,964, 965, 966, 967, 968, 969, 970, 971, 972, 973, 974: n = A,T,C or G
  misc_feature 975, 976, 977, 978, 979, 980: n = A,T,C or G
tcctagttattgcagttagatgctggacatggtgatctcgctttgacaaagtagatgagaacatcatagaggataatggagcaatagaatgagtgaaactaggtccctgaatgacctaggaaggcacagccaccccagccagcctagactgttcacttcgggattgttaccttcgagatgaataaacttaggcttcaagtttgtatcttggactcctttatagtagcatcttagtctacatcctcacacaatgtataaatttaacctaataagctcatgactacaaaggacagttaggattgagaaataaaaccaaatttataaaggcatgtatctgaaagaaaatagtaaacttttacagaacaggcatgatgaaagactatttttagtggaagcaaagaaagtattagatagtttctggaagacctgctgtgatgaatgttttccacacagatgttagactcaggcactttatttaatttcaaaaggtgcaccatatgtacctctgtctctataaacgatcatattttataattataagactctttaaatcatctgtcagacatatccagatgccaaataagtcaaaaccttcagtgttaaaatcactactcaaaaataatttatacacttgggaaatgaaaattaataattcagaaggcatttctgaatgtgctgttatatgcccaagatggtacaaagtcttcaggacatggacaagggtaaaacattgtacctacaatcaaagatgttctaaccttattgaaagtacaataatccactttaaactatttttaagttgctatttaaagttaatgcttctagctataatttaactgaaaattattagtgtttacatgtaatataccagtgtgttaaannnnnnnnnnnnnnnnnnnnnnnnnnnnnnnnnnnnnnnnnnnnnnnnnnnnnnnnnnnnnnnnnnnnnnnnnnnnnnnnnnnnnnnnnnnnnnnnnnnnggacctgagagtaattatcccagttttcattttacatctgtaaatgtacgtcattgtgaagaatccattttaagcttctaacactgtagctgaaaatacataatctggcactttatgttttggggtatccgatcccataactgacacctatatgcatgaccaaactcrtataaatctctggacatttgccccagaatttaccctgctaactttatttacctggctgttaatgtttttgtcattgtacgcttgttttgatacgtgccttcttattgagttttggcttggcttattgaactttattcctatagtctcctcaatcctgttaatttgtggtcattcttggccttaggtgaaaaactcctccttcatttccaacaccttgtactattcccttcagctcccctactattaggaaaggagaacttggggagtaagcactgatctttgagcagtcactctcaaagtgaatctaaaaccttgcccaaattagatagagaccaaacctctcctacttatagagagttttgatttcaaggtagaaggcatatacaagccaggagaaattccagaaagctaagacttctagcaagacgattggccccagcactgtagagcggtaaaaaagatgaaaagtaaagagaagtactactccagataatcagaaaaagatcaacagaggacaatatatttgagtaaagaccaaaagaagtcaggatgcaaatcatgtgattacctgaaagataagcagttcatgacagaggaaaatatataatttctggacattgaatctttttttatgttcaaagggtaacaagtagactagtgggatagagaagagggaggcaggagaaagcgtttaggaaaaaggtcagaagagccagctaatataaggccttgtaggtgatggtaaaaacttgagattttagactaagcatgatgggaaactattaaaaggttgaaaacacgaaagtgacatgaaccaatttaccatttgaaaataactctcacttaaatatgtgtgtaggattcaaaatctcacaaataaggaaatcataaatacagaggacaatctgaaatctataaaaaccaacaacagaatatcaaatgttgtattgaatatacacaaaaataggttattttcctctagtattttactaagattgactatttcaacttaatccttgggaaagtataaactataagtataggcttattactttacttttcttcaactttccttaaatatttagtgagtaaaattaatatgcataaacctaaagaaaaatgttttttaacacttttgaaggaaacatttaaatttttcttaaccaactcatttaatacattgagtgttttgaaagagtaaacttgaagtatgagaacttgaatgctcttttccacttaaaggaaaagcaaaagtatgaaaacggattagctaatgctgaacaggtatataaagagtagtagaaaatgtagaaaatgaagaaaatcaaacatttttatcaaacatatctaaaatagatggtatatatctgataataaaatttgaccatgaaatataaataaatggaaagaaaagtacaaaagctaagtatcagtttttctgagtcgttacaagataaagtagaactaatcttttttcttttttcttttttttttttgagacaa

SEQ ID NO: 686786 - DNA, 392 bp, Homo sapiens
ctcaatttatttctaaccttaaagtacaaaacatttctctggaattttatttaaaacgtaatttttatactaggtcttatgacrttcaattgtcttatgaactttagaattgttgattatgttgttctacctccctaaacttttctttctggttttgcgtttaaatggaaagaacctaccctctgaaactcggcggggcagtaaatttattgagtgttttgacaggcataaggaatttatttaattacagtaattttattgaaattattaggaaatggaaaatgaataggaatagggaaaattggcaagattttattatttctagttagtcaaaagatattttaaattaaataaataacaaaactgatgcacccctaaatgcaatatggcaa

SEQ ID NO: 686787 - DNA, 1400 bp, Homo sapiens
taaaaagattattggcagtgaatatttttctttctgtagtgttttaaagattagataaatctattgtacgtttttggcaatagcatattatttctgcctgactctgtgtgtgtgtgtgtgtgtacgtgtgtgtgtgwgagagagaagaaaaaagagagagagggagagggaaagagagagagagagagagaaagagagagaaaaaatactgcaaaatgtgcaagtcacacatttgaatgatacaagattgttttttccttctcatttacaaagtctctctatcacttaacagagagaatatgaacaggggagggaattgtttctcagttaagaaaaattgtgttacaaatatcagtgggtttgcatttggagtaaccaaactgcagaaagactgaaagtctgatgtattttcccacaaccctgaaacttgagattgaactgagtgtctgaaatccttgggggcaagaactgtatcttatttagtttggcatacaaaacacacagaaaaaggtactcagtaagtatttgttaaagaaatgtgtagcccaagaggtacagtatttccaaactcccctctctactcctgtgccccttcccaaggcctttggtccagattccaagcgtgcctttctgctgattttgccttcgcaattgtttcctttcctttggtctgtctggagctctgtcctgaatccctgctcaactggactgcttctgggccttgagaagactctaggtccagtcagcccctcatcagcctgggccttattcttacagacactccagagtattgatatatcacaggtaaactgttcggagtctgacattgggtgggcatcatgtaatgaatgttggcatctcctgctaccaaagccttgtccacctcctgagtttttagtccctgagttctagtctcactagctcaaaccatctagttccactgcttctgggagcacaactggacttgtgacactccacaccttcttcgcagggtccatctgtgtagctgggtcaggtcctgcctctatctttttttgttaccacacccataatgtaaggcctccttctgctctgacgttcatctctgcaggacttgccctttgtgctgatgccttatcagaccttacattaggtttttaaaaaactgtttattttgaaataattttagatttataaaaaagttgtattagttttctgggacaatctcaacaaattaccacaaacttggtggcttaaaaaaacaggaatttaggcctggtgcagtggctcacacctctaatcccagcactttgggaggccaaagcctgtggatcacaaggtcaggagttcaagacagcctggccaagatggtgaaaccctgtctgtactaaaaatacaaaaattagccctgtgtggtggca

SEQ ID NO: 686788 - DNA, 575 bp, Homo sapiens
tgcacagccagtgaaactttacgctttcatatctaagccatttcagctcaggttaggctaaagaatactttttcactgttggttttgagaagcaacatgatatgttggaaggagcaacgacagaaagagataggcacaggttccagttctgtccctgttcctagtgcccaggaaggctacgtaatctctatagaccttggtctcctgatttggaaaatagaaataataaaccacacacacatcatgttgttctaacagttaaacatggttgtggaggtcaagcatttaacatgtgtctggatccattaggtgttaagaaaataatatgtcctcccctttcctcttctcaatatagtaaaataatcagatgagcagcatttcaccaggacataaagtgcttacaactggaaggaaaaaccatttttcaaggtgatgtagaccatttattgtttttatgtaaatgtgwttgtaacttaaaacaagctgtatctagtgaccagtggtgaccttacagtgtcttttcttggcagtgctacgttagcactggaaactggttcaagttaccatagtttgct

SEQ ID NO: 686789 - DNA, 606 bp, Homo sapiens
cacccctggtccccgcccctgctcctccacaccttagctgtgtgagccccgaccgtgactgcctctttatggacctctagtccctcctggggaaaacagtgtgaacccaggatttgagtggaagtgattattttactttttttttttttttttttttttgagacagagtcttgctctgtcccccaggctggagtgcagtggcgtgatcttggctcgcggcaagctccgcctcctgggttcatgcaagctcccaggttcatggcattctcctgcctcagcctcccaagtacctgggaccacaggcatgcgccaycacgtccggctagtttttgcattttttggtagaaatggggttttgccgtgtaggccaggcttgtcttgaccccttgaccttaggtgatccaccagcctcagcctcccaaagttctaggattagggattacaggcttgagccactgtgcctggcctgattcgtcgttcctttttttttttttttcttttaggaagagtcttgttctgtcacccaggctggagcagaggcacaatcatggctcattgcagcttcggccgcccacgctcaggcagtcctcccaacttagcctcctg

SEQ ID NO: 686790 - DNA, 610 bp, Homo sapiens
gaagagagcttgtacagggaaactcccatttttaaaaacatcagatcttgtgagactcactcactctcacaagaacagcacaggaaagactcaccactatgagtcaactacctyccatgacatgtgggaattcaagatgagatttgggtggggacacagccaaaccatatcattccttttgaggaaagcacactgagtatttgctgataatatgaagtaagctcagatacaagtggtgagggtcagcttactctttctgatctcagattttagtggaacagtatttgatttctctcttaggaatttggtactccagatagcggttctgtggctcttgctgtagactgttagatgcaataggcttgcaggacacatatcaatgggttcaatgggaaatatgggaaattattggttagatgcacatgaaccatgggcaggaaaaagaggctgtagagagctgtctgaacactcttgctacaattattctgccatgtattaaatgccatatatcagactttttaagtgtttgacaatgctttttgagtttgtaataagtccttttagcaatgagctaaaaaataacgaaaatgctttataaataaaaaattaa

SEQ ID NO: 686791 - DNA, 1809 bp, Homo sapiens
acagaaatggaagtcacaattttatgtagcaaaattactgaaatgacatctcatcatcgcctttattgtagtctattgcttaaaagcaagttattagtccaggctatgctctaaaggaggtcattttagagtctgctggctgccccttgctagattaaattttaattcatctcatcatcatattttcctttcaattctggcaaacttttagggaaagttacaagttttctaatacatttttctcctcacgctaaatattttctaaatagtttctatttacgtaactggtctttaatacttcattattgctaggaactccaaatatattttggaacaaggtatgcatgttaagaaattaataacagatggttatctggctactcagatcaaggtgttaatacatcaactcaataatacattcaagaaaatataaactaggaagacctttgaagaatgcatttccttcttgctatctcctttaaagcagtaatgaccasaaaaatctctcaaggctgaatgtgaaaaaaattatggattttgactgctgaatatcatgtaaagaaaaattatggtaataacatttaggagaaaaggacaacttcttcaatgatatgtaatcatacctagagtgaaaatctttccctaatgtcatgacacgagtgctaaaatcataggtgaatttaacttaatgattctgccattttgctgtgcctttatttaccttctaattgtagttgtaaaataattcagcatttacatatttatgccttgcatttcttgcggaattttatgcaatcgtgaaataactccatttagcaatcaagacacttaatttaaagcttgcctcacttccaatgctgggtgacaatcataaataattttaatgacaatgtcaggaatgttagaaatatttgaaggatcatttgttttgcctgagcaatatacagaactggaaagaaggaatgatttacattttggtaattagacatttctaatccctttcattcttcagtcaagctataacctactgaattgaaaatgtaagatgtcagtgcttttcaatacaagaatacatattttctggcatttctctggattgaacaaaactttggtttccatggatcccaattacagtttcaagttgttcagcaccacagcaacaagacaaaggagaaattcatttaaagctgttgaacttttaacatggaatataaaggaaaaccaatgaatgcaggcttggtacatgattgctccctaggagcctgatagatcctgaccaatcactccagtgctaaggaatgtcctttcaagacaatgccaccaggcaagttcacgcaagaagaacaaaaaggttaaaatggaactaatgatttcatgtcttttatttaaattggctatagcctcacctaggagtaactgtctttaagcttatctcctggttaattgatgaatatctgtgtaaaatactcaataagttcaccaacagtcatttcagtagaaatttgaagacttcctgggctggcctggagatggttataggatcaaaaaaaattacattgttttaacagatcccataaaatagactcatcctgatggaacagtgtggtatgcatagaattaatgagctccttaagagtaacaaccaaacctctttttccctctttataaccccaacattcagcataatgcctggcccacagtatgtgaattttagtagtttttttagaagtcaattaaagacattttcttctacaaaataggtgataatttccatttactgtcataagtatactgtttttgatattcaag

SEQ ID NO: 686792 - DNA, 784 bp, Homo sapiens
tgggacccaggcttttcctgctgaggggtgcctggaagccagtgctgagctgccttcagcagccccttggtttccctcccatgctcattggtgcccaaattccagagggggccaaaatggcaaggggctgtcaygtcagtgctgcctcaagtgtgcacatacctggccaggttgtgacagcatccaggcttggcctcaactttgctccaagattggagtgggcactgggagtagggagaggccagacagtgggagcagacacttccaagcctgtggtggcaggtggggccttcctgggcccctgagagtgcagagatccctgattctgcagccacagcttgggtggatgcacctgcacctgggagggcagagctcctgcctgctcctggtctccaagtgtgcagagacgcctgtgtctgcagctgctgctgctgggtggccaaagctgcacccaaggagcacaaagctccagccctgtcaactcagaagggagccaaggttttctccttttcccagcacccactggctccatggagcatacagccctggttgtgcctccccaactgcagccagcatcatagcagtgccactctagatggaccaccactgccatcagtacttacagcacattaaacaaattaatagaacttcgtttgctctttctctccttctataatattaacaataatagctaacaataattaagcatatgttaggttgttagataaattctgaacacttcatatatattttcttatttcaaagtcacaacagactttaaaaa

SEQ ID NO: 686793 - DNA, 2572 bp, Homo sapiens
taaaaagaaataaaaaaagaaagaaagaaaaaggaagggtttaaaattttatttcttccaagctgatctctttcaagttagttctttccctaatgagagggttatcatatatgcctctgatatttactttgatttctgcttacttgaatgaatgacagaaaatatagagaaactgaatttaaaatgtgtcaaatggtattcattacaacaaaagacaaaaagattccctttcaaggaatcttttcaactttatctttttaaaatcaattagcagaaatgaattggattatgtatgcagatgtttattcagacacaatgattctgctgaatgttcaaagattttctttctggtattctttgttctgtggaatatactgtatttttttgttttgttttgcttgtttgtttgtttttgcctttatatcgcggtccccaaccctgggcagggactagtactggataggaaccatacgcacacagcaggaggtgagcggcagatgagcatgcctgaccacctgagctctgcctcctgtcagatcacattatattcaaataggaattcgaaccctattgtgaactgcacatgcaaaggatctaggttgtgtactccttgtgagaatctagtgcctctgaaaccatcccctgcctctgtggaaatatcgtcttccacaaaaccggtccctggtgtcaaaaaggttggagactgtcgctttagatgtcttaatttctttattattgtaactataacaagcaaagacaaaatactgaccatagcttatatttgcatagctcttcaaaatattttgtaatggagactgattgcctggctttgccgttggggtatatggatattgattgccatgtttaaacaagacccgcttaatgtagacatccttcagtaacagtgtataccagcagtgttttgtttataaatgactttgtgaaagcaacaggttacttaaaaaaagaatgtattatatgaaacgaaaattaaacacattctactacgaagctaacataggagatacaatatacaacacattgaaagggatagagtgatattttaattcccgtttgctacacaaaggaactgatgcaagtctttagccagctttggctaaaggaatgaattgtgtggtgttccggtatctaatacttcttgaattatatagttatgtgcttcttctcctggccctggtggttgtgctaaattaactcatgatttttttwaaaaaaaaggaataaatgaaaaggaaatataaatatttggagcactgttatgttgttaaatatattttatattatattatttgatactacaaactctgtttataaatttgtacaaattaacattaaataatcttaactaattggcctcttattaaaaatttccctccagggatttggtctaagctaaactctgctgaaaaaaacaaacaaaaaagaaagaaagaaagaaagagaaagaaagaataaaaaacgcttcagtagcttaacaccagtgacgttgtttttcctatgcaaagtcttccgcagttcccttccatacactgtcgcagggatctagatttaaagattatggctttactctcaatatgtcacctccactctcattgcaatagaaggaataaaagagtacgaaaaaccaacgtctgttgttatttctaatgggaagtggcccacatcactgtccctgtcgcttccaaaggccactggctagaactattctcatagccctacataactacaacctaattataagggagaatgagaaatttaagctagcatacaaaatattgggtgaacaataactgtctctactacttgctttgcaaaaagcctgctcattaacctctgaaaatcttccttttcttttcacatatgtttgaagttttctttcttctgtggcagctatgggtattttatgttttccagttggctgtctctttgttccacccatttgcatttaggaatatgcattaatgataaagagtataattttctctctctggaggaaaaagtaacatttttattatatcctgagctgaagaggaccacaacagtctctggcatccatatctatttatttccaatgtacagaccacagttaaatggttaaatttccaaaggacactattttacggtatttctattacctgaggcttatgtatgctgtcagtgagccgattttatgccaaaatttctgttggattcatcactgccctgcttctatgttgaagcactttaccatctgaaagataggcttaaggtagtgagttggtaatcaggagaactaaattatttttctcattttgtcactagctaagtgttttcttctgtgggcatttcacttaacttatccatgcataagttacttaaactgttaaataaatgtgatagtatatgagtctctttccaaattttgtacatatgcacatttgtatacatcaacttaaggtcgggttacatcccagtaaatccataggaagttgaaaatagcataagtcaaaaatgcatttagtacatctacctactaaatatagctaagcctagcctaccttaaacatgctca

SEQ ID NO: 686794 - DNA, 2572 bp, Homo sapiens
taaaaagaaataaaaaaagaaagaaagaaaaaggaagggtttaaaattttatttcttccaagctgatctctttcaagttagttctttccctaatgagagggttatcatatatgcctctgatatttactttgatttctgcttacttgaatgaatgacagaaaatatagagaaactgaatttaaaatgtgtcaaatggtattcattacaacaaaagacaaaaagattccctttcaaggaatcttttcaactttatctttttaaaatcaattagcagaaatgaattggattatgtatgcagatgtttattcagacacaatgattctgctgaatgttcaaagattttctttctggtattctttgttctgtggaatatactgtatttttttgttttgttttgcttgtttgtttgtttttgcctttatatcgcggtccccaaccctgggcagggactagtactggataggaaccatacgcacacagcaggaggtgagcggcagatgagcatgcctgaccacctgagctctgcctcctgtcagatcacattatattcaaataggaattcgaaccctattgtgaactgcacatgcaaaggatctaggttgtgtactccttgtgagaatctagtgcctctgaaaccatcccctgcctctgtggaaatatcgtcttccacaaaaccggtccctggtgtcaaaaaggttggagactgtcgctttagatgtcttaatttctttattattgtaactataacaagcaaagacaaaatactgaccatagcttatatttgcatagctcttcaaaatattttgtaatggagactgattgcctggctttgccgttggggtatatggatattgattgccatgtttaaacaagacccgcttaatgtagacatccttcagtaacagtgtataccagcagtgttttgtttataaatgactttgtgaaagcaacaggttacttaaaaaaagaatgtattatatgaaacgaaaattaaacacattctactacgaagctaacataggagatacaatatacaacacattgaaagggatagagtgatattttaattcccgtttgctacacaaaggaactgatgcaagtctttagccagctttggctaaaggaatgaattgtgtggtgttccggtatctaatacttcttgaattatatagttatgtgcttcttctcctggccctggtggttgtgctaaattaactcatgattttttttaaaaaaaaggaataaatgaaaaggaaatataaatatttggagcactgttatgttgttaaatatattttatattatattatttgatactacaaactctgtttataaatttgtacaaattaacattaaataatcttaactaattggcctcttattaaaaatttccctccagggatttggtctaagctaaactctgctgaaaaaaacaaacaaaaaagaaagaaagaaagaaagagaaagaaagaataaaaaacgcttcagtagcttaacaccagtgacgttgtttttcctatgcaaagtcttccgcagttcccttccatacactgtcgcagggatctagatttaaagattatggctttactctcaatatgtcacctccactctcattgcaatagaaggaataaaagagtacgaaaaaccaacgtctgttgttatttctaatgggaagtggcccacatcactgtccctgtcgcttccaaaggccactggctagaactattctcatagccctacataactacaacctaattataagggagaatgagaaatttaagctagcatacaaaatattgggtgaacaataactgtctctactacttgctttgcaaaaagcctgctcattaacctctgaaaatcttccttttcttttcacatatgtttgaagttttctttcttctgtggcagctatgggtattttatgttttccagttggctgtctctttgttccacccatttgcatttaggaatatgcattaatgataaagagtataattttctctctctggaggaaaaagtaacatttttattatatcctgagctgaagaggaccacaacagtctctggcatccatatctatttatttccaatgtacagaccacagttaaatggttaaatttccaaaggacactattttacggtatttctattacctgaggcttatgtatgctgtcagtgagccgattttatgccaaaatttctgttggattcatcactgccctgcttctatgttgaagcactttaccatctgaaagataggcttaaggtagtgagttggtaatcaggagaactaaattatttttctcattttgtcactagctaagtgttttcttctgtgggcatttcacttaacttatccatgcrtaagttacttaaactgttaaataaatgtgatagtatatgagtctctttccaaattttgtacatatgcacatttgtatacatcaacttaaggtcgggttacatcccagtaaatccataggaagttgaaaatagcataagtcaaaaatgcatttagtacatctacctactaaatatagctaagcctagcctaccttaaacatgctca

SEQ ID NO: 686795 - DNA, 2417 bp, Homo sapiens
tgaactaggaggaacaaaagatacagaatttagattgtgtttttctttttcttttttgttttgttttgtttttgagttgaagtctcgctctgtcacccaggctggagtgcaatggtgcgatcttggctcactacaacctacacctcctgggttcaagtgattctcctgtctcagcctcccgagtagctgggattacaggcacacaccaccacaaccggctaatttttgtatttttagtagagacggggtttcaccatgttggtcaggctggtcttaaactcctgacctcaggttatccacccgcttcagcctcccaaagtgctgggattacaggcgtgagacttcttatattaaatatgtgctgctatggtatgaatgcttgtgtctctctgaaaattcatatgttaaaacctaatcccaaaggcaatggtattaagatgtagggcctctagaaggtgatttcattaatgccatgtaaaagaggtttcagggagcctatttatcccttccaccatgtgagaacataaagaaggcatcatctctgaggaatgagtgctcaccagacacctaatgtgctgatgccttgatcttggacttcccagcctccagaactgtgagcaatacatttctgttttttataaattacccaaaggtattttgttatagcagccagaatagatcaatgcatttacactgattcatgctttcttaattctaatccctttaaaactggcaaagaaatgacagtagggaatttgaaaagataacccacaagaacaagtaatacaaaatatcaaaataagaataataactagcacttatgtagcacatactttgttccaggcattattttaattgctttacctataataacaaccaataatagatgtacccacaattctgaaatcctaaaatggcagataagcgactggtacctgactagaactgagataggagaaaagctgaggatgcatagaaaagccaacaagaatgatgcttatcagtccacagaaccaagaacaactcagaagttgtagacactaaaaacccctaagtaaactacatggattgggacataaacaggattaactgaaaaacttaaagtaatgggaactctccaatgcatctaaatgytcaaggtgttattcccacttttgcttgactccttttctcccctcactcttaaaaacaattcaccacctagttctttcaactctactaccaataaatgccagatctttccaattttcaccattctttttttgaaacggggttttactgtcacacaggctggagtgcagtggcatgatctctgctcaatgaaacctccacctcccaggctcaagtgatcctcccatctcagcctcctgagtggctgataccacaggtgcatgccatgatacccagttcatttttttttcttttttgcatttttggtagagacagagtttcatcatgttgcccaagctggtcttgaactcctgtgctcaagcaatccacccacctcagcctcctaaagtgctgagattacaggcatgagccactgtgcccagcctttcaccattcttatttccaatgttacaccaagccacagtcatctctcacatagatcaaagccatgactcctaactggacttttttcttgtacttttactaacttacactctatccttcacagagcagtttgagtgatttacaaatggaaaatagatcacatcacactactgtttaaacaatctgatgacttgtatcaaactcagaaaaaaatccaaactttaaaaccagggttatgagattctgtatggtccacctacatctttgatcttttctctttccactgttaaccaggccatcttctcattgtaaaaacctgatagtctcatcttgccttagaatcttcgtagcagttctttccccatgtctttccagggtggctcctaattgatatttatttgctgacatgttacttcttcagggatgctttctgtatggacattctaaagtctcctactcactgtttcataatgctatactgtttccttctctgtgttgcctatcattatgttttgaggctttttttttttggagaagttgttttttgttttgttcaaagtatatccaatgagactgttctttaaatctcagaatcttaaaaaaaaacttagcctcctaaagacttataatgatacaaactttgccaagcaccttacatcatatgctgcatgatagaaaatcaggaaagcttatcttggaccagagcatttgtctgtgtccttctgggtacagttaacagacccattgactctcatccaaaacaatgtactcatatcatcagcctttactggtaatgcaggtaatatttcacctcaatttgcccctctgttgatacagtcatcattttattttaattgaaaccg

SEQ ID NO: 686796 - DNA, 576 bp, Homo sapiens
ctgtagtgatcctgcagtggtatagaacacaagaactgattctacctaactagctgtaattttgtatcctttaacaaatctctccatatattcttgagaagagatgaagacacagtaagawttttttttgtccaatctcttgtggagtgtgacacatttagcctgtcttttatgttattcattccttggatttagctcccaaatggtgaagaaaacctgctcccttcagcttttctcaatcactataaggatgggcgaaaaaaaaaaatccttggaaataaaagtgctatatagcaggactgtattgcatatgaaatgtatgtttaaaatctgcaaagatcactatatatttaggagaaaacactctaaaaatatacaggtacaatgccaggtggcagctcagatttataatccatcaaaggagagtgtacctaaactcatggtccatttgattttctggtcaccctaaacttttgggaagctaaatgtcataagtgattttgaaagcaacctatagtgagtttttgcaggtaataatgaactcacagccagcatataatcaaggagaatgagttc

SEQ ID NO: 686797 - DNA, 1241 bp, Homo sapiens
ccacattctgctgattggtccattttacagagtgctgattggtccattttacagagcactgataggtgcatttttacagagtgctgattgctgcgtttataatcctttagctagacacagagcactgattagtgcatttttacagaatgccgattggtgcgtttacaaacctttagctagacacagagtgctaattggtgcatttttacagagtgctgactggtgcatttacaatcctctagctagacagaaaagttctccaagttcccactcaacccaggaagtccagctggcttcacctctcaatgggtaatagtgtccacacaatattagcttctactgttgtttttgctgttttttttttttttaattatcattcacaacaatcctgagaggtagatgttactgtcctgaaactttgctcagaaaaggtaaatgttcaaaggcacagaggkggtgacaggggtcaatctcagggaactctgagtcagtgctcttttcaacaaggtacgactacattacattaagccataattttttttttcttttgagactgagttttgctctatcactcaggctgaagtgcagtggtgcaatctcggctcactgcaacatctgcctccctggttcaagtgattctcctgcctcagcctcctgagtagctgggattacaggtgcccgtcaccacacccagataatttttgtatttttagtagagacagggttttaccatgttggccaggctggtctcaaactactgtcctcaagtgatccaccacctccgcctcccaaagtgagccataatttttacgctaacatttaataaacatctgcagacttataagacattaaaataatgaagagaaggttgaatttttcttggattttttaagggtttgagtttaaattatcttttgataaattggtttatataatcatcaactccaaatatattactttcagaaacatccatgtgcagaatataatgtaaatcccagattcaaatgaaaacttcagctctctagaatcatcaaggaatgtgctattttagataattaaaattctagatagctttgaaacactcacattttaaaattatagttacttcagatagaattcattttaaactccatcacttctctcccttactaagtagaggatatatatttatcacataacatatactactattcttgctaattcaaagccatcattttaaacagcaatgttcttactttgaa

SEQ ID NO: 686798 - DNA, 631 bp, Homo sapiens
tgtgggattgaagcccccatacagagtccccactggggcaatgcctagtggagttgtgagaagagcactaccattctctatccccgtcaaatggtagatcaaccaatagcttgcaccatgcacctaaaaaagcatcaggcactcaacaccatcccgtgaaagcagctgggaggggggctgtacctgcaaagccataagggcagagtggcccaagactgcgggaacccacttcttacatcaacaagacctggatgtgagacatagagtcaaaggagattatttcagaacttttggttttataaaagggagttcccctgcacacgctgtcttgcctcccaccacgtaaaacatgcctttgcttctcctttgccttctgccatgactgtraggcctccccagccatgtggagctgtgagtccattaaatatctttcctttttaattacccagtctcaagtgtgtctttattagtggtttaagagcagactaaaacattctttttgcccgtcttgtacccatcttataacatgagtaaaagagatactcatcttacttgttagcttataagacttcatttgtttattcatcagacacttagcatctataccattttctggacactgtgctatgtc

SEQ ID NO: 686799 - DNA, 631 bp, Homo sapiens
tgtgggattgaagcccccatacagagtccccactggggcaatgcctagtggagttgtgagaagagcactaccattctctatccccgtcaaatggtagatcaaccaatagcttgcaccatgcacctaaaaaagcatcaggcactcaacaccatcccgtgaaagcagctgggaggggggctgtacctgcaaagccataagggcagagtggcccaagactgcgggaacccacttcttacatcaacaagacctggatgtgagacatagagtcaaaggagattatttcagaacttttggttttataaaagggagttcccctgcacacgctgtcttgcctcccaccacgtaaaacatgcctttgcttctcctttgccttctgccatgactgtgaggcctccccagccatgtggagctgtgagtccattaaatatctttcctttttaattacccagtctcaagtgtgtctttattagtggtttaagagcagactaaaacattctttttgcccrtcttgtacccatcttataacatgagtaaaagagatactcatcttacttgttagcttataagacttcatttgtttattcatcagacacttagcatctataccattttctggacactgtgctatgtc

SEQ ID NO: 686800 - DNA, 1477 bp, Homo sapiens
gtcttccctgtgctgttctcatgatagcgaataagtctcataagatctgatggttttatagatgggagtttccctgcacaagctctcttctcttttctgctggcatgtgaaatgtgacttctaccttccactgtgattgtgaggcctccccagccacgtggaactgtaagtccaataaacctccttcttttgtaaattgcccagtctcaggtatgtctttatcagctgtgtggaaacagactaatatggtagccatgtgctcttataggacaatagcattcagtttattcattcatgcactaaatatacttattattgtctcctatgagttaagaatttggctacactctaggtataaagtagcaaacaaaaacagaaaacttcctctcacagaatctgcattccagaagagatgatggatactaatcaaatacatgtaaaattggaattataatatgtcacaaaggtgaagaatattgtgcttcaggagtgtataacagaggtttttgaacttagtcamagaaggcctttctaaagaggttatgcttgagcctatgaaaatataaagggtagagaggagtttatgagtcaaataagggagaataaaacatttcaagcagaaataaaactatattcaaaagccccgtggcttaaaggaacacaaaaaaacatcagagctgtaaatctggccagagtgggtggagcactgagagtgaatgggagcgtggcgtgagatgaggtggagagaggatttgttccacaccctgaacatcatgtttagtgttttctttacactaaaagtaattggaagccacagagtatatcaagcagtgaagtggggaggggtgatgttaccagatttacattttgaaaagattgctctggctgcctgcggaaaatcgatttgaggggacatacatgtgtatttacataaatcaacaatttagaaggatagatgatccctgaaatagtccccaaatgtttggcaccagaagtgtttcaaatttcagattttttcagattttggaatatttgcaacccaaatctaaaattcccaaatcccacatggtccaatgagcatttccttggagcaaaaacctttgagtgtcatgttggcactcgaaacgtttcaggttttggagcattttggcttctgatttttggattagggatgttcaacctgtgttggctttggagatattttctatataggagtaaggaaggagaagcatgagggttcctccagtatctagcttgcagaaacagggagccagcacagctgttcaccgaaataggaaacactgaaggaatatgatgtttgggagagaagaccatgtgtttagatttttgtgtgttgagtctgagatgcctctgagatttcaggctgaagatgctgagcaggcagttgagtaccctggtctggatctcaaaagaaagaaatggagatataaataaatgtgtaagttgcttgtgtttg

SEQ ID NO: 686801 - DNA, 1477 bp, Homo sapiens
gtcttccctgtgctgttctcatgatagcgaataagtctcataagatctgatggttttatagatgggagtttccctgcacaagctctcttctcttttctgctggcatgtgaaatgtgacttctaccttccactgtgattgtgaggcctccccagccacgtggaactgtaagtccaataaacctccttcttttgtaaattgcccagtctcaggtatgtctttatcagctgtgtggaaacagactaatatggtagccatgtgctcttataggacaatagcattcagtttattcattcatgcactaaatatacttattattgtctcctatgagttaagaatttggctacactctaggtataaagtagcaaacaaaaacagaaaacttcctctcacagaatctgcattccagaagagatgatggatactaatcaaatacatgtaaaattggaattataatatgtcacaaaggtgaagaatattgtgcttcaggagtgtataacagaggtttttgaacttagtcaaagaaggcctttctaaagaggttatgcttgagcctatgaaaatataaagggtagagaggagtttatgagtcaaataagggagaataaaacatttcaagcagaaataaaactatattcaaaagccccgtggcttaaaggaacacaaaaaaacatcagagctgtaaatctggccagagtgggtggagcactgagagtgaatgggagcgtggcgtgagatgaggtggagagaggatttgttccacaccctgaacatcatgtttagtgttttctttacactaaaagtaattggaagccacagagtatatcaagcagtgaagtggggaggggtgatgttaccagatttacattttgaaaagattgctctggctgcctgcggaaaatcgatttgaggggacatacatgtgtatttacrtaaatcaacaatttagaaggatagatgatccctgaaatagtccccaaatgtttggcaccagaagtgtttcaaatttcagattttttcagattttggaatatttgcaacccaaatctaaaattcccaaatcccacatggtccaatgagcatttccttggagcaaaaacctttgagtgtcatgttggcactcgaaacgtttcaggttttggagcattttggcttctgatttttggattagggatgttcaacctgtgttggctttggagatattttctatataggagtaaggaaggagaagcatgagggttcctccagtatctagcttgcagaaacagggagccagcacagctgttcaccgaaataggaaacactgaaggaatatgatgtttgggagagaagaccatgtgtttagatttttgtgtgttgagtctgagatgcctctgagatttcaggctgaagatgctgagcaggcagttgagtaccctggtctggatctcaaaagaaagaaatggagatataaataaatgtgtaagttgcttgtgtttg

SEQ ID NO: 686802 - DNA, 432 bp, Homo sapiens
gaattctgttaaaatttttatcctaagtctctttttgtgtcattgtataaaatcagcaagtgtatttgggaataggtacaataaagactctttcttatcctcaaaagcttcttgataataacattttcttctttccaacttatgttgtgaggaacagtatgtctatatagacatttaaaatgttggatgtattccattcacatattatatatcctttggacatcaagcagattttkaattctcttgtagtgtgagcatcacatctttttttttgtcaaagtgctattcagcttttgttcctttagcattaaaaaaagatatcaaaatctattaatgctttctatgaccttttatagatgaagacaaggcaaaaacatttttcccaaaaaatcaatttaaattattactataaaatttctgaatgatctgctg

SEQ ID NO: 686803 - DNA, 934 bp, Homo sapiens
ttgtgccactgcattccagcctgggaaatagaataagaccctgtctcttaagaaatgataataataacaaatattaaataaaatagttattgctcactttgtctttttctttacctcaatctagccataattctaaactttaaccaattggatattcttggttcctaaggaatgtggcctaggtctctcagtgagagtggcttagcatggcacttactctaagcagacagagaaatgggattcagtgaagaggagaggtatggagtgtgttaaagccccttgggtggttctgcttttccaatccacctcctcactgagaaaacttgcttgtgacattcttgggttgtcccttggtttgtctgggtaagttgctcagaaaggagataatgtcctactcatttgttttctcacttcctagcacagtgcctggcaataagttaaagcttaataaagtattctttttttctctagtcctttgtaggatttttcccagtgtgtatcctaagccatcttcttctttttttttttttttggcctggcatggtattaaaattaatttaactttgcatgtgaaatttttctgtgggactagaacattccagattagaataggaaggaaattagtaactttgtattttatttctctagcaaaagaattaccaatttttatgggtaaaagctggaagcattcctcttgaacacaagaacaagacaagggccctttctcaccagtcctatttaacatagtagcggaaatcctggccagagcaatcagtcaagagaaagaaataaaaagcatccaaatagcaagagaggaagtcaaactatccctgtttgcagatagtaagattytacacataggaaaccccatagtctctgcctaaaatctccttaatctgttaaacaacttcagcaaagtttcaagatacaaaat

SEQ ID NO: 686804 - DNA, 2076 bp, Homo sapiens
cacacacacacacacaatataatattatagcataaaggggccttaaaagatatctggcccagcgtctacccaaagttggcctcacatcaaaaaccacatctaagacagtttaatgtcttcctcattggacgcctcaatttacttccatgaaacctctactgctgattcctattcagatctctgaactcatggaagaaagctcactgccacagaaaagcccttccaatattaagaaaacaaaacagccagatgcaatggctcatgcctgtaatcccagcactttgggaggccgaggtgggcagatcactagggcaggagtttgagaccagcctggccaacatggtgaaaccctgtctccactaaaaatacaaaaattaggcaggcgtggtggctcacacctgtaatcccagctactcaggaggctgaggcaggagaatcacttgaacccaggaggcagaggtcacagtgagctgagatcataccactgtagttcaacctgagcaacagagccagactccatctcaaaaaaaaaaaaaaaaaaaaaaagagtatgatatggtttggatccatgtccctgcccaaatctcatgtcaaactataatccctaatgttggaggtgggtcccagtgggaggtgattggtacatgggggtagatttctcatggatggtttagcactatcccccttggtactgtcattgcaatagtgagttctcctgagatctggtcacttaaaagtgtggcacctcctcccccagcaaccttgctcctgctcctgccatgtgaaatacctgctcgccctttgccttccgccatgattggaagcttcctgaggcctccttagaagcggaagctgctatgcctcctgtacagcctgcagaaccataagccattaaacctcatttcttcataaattacccagtctcaggtatttctttacagcaatgcgagaacagactaacagagagtgcatcccttcaagtgccaaacagaaagatgttggcattagycactgtttttattatcacttagttgccctccttctttgtagtagaatagtgattgaggtagaattccctcatgaatgaagaaaattgaatgcattatcaaggtcagatttgcgaatgtaccacagccagccacaggaggtgagttgggaaggtcatgattaaaagcaggcatttagatggaagagccagtctgtacagctctggacaaaggaagtggaggcaccggcagtgatgcaaacacacccctgcccggaggccaagggagacacatgatgtcttttaagggtcccagccagccagaattccctttctgtaaaacaaaactaattcaccatattcagacagagtagagaaggctgttaaagtaggacaaggatcctgtcttctcattttcacattcaggatcttggtggccgggagagctaacaggacagtcttctagccttgaccttcaactcctaccagagctccggctgctcccaccttgctcttacctttttttttttttttgagacggagtctcgctctgttgcccaggctggagtgcaggggcgtgatctcagcttgccgcaaactccgactcccgggatcaagtgattctcctgcttcagcctcctgagtagctgggattacaggtgcccgccaccatgcatggctaatttttgtatttttagtagagtcagggttttaccatgttggccagctggtctcaaactcctgacctcaagtgattcgcctgcctcggcctcccaaagtgctgggattagaggcatgagccaccatacctgaccactcttacctctttcttgagctctttctctggtataatctctcagtgtttgaacattttatttccatttctaagcctgctgggcagctcaggaaggaagagttattagccatgcaaacttgttgccctgaactcccaggggcacatactttgggcaaaatgggaagggtgattttgaagagttggaactcaaataatctagggggaaatccaagcaaggttgctcttgtggggccatggagaatatacttctggcctttactactctgaacaggca

SEQ ID NO: 686805 - DNA, 650 bp, Homo sapiens
ttagggaggctgaggcaggcagattgcttgagtccaggagttggagaacagcctgggccacaaggcgaaaccctgtctctactaaaagtataaaaaattaaccaggcacgatggcgtgcacctgtagtctcagctactcaggaggctgaggtaggagaatcacctgagcccaggatgttgaggctgcagtgagttgtgattcccaccactgcayttcagcctgggtgacaagagtgaggaaaaaaaaaccaaaaaccaaaaaaaccacacaactgattcacactgaaagactttcaatttcccaaacctccaatcccatttgccttaaggcatttacatttgatgctctcatctagataaccctcttcctacattctcactttgtttgacttgtcctctaggacttagtgggtatctcaccatattccttatgtaacatcttctcctagattctaaaacccaatgagcacaggtagatcttccttatcctgacatcctagcacaaggccatccaaagagcagatgctcaattaatgtttaaggaacagatgaaccaatgtgcaaaaggtctaatttattacaatgtaattaattatatattcttgaataatgtaagcatatcctggcatatatcttttaattttacataa

SEQ ID NO: 686806 - DNA, 1846 bp, Homo sapiens
agaactcacttactatcacgagaacagcatggaggtaaccgcccccatgattcaattacctcccactgggttcctcccatgacaagtgkgaattatgggaactacaattcaagatgagatttgggtggggacacagccaaaccatatcacaaacttaagaataccacgatagcaatgttttgtttttgttgttgttgctgtttccccctcctgtttcttctgggaatataaacctaattgttccaagcataacactttgggttggatttcatagaatcctttcacctactttcagagatgttaacatcctgcagtagatgtggtgagcacatgtttcattcattcattcattcattcaccaacagttactgagtgtcaagtgctggtctgactaggtatttcttgcccttgttaattctcactcagtcagatccaaatattcctcaggatggtttgcagagctatagatatgattttctgtgtgtttcagaaaaggaaagtgacagatagcaatttatcccaccatctgttattggatgtgtcagtagttaattttttgaagactatttgaaaagtgttttagacgcatggagctcatgtgaaactgaagcttggtttccaagtgaccatcaacagagaaagaattctcttgatttaaccatttacctaagccttaactgatctttcatctcctaaatactattcagcctttatgccttttaccttccatcaagcaggtagagtttattggtcagaattactctgttgaaaacatgggcatggacaggctggaaacaaagacaaggggcagccttctgcccttgtctaaggagaatgcccagactctcagccctttgcagacctgactctgaatctgaaaatgtgctcagcttcttttattcttgcctaaggctgtctaagggaagctggcaacaacagctgatgtggaaggtcaataagtgtgtcaataaacccctgcccagactctttttttttttcccacctgcaaaattgctttggtcagcagagaccccgactgaaaggggccctctgtctttgggtcatgcagtttctgttctcacccctggacaagactaactccaaagaaacagaatcaaaacctaatcataagtcacactggaggctttacataaaactggaaaataatcagatggagtcgagcatctctcagtcagacatttgcttggggcccactaacatatcaatgtgatggcctctttcaccctgtgctggatgctgcaggcttctagagagcagcttggggactgaggccaactctgcattcagggaggccgaaggcagtgccaggtgagtttggacacactttccagccacctgccccgtgtgacgatcccgcgaaatgcttccaagccagagatccacttcataggctggcttaggcttttgaaataaaacacccgcctgaaacaagcattggcaggttctatttcagggatggggcagaggcaaggaccctggccttgtctccatacagctttaggtgatgcagggtttttgaatttggcctctatttcaagcactttctgaaaaagaaaagcataaccaggatagttccaaggcagacagttcttctgtttattttttcacaggagcgtgtgagaaatggagacagagggattggagagatgaagatgggggatccgtggtctctgaagcccccaatgcttgtgtgagggtgagagctcaggtgcgggacagcctggacatggggaagggctttcctctacataaattactgggggatctagaaatgacttccacaaaatgcttcccttctggacctcactctgttgaaagggaagat

SEQ ID NO: 686807 - DNA, 1089 bp, Homo sapiens
gatggctgtcaaccctgaactggataaagaaaatgtcatacatataagaccatggaatactacactgccataaaaaagaaagaatgaaatcatgtcctttgcaacaacatggatgtagcagaaggccattaatctaaatgaattaatgaaagaacagaaaaccaaatacagcaagttttctcttacaggtgggagctaaacactgagtatacatagacatgaaaatgagacaattcacactgggactactagagagggaamcttgggatggggataaaggttgaaaaactacctgttgggtactatgcctactccttgggtgatgggatcattcatacaccaaacttcagagacacataatttaaccatgtatcaaatctgcacatgtatcccctgaaccaaaaataaaagttggaaaaaaaaagaggaagggaaaatacctgaaacaaactgacaaaaagctgatacttgttgaaactgaatgcagtgtaagagtgttttattacattatttctagtttttatattttcaaaaatttcatttataaaaaaagattttttaacggccctagagcgatctcatacaaaactgctaacaatacaaatttaggtaaactatggtgaaaattgttatgctcccgatatttcctgtgagttggatgtgtcaagctaaaattaagttaaatcacataatttatatatcagcaatacttggaaattaaccataatatttttagaagctgccagagtaagtaaatataaaatcacactcatggttgccttctgaaaagctgtatatatttaaccttgggttgacctataatatgtactctacttgtaaataatttcaaattgtatatttcaaaaaattatattgataaaaaatatatagctaaaaattgataacttctacagtaatatatatgcacatctaatagttcctttatgtaataagttcctactatgtactaagtactgtgataaattgtttaacaaggataatgatgtaatgctgtgcatgccccaaaatttttaaatttatttgacaaaataacatattttcaaaacaagcactacatatatatataca

SEQ ID NO: 686808 - DNA, 1089 bp, Homo sapiens
gatggctgtcaaccctgaactggataaagaaaatgtcatacatataagaccatggaatactacactgccataaaaaagaaagaatgaaatcatgtcctttgcaacaacatggatgtagcagaaggccattaatctaaatgaattaatgaaagaacagaaaaccaaatacagcaagttttctcttacaggtgggagctaaacactgagtatacatagacatgaaaatgagacaattcacactgggactactagagagggaaacttgggatggggataaaggttgaaaaactacctgttgggtactatgcctactccttgggtgatgggatcattcatacaccaaacttcagagacacataatttaaccatgtatcaaatctgcacatgtatcccctgaaccaaaaataaaagttggaaaaaaaaagaggaagggaaaatacctgaaacaaactgacaaaaagctgatacttgttgaaactgaatgcagtgtaagagtgttttattacattatttctagtttttatattttcaaaaatttcatttataaaaaaagattttttaacggccctagagcgatctcatacaaaactgctaacaatacaaatttaggtaaactatggtgaaaattgttatgctcccgatatttyctgtgagttggatgtgtcaagctaaaattaagttaaatcacataatttatatatcagcaatacttggaaattaaccataatatttttagaagctgccagagtaagtaaatataaaatcacactcatggttgccttctgaaaagctgtatatatttaaccttgggttgacctataatatgtactctacttgtaaataatttcaaattgtatatttcaaaaaattatattgataaaaaatatatagctaaaaattgataacttctacagtaatatatatgcacatctaatagttcctttatgtaataagttcctactatgtactaagtactgtgataaattgtttaacaaggataatgatgtaatgctgtgcatgccccaaaatttttaaatttatttgacaaaataacatattttcaaaacaagcactacatatatatataca

SEQ ID NO: 686809 - DNA, 1089 bp, Homo sapiens
gatggctgtcaaccctgaactggataaagaaaatgtcatacatataagaccatggaatactacactgccataaaaaagaaagaatgaaatcatgtcctttgcaacaacatggatgtagcagaaggccattaatctaaatgaattaatgaaagaacagaaaaccaaatacagcaagttttctcttacaggtgggagctaaacactgagtatacatagacatgaaaatgagacaattcacactgggactactagagagggaaacttgggatggggataaaggttgaaaaactacctgttgggtactatgcctactccttgggtgatgggatcattcatacaccaaacttcagagacacataatttaaccatgtatcaaatctgcacatgtatcccctgaaccaaaaataaaagttggaaaaaaaaagaggaagggaaaatacctgaaacaaactgacaaaaagctgatacttgttgaaactgaatgcagtgtaagagtgttttattacattatttctagtttttatattttcaaaaatttcatttataaaaaaagattttttaacggccctagagcgatctcatacaaaactgctaacaatacaaatttaggtaaactatggtgaaaattgttatgctcccgatatttcctgtragttggatgtgtcaagctaaaattaagttaaatcacataatttatatatcagcaatacttggaaattaaccataatatttttagaagctgccagagtaagtaaatataaaatcacactcatggttgccttctgaaaagctgtatatatttaaccttgggttgacctataatatgtactctacttgtaaataatttcaaattgtatatttcaaaaaattatattgataaaaaatatatagctaaaaattgataacttctacagtaatatatatgcacatctaatagttcctttatgtaataagttcctactatgtactaagtactgtgataaattgtttaacaaggataatgatgtaatgctgtgcatgccccaaaatttttaaatttatttgacaaaataacatattttcaaaacaagcactacatatatatataca

SEQ ID NO: 686810 - DNA, 597 bp, Homo sapiens
gaaagagaaaaagatcaataattgacaaaagttacataaatttcaatccaaaagggtttcctgactggggatcaaacccgggctgtggcagtgaaatcacaaaattttaactatttaacatcacaaggcagagtggctttcattgttattccctcaggrcatccgaagtatgcagtttgagcttacaaaggattttaactttgtttcaggtcaaattttgctctttaatttaatcaagataatttttaaggctagccatcatactattatgtgtcctttgttaaaaaagttatatcttcccattgttcttaagcatgtaagccactggggttctttatggcagctaatcaaagattgtccccttagaactaagtttctctatactgtaaaattctctatccccttagaagtaaagttctttgtactgtccccttaaaaacaacagttttctctcctgtcttcttagaaaaaatgttctcccttagagaagtatggttctctacaagtgcactcaccttaacttgaagtctcttaagtatccattgtgtgaacatcctcacaaaaccttatggaccagctgagtccaattggactggg

SEQ ID NO: 686811 - DNA, 597 bp, Homo sapiens
gaaagagaaaaagatcaataattgacaaaagttacataaatttcaatccaaaagggtttcctgactggggatcaaacccgggctgtggcagtgaaatcacaaaattttaactatttaacatcacaaggcagagtggctttcattgttattccctcaggacatccgaagtatgcagtttgagcttacaaaggattttaactttgtttcaggtcaaattttgctctttaatttaatcaagataatttttaaggctagccatcatactattatgtgtcctttgttaaaaaagttatatcttcccattgttcttaagcatgtaagccactggggttctttatggcagctaatcaaagattgtccccttagaactaagtttctctatactgtaaarttctctatccccttagaagtaaagttctttgtactgtccccttaaaaacaacagttttctctcctgtcttcttagaaaaaatgttctcccttagagaagtatggttctctacaagtgcactcaccttaacttgaagtctcttaagtatccattgtgtgaacatcctcacaaaaccttatggaccagctgagtccaattggactggg

SEQ ID NO: 686812 - DNA, 2294 bp, Homo sapiens
  misc_feature 391, 392, 393, 394, 395, 396, 397, 398, 399, 400, 401, 402,403, 404, 405, 406, 407, 408, 409, 410, 411, 412, 413, 414,415, 416, 417, 418, 419, 420, 421, 422, 423, 424, 425, 426,427, 428, 429, 430, 431, 432, 433, 434, 435, 436, 437: n = A,T,C or G
  misc_feature 438, 439, 440, 441, 442, 443, 444, 445, 446, 447, 448, 449,450, 451, 452, 453, 454, 455, 456, 457, 458, 459, 460, 461,462, 463, 464, 465, 466, 467, 468, 469, 470, 471, 472, 473,474, 475, 476, 477, 478, 479, 480, 481, 482, 483, 484: n = A,T,C or G
  misc_feature 485, 486, 487, 488, 489, 490: n = A,T,C or G
ctttaaaactatttggaacaatgactcaaaataagagaaggagaaaatggagtatattgttctctttttatcaaaattaataaaaataataatgtatattaagtgacaatgagtaaaaattaaatgttttaatatctaaaataactttaaaaataataatgtatacatagcaaattagtaaaataaaataacaattctataaattatttgaaaaatctgaatataggccagacaagaaatgaatagaagtataaagtaagtgagcctaacataggaacagtagaatttagttacaatattaattttaaagaaaacagtcaatgataagattaaacatgccctagaaatgccagttttctctttttttacacgttgaaaacatctgggcagnnnnnnnnnnnnnnnnnnnnnnnnnnnnnnnnnnnnnnnnnnnnnnnnnnnnnnnnnnnnnnnnnnnnnnnnnnnnnnnnnnnnnnnnnnnnnnnnnnnnaaactcatttcaattaaactcttttctaaaacaattatggagaatttatgtactgcccaaattctttgttattaagaaggcaatataataacattctgatttctgaagttgtagaatccatctttgaagcatttgaaaactaaaatgtttctccagaaagtgtatccgaatgttgcctaaaatactgagattattttagattagggcttctcagtcagtatgctgctaccatttcaggctcaataattctttattttgggggcctctcctgtgcattatgagatgtttagcaggatccctggcctccactcactaaatgttaatagcatcctcctagtcataacaagcaaactatgtctctagacattgtcaaaatttcccttgagggaaaaattacctcttgttgaaaacaattgccccagatgatctataatcatttactacagtgctgaagataactatcatctttagttccagggttgactgacttaattcatgttatgctaattctccaaaaacattagacatcttcattaaaatagcatataaattataaggcatccctgaactatttttacaaaaataacttattttgagaaggtgttgctttgatgttgaaagaataagagcataaattttttaaactatatgtagaaaatattctgcatttgaaaaataaatagaacgaaaacatatttctacagaaattcttggaacttttctacttttgtgtaaagatcaattatgacagactaatatgaaatttgacctttatttggaagaaatctgtcacaggttgtcattgattacatgaaaaattataaacgttctgtactaaacaggaacactatcagcatttacagtgactgcacatctgcctagtgagattccagtcatacttaatatcaccctgatgcctgatttggaaacaaacttacactttctctaaaagcaagaacaaagaatttggactataaaaacaggttcctggaatcttaccatatttgtatttttttcaccggtaattttacttcaaacataatcttgttcattagcatgcatatttcttatgtacatattttttcatatattaatttttgaatggatattgactaattattagaaggcgggtgttgtgakaggtggatgtaaactgaataaaattaaaatgtctgacatttaatggaaggcataggcaagtacataaattgtcacatctgataaagcatctaaaatcatgaacaaattatttttcaggactaattctatctttaatataagtgttctattgacttgtttctcaaaaaaatgagttataataaggattgaaaatttaaagagctttgaacagttggtggagtatatcagtttcttcaaactaggtatgtgtatacctgagagtaaatgaaaatactttttaaaaggataagaaattttcaggaaagaaaaagtttaaaagatattcaggtcttaagtaaagtcattgtttaattaaaaggtacacattgataatttctgttatgccttatctagaatacctatgagtgagagaagcaggatgaggcagaggaagaatttgaactacaatgcacctgcaacacagaccttagctgatggcacttcagagatatcccaaattgggacaagaagattgggtctttgaacctctgtgaggaccaattttgggaagggggctggccctaagagaagttttaactatgacagaagcctttcaatgagggagttccttgagagtctcacctgtgagctgccttccaggattgaatgtgaatctagggcaaag

SEQ ID NO: 686813 - DNA, 2294 bp, Homo sapiens
  misc_feature 391, 392, 393, 394, 395, 396, 397, 398, 399, 400, 401, 402,403, 404, 405, 406, 407, 408, 409, 410, 411, 412, 413, 414,415, 416, 417, 418, 419, 420, 421, 422, 423, 424, 425, 426,427, 428, 429, 430, 431, 432, 433, 434, 435, 436, 437: n = A,T,C or G
  misc_feature 438, 439, 440, 441, 442, 443, 444, 445, 446, 447, 448, 449,450, 451, 452, 453, 454, 455, 456, 457, 458, 459, 460, 461,462, 463, 464, 465, 466, 467, 468, 469, 470, 471, 472, 473,474, 475, 476, 477, 478, 479, 480, 481, 482, 483, 484: n = A,T,C or G
  misc_feature 485, 486, 487, 488, 489, 490: n = A,T,C or G
ctttaaaactatttggaacaatgactcaaaataagagaaggagaaaatggagtatattgttctctttttatcaaaattaataaaaataataatgtatattaagtgacaatgagtaaaaattaaatgttttaatatctaaaataactttaaaaataataatgtatacatagcaaattagtaaaataaaataacaattctataaattatttgaaaaatctgaatataggccagacaagaaatgaatagaagtataaagtaagtgagcctaacataggaacagtagaatttagttacaatattaattttaaagaaaacagtcaatgataagattaaacatgccctagaaatgccagttttctctttttttacacgttgaaaacatctgggcagnnnnnnnnnnnnnnnnnnnnnnnnnnnnnnnnnnnnnnnnnnnnnnnnnnnnnnnnnnnnnnnnnnnnnnnnnnnnnnnnnnnnnnnnnnnnnnnnnnnnaaactcatttcaattaaactcttttctaaaacaattatggagaatttatgtactgcccaaattctttgttattaagaaggcaatataataacattctgatttctgaagttgtagaatccatctttgaagcatttgaaaactaaaatgtttctccagaaagtgtatccgaatgttgcctaaaatactgagattattttagattagggcttctcagtcagtatgctgctaccatttcaggctcaataattctttattttgggggcctctcctgtgcattatgagatgtttagcaggatccctggcctccactcactaaatgttaatagcatcctcctagtcataacaagcaaactatgtctctagacattgtcaaaatttcccttgagggaaaaattacctcttgttgaaaacaattgccccagatgatctataatcatttactacagtgctgaagataactatcatctttagttccagggttgactgacttaattcatgttatgctaattctccaaaaacattagacatcttcattaaaatagcatataaattataaggcatccctgaactatttttacaaaaataacttattttgagaaggtgttgctttgatgttgaaagaataagagcataaattttttaaactatatgtagaaaatattctgcatttgaaaaataaatagaacgaaaacatatttctacagaaattcttggaacttttctacttttgtgtaaagatcaattatgacagactaatatgaaatttgacctttatttggaagaaatctgtcacaggttgtcattgattacatgaaaaattataaacgttctgtactaaacaggaacactatcagcatttacagtgactgcacatctgcctagtgagattccagtcatacttaatatcaccctgatgcctgatttggaaacaaacttacactttctctaaaagcaagaacaaagaatttggactataaaaacaggttcctggaatcttaccatatttgtatttttttcaccggtaattttacttcaaacataatcttgttcattagcatgcatatttcttatgtacatattttttcatatattaatttttgaatggatattgactaattattagaaggcgggtgttgtgagaggtggatgtaaactgaataaaattaaaatgtctgacatttaatggaaggcataggcaagtacataaattgtcacatctgataaagcatctaaaatcatgaacaaattatttttcaggactaattctatctttaatataagtgttctattgacttgtttctcaaaaaaatgagttataataaggattgaaaatttaaagagctttgaacagttggtggagtatatcagtttcttcaaactaggtatgtgtatacctgagagtaaatgaaaatactttttaaaaggataagaaattttcaggaaagaaaaagtttaaaagatattcaggtcttaagtaaagtcattgtttaattaaaaggtacacrttgataatttctgttatgccttatctagaatacctatgagtgagagaagcaggatgaggcagaggaagaatttgaactacaatgcacctgcaacacagaccttagctgatggcacttcagagatatcccaaattgggacaagaagattgggtctttgaacctctgtgaggaccaattttgggaagggggctggccctaagagaagttttaactatgacagaagcctttcaatgagggagttccttgagagtctcacctgtgagctgccttccaggattgaatgtgaatctagggcaaag

SEQ ID NO: 686814 - DNA, 475 bp, Homo sapiens
acacaaatccaaaccatgtcgaagaatataaatgatgttaacaaaacaatcaaccgtcttgaccgaagtgacatttatagaacactctacttgataaaaacagaatactcatgatttttaagcacacatggaacatttaccaagacaatatcatgctcttccaaaactgactgacttataaattggcacacaaattctgagtttgtgtgcttttgtgttcacatgatgttcccttggtatamatgcccttccttttctacggatcccacccaacctggctaactcctgtttatctttcaaaacccaactcagccactacctcctttacaagaccttcctcaactacgtcaaataaattcctttctcctccgcatgactataatactttgtaaatgtattcatccttgcttgtatcacagtatgttaaattatatgtatagtttttctgcttctcccactagataacaaagatata

SEQ ID NO: 686815 - DNA, 2728 bp, Homo sapiens
tccatgttgctgcaaaggacataatttcattcttctttatggctgcatagcattccatggtgtatatgtaccacattttctttatcaaatccattgttgatgggcacctaggttgattccatgatactgtgaatagcgctgtgataaacatataagaacaggtgtttctttggtagaatgatttcttttcctttgagtatacacctggtaattggattgctgggtcaaataattctatttttagttctttgagaaatctctaaactgctttccataggggctgaactgatctgcactcccaccaaaagtgtactaagtattccaccatttttaacctcatttataaccaacaccgtcctcagcgttaacattcttcagaattcaacagaatgcaagtgtctttcctatggaaagagttcaaatgtggtgtcttatcagatagaacaaaattattcatttttgaactcttagttggacaaataatttatagtgttcaaagggcagcaaacttctttaatgcatatgaggaattaaaaaacagaaaaaaaggtttagtctacctaccagttcatcagaaaacaagtttactctatggatggatgcgaaactgcctcacccttcctattcccaattccccacctcacaaatacacacacgttcctggccactgtggacatggagaatgaaaacattgctctggagacaaatcctatgtgtgtgtctaatgggggctggagaaaagatcacaaaacaggtgccattgctctgagacggcattgtcagggaactcagttccaatcctgaaacttaggtcattaggaaaagcaagaaaaggcagaaagttttcatttacaacctaaaagctagcctttcctgaacatcaaatgccgcaattaaaaacttgctttttaataaacacagtcatgagttggtaaaagccaaagcatcattcacatatcatttcctgcaccactcagctcatattagcagacttaggaaagcatcaaccacaaacatgttgctgatagaaatttcctaatgcaagcagtctttatagatttctgctatttcaatgtaggtctccgaggaccatttgaatccatattaatttcctttctggcagttatgcggctgagtatgaactgcactatttcacttttaatctgtcagtaatttagtaatgtgtaaactaattatgaacagatattaatgtaatcggtttggggagctataaaatcaatgtgtttttacagactgcattaaagagaattgcggtgttataatcacatgtcagttacagataaggttatggaattaaaaaatggatgtcacccccccttcaaggggcacccactaactccatcaaataataagaacatgatcttcccactttctggaactataggaaaaatactaatatcacagccaaaccatcctgcttcactctgactttgataacatcatttccatgacttcccttctccacttcttccccttcctctgttaaataaaaacttgccattcatgatttcaaagatggtgtcacagatcagccttctaggggttatgtcagtgcctcatgrtaatggcttccttgggcgaagtctgccctaatacaatttaccagatcattcagcagaggaaaatcagttaacatgaacccagtggttaagaggggttaccatagcttttgcagagtggttctccctaggtctgtgaccctgcaagtagtccaagatatggtcatgggggtggaggcatctcaccaccttggcaggtgtgtatgcatacaggttttctacctcccatagaagaaatctcactattctatgataggtcttgaaattcttagacagttcttgtccagtcaggtgtttgcataagttatagaaatgtatgttcccataactgtattgaagggactcccctcacccactcagagtttatctctatttgtctccttctaaagacttaggcctttctcttttgtagccctaaatataaagtttatagtagaatgcgtcatcctctggcaaactgaagagttccagcgtcagccttgcactttagcaagcctgtggctatggaaaggaaagaagactaagatggcagatagaatttcagctctagatgtacaacttggagccatgctgaaagataggtctaagataatcatgattctcacattccctagaggtgtagttgccttaacacttggaacctcactttcctaatttgtaaaacaggatggtaataaaattctgtacttcacggagaataaaatgaagattgcgccacgtttgggtcatagtaaatgttcaataaagtagctagtagcaggcggaggagtaataatgctcatttgactccatgggtctacttgcttttctcttgttattttacaagagttaaataggtaatctctaaagtcccttcccagcagtaaatctgaggtgttgcaactagctgcatcaacagtccacttgcaaagaggattccatgtggaagaaggttggttaaggaccttcccacataacttctcccatccacacatctatccatcctcatcactaatccctgcctgtgatgctacattgcctcatggtttggcttccatttatatccatccttcctctaaccatctaaaatctcttgagtaactcacactcatttaatgggctcactatttactccccaaatacttattacacctactaaggcaggaaat

SEQ ID NO: 686816 - DNA, 2728 bp, Homo sapiens
tccatgttgctgcaaaggacataatttcattcttctttatggctgcatagcattccatggtgtatatgtaccacattttctttatcaaatccattgttgatgggcacctaggttgattccatgatactgtgaatagcgctgtgataaacatataagaacaggtgtttctttggtagaatgatttcttttcctttgagtatacacctggtaattggattgctgggtcaaataattctatttttagttctttgagaaatctctaaactgctttccataggggctgaactgatctgcactcccaccaaaagtgtactaagtattccaccatttttaacctcatttataaccaacaccgtcctcagcgttaacattcttcagaattcaacagaatgcaagtgtctttcctatggaaagagttcaaatgtggtgtcttatcagatagaacaaaattattcatttttgaactcttagttggacaaataatttatagtgttcaaagggcagcaaacttctttaatgcatatgaggaattaaaaaacagaaaaaaaggtttagtctacctaccagttcatcagaaaacaagtttactctatggatggatgcgaaactgcctcacccttcctattcccaattccccacctcacaaatacacacacgttcctggccactgtggacatggagaatgaaaacattgctctggagacaaatcctatgtgtgtgtctaatgggggctggagaaaagatcacaaaacaggtgccattgctctgagacggcattgtcagggaactcagttccaatcctgaaacttaggtcattaggaaaagcaagaaaaggcagaaagttttcatttacaacctaaaagctagcctttcctgaacatcaaatgccgcaattaaaaacttgctttttaataaacacagtcatgagttggtaaaagccaaagcatcattcacatatcatttcctgcaccactcagctcatattagcagacttaggaaagcatcaaccacaaacatgttgctgatagaaatttcctaatgcaagcagtctttatagatttctgctatttcaatgtaggtctccgaggaccatttgaatccatattaatttcctttctggcagttatgcggctgagtatgaactgcactatttcacttttaatctgtcagtaatttagtaatgtgtaaactaattatgaacagatattaatgtaatcggtttggggagctataaaatcaatgtgtttttacagactgcattaaagagaattgcggtgttataatcacatgtcagttacagataaggttatggaattaaaaaatggatgtcacccccccttcaaggggcacccactaactccatcaaataataagaacatgatcttcccactttctggaactataggaaaaatactaatatcacagccaaaccatcctgcttcactctgactttgataacatcatttccatgacttcccttctccacttcttccccttcctctgttaaataaaaacttgccattcatgatttcaaagatggtgtcacagatcagccttctaggggttatgtcagtgcctcatggtaatggcttccttgggcgaagtctgccctaatacaatttaccagatcattcagcagaggaaaatcagttaacatgaacccagtggttaagaggggttaccatagcttttgcagagtggttctccctaggtctgtgaccctgcaagtagtccaagatatggtcatgggggtggaggcatctcaccaccttggcaggtgtgtatgcatacaggttttctacctcccatagaagaaatctcactattctatgataggtcttgaaattcttagacagttcttgtccagtcaggtgtttgcataagttatagaaatgtatgttcccataactgtattgaagggactcccctcacccactcagagtttatctctatttgtctccttctaaagacttaggcctttctcttttgtagccctaaatataaagtttatagtagaatgcgtcatcctctggcaaactgaagagttccagcgtcagccttgcactttagcaagcctgtggctatggaaaggaaagaagactaagatggcagatagaatttcagctctagatgtacaacttggagccatgctgaaagataggtctaagataatcatgattctcacattccctagaggtgtagttgccttaacacttggaacctcactttcctaatttgtaaaacaggatggtaataaaattctgtacttcacggagaataaaatgaagattgcgccacgttwgggtcatagtaaatgttcaataaagtagctagtagcaggcggaggagtaataatgctcatttgactccatgggtctacttgcttttctcttgttattttacaagagttaaataggtaatctctaaagtcccttcccagcagtaaatctgaggtgttgcaactagctgcatcaacagtccacttgcaaagaggattccatgtggaagaaggttggttaaggaccttcccacataacttctcccatccacacatctatccatcctcatcactaatccctgcctgtgatgctacattgcctcatggtttggcttccatttatatccatccttcctctaaccatctaaaatctcttgagtaactcacactcatttaatgggctcactatttactccccaaatacttattacacctactaaggcaggaaat

SEQ ID NO: 686817 - DNA, 2728 bp, Homo sapiens
tccatgttgctgcaaaggacataatttcattcttctttatggctgcatagcattccatggtgtatatgtaccacattttctttatcaaatccattgttgatgggcacctaggttgattccatgatactgtgaatagcgctgtgataaacatataagaacaggtgtttctttggtagaatgatttcttttcctttgagtatacacctggtaattggattgctgggtcaaataattctatttttagttctttgagaaatctctaaactgctttccataggggctgaactgatctgcactcccaccaaaagtgtactaagtattccaccatttttaacctcatttataaccaacaccgtcctcagcgttaacattcttcagaattcaacagaatgcaagtgtctttcctatggaaagagttcaaatgtggtgtcttatcagatagaacaaaattattcatttttgaactcttagttggacaaataatttatagtgttcaaagggcagcaaacttctttaatgcatatgaggaattaaaaaacagaaaaaaaggtttagtctacctaccagttcatcagaaaacaagtttactctatggatggatgcgaaactgcctcacccttcctattcccaattccccacctcacaaatacacacacgttcctggccactgtggacatggagaatgaaaacattgctctggagacaaatcctatgtgtgtgtctaatgggggctggagaaaagatcacaaaacaggtgccattgctctgagacggcattgtcagggaactcagttccaatcctgaaacttaggtcattaggaaaagcaagaaaaggcagaaagttttcatttacaacctaaaagctagcctttcctgaacatcaaatgccgcaattaaaaacttgctttttaataaacacagtcatgagttggtaaaagccaaagcatcattcacatatcatttcctgcaccactcagctcatattagcagacttaggaaagcatcaaccacaaacatgttgctgatagaaatttcctaatgcaagcagtctttatagatttctgctatttcaatgtaggtctccgaggaccatttgaatccatattaatttcctttctggcagttatgcggctgagtatgaactgcactatttcacttttaatctgtcagtaatttagtaatgtgtaaactaattatgaacagatattaatgtaatcggtttggggagctataaaatcaatgtgtttttacagactgcattaaagagaattgcggtgttataatcacatgtcagttacagataaggttatggaattaaaaaatggatgtcacccccccttcaaggggcacccactaactccatcaaataataagaacatgatcttcccactttctggaactataggaaaaatactaatatcacagccaaaccatcctgcttcactctgactttgataacatcatttccatgacttcccttctccacttcttccccttcctctgttaaataaaaacttgccattcatgatttcaaagatggtgtcacagatcagccttctaggggttatgtcagtgcctcatggtaatggcttccttgggcgaagtctgccctaatacaatttaccagatcattcagcagaggaaaatcagttaacatgaacccagtggttaagaggggttaccatagcttttgcagagtggttctccctaggtctgtgaccctgcaagtagtccaagatatggtcatgggggtggaggcatctcaccaccttggcaggtgtgtatgcatacaggttttctacctcccatagaagaaatctcactattctatgataggtcttgaaattcttagacagttcttgtccagtcaggtgtttgcataagttatagaaatgtatgttcccataactgtattgaagggactcccctcacccactcagagtttatctctatttgtctccttctaaagacttaggcctttctcttttgtagccctaaatataaagtttatagtagaatgcgtcatcctctggcaaactgaagagttccagcgtcagccttgcactttagcaagcctgtggctatggaaaggaaagaagactaagatggcagatagaatttcagctctagatgtacaacttggagccatgctgaaagataggtctaagataatcatgattctcacattccctagaggtgtagttgccttaacacttggaacctcactttcctaatttgtaaaacaggatggtaataaaattctgtacttcacggagaataaaatgaagattgcgccacgtttggrtcatagtaaatgttcaataaagtagctagtagcaggcggaggagtaataatgctcatttgactccatgggtctacttgcttttctcttgttattttacaagagttaaataggtaatctctaaagtcccttcccagcagtaaatctgaggtgttgcaactagctgcatcaacagtccacttgcaaagaggattccatgtggaagaaggttggttaaggaccttcccacataacttctcccatccacacatctatccatcctcatcactaatccctgcctgtgatgctacattgcctcatggtttggcttccatttatatccatccttcctctaaccatctaaaatctcttgagtaactcacactcatttaatgggctcactatttactccccaaatacttattacacctactaaggcaggaaat

SEQ ID NO: 686818 - DNA, 2728 bp, Homo sapiens
tccatgttgctgcaaaggacataatttcattcttctttatggctgcatagcattccatggtgtatatgtaccacattttctttatcaaatccattgttgatgggcacctaggttgattccatgatactgtgaatagcgctgtgataaacatataagaacaggtgtttctttggtagaatgatttcttttcctttgagtatacacctggtaattggattgctgggtcaaataattctatttttagttctttgagaaatctctaaactgctttccataggggctgaactgatctgcactcccaccaaaagtgtactaagtattccaccatttttaacctcatttataaccaacaccgtcctcagcgttaacattcttcagaattcaacagaatgcaagtgtctttcctatggaaagagttcaaatgtggtgtcttatcagatagaacaaaattattcatttttgaactcttagttggacaaataatttatagtgttcaaagggcagcaaacttctttaatgcatatgaggaattaaaaaacagaaaaaaaggtttagtctacctaccagttcatcagaaaacaagtttactctatggatggatgcgaaactgcctcacccttcctattcccaattccccacctcacaaatacacacacgttcctggccactgtggacatggagaatgaaaacattgctctggagacaaatcctatgtgtgtgtctaatgggggctggagaaaagatcacaaaacaggtgccattgctctgagacggcattgtcagggaactcagttccaatcctgaaacttaggtcattaggaaaagcaagaaaaggcagaaagttttcatttacaacctaaaagctagcctttcctgaacatcaaatgccgcaattaaaaacttgctttttaataaacacagtcatgagttggtaaaagccaaagcatcattcacatatcatttcctgcaccactcagctcatattagcagacttaggaaagcatcaaccacaaacatgttgctgatagaaatttcctaatgcaagcagtctttatagatttctgctatttcaatgtaggtctccgaggaccatttgaatccatattaatttcctttctggcagttatgcggctgagtatgaactgcactatttcacttttaatctgtcagtaatttagtaatgtgtaaactaattatgaacagatattaatgtaatcggtttggggagctataaaatcaatgtgtttttacagactgcattaaagagaattgcggtgttataatcacatgtcagttacagataaggttatggaattaaaaaatggatgtcacccccccttcaaggggcacccactaactccatcaaataataagaacatgatcttcccactttctggaactataggaaaaatactaatatcacagccaaaccatcctgcttcactctgactttgataacatcatttccatgacttcccttctccacttcttccccttcctctgttaaataaaaacttgccattcatgatttcaaagatggtgtcacagatcagccttctaggggttatgtcagtgcctcatggtaatggcttccttgggcgaagtctgccctaatacaatttaccagatcattcagcagaggaaaatcagttaacatgaacccagtggttaagaggggttaccatagcttttgcagagtggttctccctaggtctgtgaccctgcaagtagtccaagatatggtcatgggggtggaggcatctcaccaccttggcaggtgtgtatgcatacaggttttctacctcccatagaagaaatctcactattctatgataggtcttgaaattcttagacagttcttgtccagtcaggtgtttgcataagttatagaaatgtatgttcccataactgtattgaagggactcccctcacccactcagagtttatctctatttgtctccttctaaagacttaggcctttctcttttgtagccctaaatataaagtttatagtagaatgcgtcatcctctggcaaactgaagagttccagcgtcagccttgcactttagcaagcctgtggctatggaaaggaaagaagactaagatggcagatagaatttcagctctagatgtacaacttggagccatgctgaaagataggtctaagataatcatgattctcacattccctagaggtgtagttgccttaacacttggaacctcactttcctaatttgtaaaacaggatggtaataaaattctgtacttcacggagaataaaatgaagattgcgccacgtttgggtcatagtaaatgttcaataaagtagctagtagcaggcggaggagtaataatgctcatttgactccatgggtctacttgcttttctcttgttattttacaagagttaaataggtaatctctaaagtcccttcccagcagtaaatctgaggtgttgcaactagctgcatcaacagtccacttgcaaagaggattccatgtggaagaaggttggttaaggaycttcccacataacttctcccatccacacatctatccatcctcatcactaatccctgcctgtgatgctacattgcctcatggtttggcttccatttatatccatccttcctctaaccatctaaaatctcttgagtaactcacactcatttaatgggctcactatttactccccaaatacttattacacctactaaggcaggaaat

SEQ ID NO: 686819 - DNA, 817 bp, Homo sapiens
tgggtactgctctcagcctctctaggtacataataggtaaatgatggagccaagatttaaacccaggttgaattaattccaaagtccatgttctctccactacatagacttccccmaccttcttcctttttataatctaataatccaatgtgaagcatgctatgcgagaggtcagtcaagcatctttgggattactgagaaaaaagcagtgaccttacctggagaagcttcatagcagaggttatatgcagctcaaaggttcaagtggagtccacctaatatggtttggctctgtgtccccacctaaatctcatgttgaattgtgatcctgcgtgttgcaggtggagcctggtgggaggtgattggatcatgggggtggtttctaatggcttagcatcatcccccaagcactgtctcgtgacagagttctcatgagatctggctctttcaaagcgtgtagcatctcccccttcactctctctctctcctgctctgccatgtaagacatgctggcttccctttcacctgctgccaggactgtaaatttcctgaggcctccccagccatgcctcctgtacagcctgcagaactgtaagtcaattaaatctttataaattacccagtctcaggtagttctttatagcagtgtgagaacagactaacacaccaccaaactgaaaggaaaaggacattcccaccagaggcatcgaagggtagacagaagccagattgtggaggaccctgtatatcagtccaaagaatctgtcagcaagaccactaaagggtcttaatcaacaagtagacatagctaggtttg

SEQ ID NO: 686820 - DNA, 817 bp, Homo sapiens
tgggtactgctctcagcctctctaggtacataataggtaaatgatggagccaagatttaaacccaggttgaattaattccaaagtccatgttctctccactacatagacttcccccaccttcttcctttttataatctaataatccaatgtgaagcatgctatgcgagaggtcagtcaagcatctttgggattactgagaaaaaagcagtgaccttacctggagaagcttcatagcagaggttatatgcagctcaaaggttcaagtggagtccacctaatatggtttggctctgtgtccccacctaaatctcatgttgaattgtgatcctgcgtgttgcaggtggagcctggtgggaggtgattggatcatgggggtggtttctaatggcttagcatcatcccccaagcactgtctcgtgacagagttctcrtgagatctggctctttcaaagcgtgtagcatctcccccttcactctctctctctcctgctctgccatgtaagacatgctggcttccctttcacctgctgccaggactgtaaatttcctgaggcctccccagccatgcctcctgtacagcctgcagaactgtaagtcaattaaatctttataaattacccagtctcaggtagttctttatagcagtgtgagaacagactaacacaccaccaaactgaaaggaaaaggacattcccaccagaggcatcgaagggtagacagaagccagattgtggaggaccctgtatatcagtccaaagaatctgtcagcaagaccactaaagggtcttaatcaacaagtagacatagctaggtttg

SEQ ID NO: 686821 - DNA, 1156 bp, Homo sapiens
ccaaactcagcacataaacattctgattaggggatgagaatttgttttacaaaagccttcaccaaaaactcctttaaatagcaactgtctctgatggcacaaaaagatgatttatacacattttggtacacagttaatgtattaggaaagtacaccacccacccaatatttagtttaatattgtttaagattttactaatacctagttataaaaacaaaaccaaaaaaacctccaaatacaatgaatactcacattctataatctgcaaagtttaagatattctatatcttaacttctatgaacattctataatctgcatgtttaagatattaataaaagttgtatttttgcaaactacacagaagtataaatgccattattttctcagaatatggattaactattattaatttcattttaatggacttaagtatcaaaaccaaacagcacattgcaatttttgtttaattgtggttgtgaaataattaagagtgaaaacacatgtaacatttttcccatatggttccactctaaatcccatttcggccatttccactcccccatatttctcaatgccctagaaatagttcataccagttatgaatgccccattggccccaaccacgatgccatccctactagctctaaccctgcagagatctaggaatggaggactagggaataggcataaggcacctttcaagcttttatagaccaatgagaagatgagattccagataatgggccattttaatggtgtaattcctcagattcaaacattccccatttcagacacatcatgattagaaaatccaaataaaggaaaatcattttacataatttatgactattccctaatatttcaaaatgtcacataamcctccctaatattttattacttacggtaagacatgctacatgctgatatcagctgaaaattaggataaaatgtcaggagtcagagggataagacttaccagggaaggaatatagcctggaaatcttgattagcaatcacttttcaccttgtaatgagtttctagaccagcaggggtgaaattgcatgccaaaaatctcaataaattattttccatttgaacacagactatccatatcattacctagttccaggtttagaagattaaacttatcaaa

SEQ ID NO: 686822 - DNA, 1880 bp, Homo sapiens
tcccccgagagtgacctgaagcttcccatgtattcaaatgcatgggggcatttttgaccactcttggagcatttcccagcctgtagatggtacagttgggcatagagtaatttaagggagtcatctttgtgaactcttgtgcctgaggactttcgttcatatcagatgcaggaatcatcaaatcctaagatctgtatgattcttgatacatgatatagccctagccagtggctaggacatgtcatcacatgtagtataggaagcttcatttggacaagcatgaacagaagccccttttcatcacagtggatttctaaaactgattttgtataaagatgactgcaataaaatgggctatagttgccatagaaacatgatttctagagtttggtagcagttttacgtgtgtatgtgtgtgtgagtgtgtatgtgtgtggggaggggtgtattcttgaccaaaaaggagctgccatagacacgtagcacctaaaatgggtaaaaccaatttgcttacaccatagtcatgcatcatttatttggcttagagatgatttattagctctcacatgaattaattaaatatttaatttaccgtcctctggtttgcctccatagaatttagaaggacttcgagatgttaatttaaatagctcagttctctttaatatgctacccactaactttgaactgctaccttttttcctccttgaaaagtgtctccatagcaaagagaatcatttaaaattattctattgcccagaatttcttttaaagtggtgggtacttaatacatttttgttggtgatagtaactgaaaaatttctggaaaacatgggctaatcctacaattcttcccatcttctcctgccccttcaatttatttaaagctacaagtaagggcaacagttcacctgtcagtcaaaaagcaccgtggcccagaaacaggaagagacacacccttcatggtcatagaacctacatgaactttgtggctgagctttttgaccacctcacatgccactgaaagcatcaagccaactaccagacttttagaatgggcattttattaaagagttcacagatttgagatggggataagcaacagtctagctgtactggttctttctttcttctggagtgggtacacagtcactggaagtgctgaatacaagggagtgagtgtggagaatttaattatgggtgttgattaggcagctggataattgggactgacaatggtgtctgtatagcacaacaaggcagaaatggtcctggtcaatgtaaaattggtaaaatttgctgggttgttttctctctgaagatctgaattttgactacagtagtcaagtattcccctaattgtgtgttctgtctgcaaatgtatttaggaagattttttatcctgggactttatgaacaactcaaagtataaatggttagtaaaactgaaaagggtttaatgtggctgctaataaataatataaataaaaatgataatcctctagcttttatctgttgtccatcctaatactgccaaggatggrgttagcaggtacattcatgtactgaaggggcaagggtaacaaaatgtaccctttctgtaaaacagggagaaattcataattttctagccagtatttacattcttaggagccctaattcccagtacttggcaatctatattttcattattctggttaagaattaccctctcctcactaatgactcagaggaatataatgtttcaaagcagaatttcttgacgtagtttccacagaaaacttgtcctgttcttttgactaatcatttcaagatctgaaaaatacagagtcctggatggtccctagggacttccatgatgaatggttgacatattaata

SEQ ID NO: 686823 - DNA, 1143 bp, Homo sapiens
gttcaatagtaaagaaatgcaaattaaagccaaaatgagacactacttcacacccatcagattgataaaaataaagtctgcaaacaccagatgttgccaagaatgtgtgaaagtaggaactcatacatcacaggtgggagtgtaaattggtataactatttgggagagcaatttggcaatacttccataaagcggaaggcgtactttctctaaaatacagtagctctgcatccaggtacagtaaaaccccacaggaactcgaaattagattcaatacaattggcaactgcctttcatcctcctcccagccttagatggcacttgggggcaagctactgttcttatcttttaaacggcgagggaaaggcaggttagtggggatgagcagggtgggtccccgagttaccaggactttcccagccaatattcccctgatgaggccccaaaatgaatgctaactgagaaatctctagaatcgctgctgttgtcttggaagtctgtgtcaggcatcaagatccagaatcattcatagtataataacttaagcctgagcagacagttacctggtggctcaaatctgcagatgggacttgtcacactaggagaggttttgggagactgaacttaatctaaccttactgacgcatgatgaaggatgtgactcatcatacgtgctagatacaatataagggacaactagaggaggtactgataaagaattacaaaatcagagtgagccagataaagaatgatgaaaaacaggatgtcagagtaagtgccatgtagctactgatgcaaatgaactatctgttgactatttactaaaaaaaggaccatagctttaattgcttataaatagagaacattcaccatagctctatagccacttatgggctatctgcatggatgcaggggttttctgctcagtaacaaaattagttaattctatwtttatgaattagcatgttcctttgggccttgattacttttttatcccaacaatttggcaataaggaagattggtatatctcaagtgagtccttttggtgggtgaatttgttggaggatttgtggtcacccgtgattaggtcagaactctgaatgtttgccaaaaagtctccctctgactactttggctgagtg

SEQ ID NO: 686824 - DNA, 1143 bp, Homo sapiens
gttcaatagtaaagaaatgcaaattaaagccaaaatgagacactacttcacacccatcagattgataaaaataaagtctgcaaacaccagatgttgccaagaatgtgtgaaagtaggaactcatacatcacaggtgggagtgtaaattggtataactatttgggagagcaatttggcaatacttccataaagcggaaggcgtactttctctaaaatacagtagctctgcatccaggtacagtaaaaccccacaggaactcgaaattagattcaatacaattggcaactgcctttcatcctcctcccagccttagatggcacttgggggcaagctactgttcttatcttttaaacggcgagggaaaggcaggttagtggggatgagcagggtgggtccccgagttaccaggactttcccagccaatattcccctgatgaggccccaaaatgaatgctaactgagaaatctctagaatcgctgctgttgtcttggaagtctgtgtcaggcatcaagatccagaatcattcatagtataataacttaagcctgagcagacagttacctggtggctcaaatctgcagatgggacttgtcacactaggagaggttttgggagactgaacttaatctaaccttactgacgcatgatgaaggatgtgactcatcatacgtgctagatacaatataagggacaactagaggaggtactgataaagaattacaaaatcagagtgagccagataaagaatgatgaaaaacaggatgtcagagtaagtgccatgtagctactgatgcaaatgaactatctgttgactatttactaaaaaaaggaccatagctttaattgcttataaatagagaacattcaccatagctctatagccacttatgggctatctgcatggatgcaggggttttctgctcagtaacaaaattagttaattctatttttatgmattagcatgttcctttgggccttgattacttttttatcccaacaatttggcaataaggaagattggtatatctcaagtgagtccttttggtgggtgaatttgttggaggatttgtggtcacccgtgattaggtcagaactctgaatgtttgccaaaaagtctccctctgactactttggctgagtg

SEQ ID NO: 686825 - DNA, 667 bp, Homo sapiens
tctacaaaaattaaaaataaaattagggcccagtgtggtggctcacacttgtgatcccagcactttgggaggctgaggtgagaggatcacttgacgccaggaatgtgagaccagtctgggcgacatagtgagacctcctctctatttaaaaaaaaaaaaaaagaaaaaaaattggtgtggtagcgcacctgtagtctcagctacttgggaggctgaggtgggaggatcacttgagcccaggaggttgaggctgcagtaagctgtgtttgcgccactgcactccagcctgagcaacagagcaagaccctgtttcaaaaaaaaaaaaattagaaaaagtttggcaagccaaactagatacacctgcttgccagaagtagcccactggacaccaatttacagccttgctttaaaattccaggtagaaggaacaacatatgcaaatactttgaggcaagaaagagcttcacttgttcatggaaaagacagaaaggcggtatgtccagagccaggtgaccccggaggagagtgatgtgtgagaggaagttgaggaacagccagatcacaggagcttcytaagccatggtgagaagcctacaagatctaggccaatgtccactgagcagtttggccctgtaggacaaaaacattgctaccagaatcgagctaa

SEQ ID NO: 686826 - DNA, 572 bp, Homo sapiens
  misc_feature 2, 3, 4, 5, 6, 7, 8, 9, 10, 11, 12, 13, 14, 15, 16, 17, 18,19, 20, 21, 22, 23, 24, 25, 26, 27, 28, 29, 30, 31, 32,33, 34, 35, 36, 37, 38, 39, 40, 41, 42, 43, 44, 45, 46,47, 48, 49, 50, 51, 52, 53, 54, 55, 56, 57, 58, 59, 60,61: n = A,T,C or G
  misc_feature 62, 63, 64, 65, 66, 67, 68, 69, 70, 71, 72, 73, 74, 75, 76,77, 78, 79, 80, 81, 82, 83, 84, 85, 86, 87, 88, 89, 90,91, 92, 93, 94, 95, 96, 97, 98, 99, 100, 101: n = A,T,C or G
annnnnnnnnnnnnnnnnnnnnnnnnnnnnnnnnnnnnnnnnnnnnnnnnnnnnnnnnnnnnnnnnnnnnnnnnnnnnnnnnnnnnnnnnnnnnnnnnnnncaattaaaggatccagtgatatattttatttaaaaaaaaaacccgcttaaaatgatttagaaagtttggcaaaatgcatattaaatgaggtacagaaaaagattaatcaaagctaagcagaaatagcaaaatcaaagtttacgaaatacagttcaaggcagaaaatgtatcagtgacaactaggggcattatatattggctaaaaaawaagaagttatagctgaaaaatgttcttgcttctaacaatgctgacttaaatgttatagagcgacaactaacagaaattcattgagaaataaatacatctaaagttttatttaaaatttaatatatgctcttcacaaatggatccgggagacaaataatgagagataaacatatctaaataatcgggtttaaaatttaaaacaattagatgctttataaatttaaaaagtcaataacagagacagtgcactatggctatggaga

SEQ ID NO: 686827 - DNA, 1391 bp, Homo sapiens
tacaaaatcctggattccatagtgactacatatgtgtgcaagctcaggcatttaaacactttgattttcactgtacacccaagttaatttacaccactgttgtgagaattaaaagtcacacaagaaaaaactgtgaaaagttaaaagtggtatacaacatcttatttgtatcaccactattttttttctgttcaggacaggtatgagttactctccagatagcacgatgaagcgtaaatacctagaacactgctacttaacttcctgagtggagtcaagatttacattagcttgtattgaacggaaataattcaattctgtaatttatgtaattctaagaaaaaacactagaaagtgttctgtcagtcaggtaatttcctagcaattaaaaaatagaaagtgagagaaaatttcaaaaacaaaacatccttccctatagtgttagctttcaacaaatattatagaactgaatgtttgtttgttgtttttgtttttgtttttttgagatggagtctcgctctgtcgcccaggctggagtgcaatggtgtgatctcggctcactgcaacctccgcctgctggattcaagtgattctcctgcctcagcctcccgagtagctgggactacaggtgcccrccaccatgcccaactaatttttgtattattagtagacacagggtttcaccatgttcactaggctggtctcgatctcttgacctcgtgatccgcccgctttggcctcccaaagtgctgggattgcaggtgtgagacatcaccccaggccagaactgaatgtttaacatacatttgctgagtgctatttgaaatacaaattatatcttcaaatacagtgcaatcaagtaaaaagcataataattcaggcaaagttcactaaaagagttaacctgcatcataaagataagataaaaaatatattttcctcagatatagccacaccccttccattattaaagcccgtaactacgaaagttatgatctgcttttaagtctgtatgggtgtttttggcaacagaaaacaactgcttaagtctttcataggagaatgtgaaattgctgctctgttttgtcatctagtcatgacgagtctttatatcaaaacagcaaacacatccaaactatcatttgacagatttcttccatcaggaaagaaaagaacaactattcttggttttaaaaggagaaagtataatgaaactattttctttaatagattaaaagacaatagagtacagagaggcaaagagatattcaaactcacaaactcaagaaaggcatttgctttccccacagtctcactcacctcaatctaaaaatgtgcacattcatagtcttccaattctagatttgttttctgtgggtgccaacattcca

SEQ ID NO: 686828 - DNA, 1391 bp, Homo sapiens
tacaaaatcctggattccatagtgactacatatgtgtgcaagctcaggcatttaaacactttgattttcactgtacacccaagttaatttacaccactgttgtgagaattaaaagtcacacaagaaaaaactgtgaaaagttaaaagtggtatacaacatcttatttgtatcaccactattttttttctgttcaggacaggtatgagttactctccagatagcacgatgaagcgtaaatacctagaacactgctacttaacttcctgagtggagtcaagatttacattagcttgtattgaacggaaataattcaattctgtaatttatgtaattctaagaaaaaacactagaaagtgttctgtcagtcaggtaatttcctagcaattaaaaaatagaaagtgagagaaaatttcaaaaacaaaacatccttccctatagtgttagctttcaacaaatattatagaactgaatgtttgtttgttgtttttgtttttgtttttttgagatggagtctcgctctgtcgcccaggctggagtgcaatggtgtgatctcggctcactgcaacctccgcctgctggattcaagtgattctcctgcctcagcctcccgagtagctgggactacaggtgcccaccaccatgcccaactaatttttgtattattagtagacacagggtttcaccatgttcactaggctggtctcgatctcttgacctcgtgatccgcccgctttggcctcccaaagtgctgggattgcaggtgtgagacatcaccccaggccagaactgaatgtttaacatacatttgctgagtgctatttgaaatacaaattatatcttcaaatacagtgcaatcaagtaaaaagcataataattcaggcaaagttcactaaaagagttaacctgcatcataaagataagataaaaaatatattttcctcagatatagccacaccccttccattattaaagcccgtaactacgaaagtkatgatctgcttttaagtctgtatgggtgtttttggcaacagaaaacaactgcttaagtctttcataggagaatgtgaaattgctgctctgttttgtcatctagtcatgacgagtctttatatcaaaacagcaaacacatccaaactatcatttgacagatttcttccatcaggaaagaaaagaacaactattcttggttttaaaaggagaaagtataatgaaactattttctttaatagattaaaagacaatagagtacagagaggcaaagagatattcaaactcacaaactcaagaaaggcatttgctttccccacagtctcactcacctcaatctaaaaatgtgcacattcatagtcttccaattctagatttgttttctgtgggtgccaacattcca

SEQ ID NO: 686829 - DNA, 1392 bp, Homo sapiens
agctcttcaatgaattgtcattcaggctacctgcctactccttcggctactctacccaaagttcctgccccatgggtggggccactgcatcaaacaactctccagggagaaccattcacatcatcacctatgcctatctgaatggcacctatgcctatctgaatggagcctattcaaccacagtccatacggctttacctgcagccttgcataaaaccttgtagaaatatttcttcaaattcctttctattttctgattatcttttcttttcttttttttttttttttgcttatttttagggcgcaaatatttaaattttagattttctttacattaacaatgcaaaatacacacaattcattcacaagttagcaactcagctaatgtagacacttctgggcaatggctggtgttttgttttcagatatggttaagaaaatagccatacaatggctcctgtttgggctctgaagccaacagactccttcctctgtccccaaataggataacaaaagatttagggaatattcaatacttttctcaaagaagtaagtgatttgagtgtaagttgctacttccctgtaagaaataacagcaagcatagatacgcctaagggaaggcaggacgaagccgccactttccttggagtctaaaactctgacctgaaaagtgttcgcaagggattggaaccaaagccaggattgatttgctgagatttgcactctcacctaatggcctgaggaagcagtgctgctgtcttggtttgttctggcagctataacgaaataccatagactgggtggcttataaacaacggaaatttatttctcaccgttctkgaagcgggaagtccgaaatcaaggcctgacagtttccgtgtctgtgggagggccgatttccttgttcacagagagcaccatcttgctgcatcctcacacggcgtgcggggcgaggcggttctctgggccctctttcatcagggcaccgatccccttactgatgggggctccgcccttacgatctaatcacctcccaacagccccccttcccaacactctcacactggtgactagatttcagcatgaattctaggggagccacaaacactcagaccacagcagtgaccaacgtagcattagtcaagaaagcccaagacactcagtctctgctagggaggaagatcttatcggtaaatgtgaacatgtatttcaggattcaagaggtgattagaagtgaacagttttaaagattacagaaagcacagtggcaatgctttaaaagaaagactgctttcctgtttgagtaagagcaagaatattaaatcaggagcattcgccaattgacattcctgtgctggtgtgaggagagggcagacgttcaagtcagagct

SEQ ID NO: 686830 - DNA, 585 bp, Homo sapiens
ttttacattgacagggctctactgttttggaacacaatttgaccattctttaaaatgttaagcatactattaccatataacacctctgtattataattgccctacatctaagggcaatcaaactgaaaaatttattccaatgaaagaaaaataacatttggaggcttaatgaaaatttttttggtactaatgcaaaatcagacctagtacttctaggtgtatagaatttaattgccctgggatataygacaatttaactgccatggatatagggcaattataacacaagggtgttaattgttaattgccctatatctaagggcaattccacccttagacatacacaagaaaaataaaaacagatgttcatatcaaaacttagacataaatgttcaaagtagcattatttataatcaccaaaaagtgaaaataatggaaatgtccatcaacacatgtgtgaataaatagaatgtgccaatattcatacaatggaatactactcagaaacaaaaaggaagtgctgatccatgttataatattgacaaaccttgaaaacattatgccaagtgaaataaatcaatcaca

SEQ ID NO: 686831 - DNA, 585 bp, Homo sapiens
ttttacattgacagggctctactgttttggaacacaatttgaccattctttaaaatgttaagcatactattaccatataacacctctgtattataattgccctacatctaagggcaatcaaactgaaaaatttattccaatgaaagaaaaataacatttggaggcttaatgaaaatttttttggtactaatgcaaaatcagacctagtacttctaggtgtatagaatttaattgccctgggatatacgacaatttaactgccatggatatagggcaattataacacargggtgttaattgttaattgccctatatctaagggcaattccacccttagacatacacaagaaaaataaaaacagatgttcatatcaaaacttagacataaatgttcaaagtagcattatttataatcaccaaaaagtgaaaataatggaaatgtccatcaacacatgtgtgaataaatagaatgtgccaatattcatacaatggaatactactcagaaacaaaaaggaagtgctgatccatgttataatattgacaaaccttgaaaacattatgccaagtgaaataaatcaatcaca

SEQ ID NO: 686832 - DNA, 585 bp, Homo sapiens
ttttacattgacagggctctactgttttggaacacaatttgaccattctttaaaatgttaagcatactattaccatataacacctctgtattataattgccctacatctaagggcaatcaaactgaaaaatttattccaatgaaagaaaaataacatttggaggcttaatgaaaatttttttggtactaatgcaaaatcagacctagtacttctaggtgtatagaatttaattgccctgggatatacgacaatttaactgccatggatatagggcaattataacacaagggtgttaattgttaattgccctatatctaagggcaattccacccttagacatacacaagaaaaataaaaacagatgttcatatcaaaacttagacataaatgttcaaagtagcattatttataatcaccaaaaagtgaaaataatggaaatgtccatcaacacaygtgtgaataaatagaatgtgccaatattcatacaatggaatactactcagaaacaaaaaggaagtgctgatccatgttataatattgacaaaccttgaaaacattatgccaagtgaaataaatcaatcaca

SEQ ID NO: 686833 - DNA, 618 bp, Homo sapiens
acaaagaactctcacaggtcaaatttttaaagagacgaaggacaaacacatgctcttcaaaagagaagcagttcatatggctagtcactgtaaaaaatgctcaacttcactgatgatgaaaaatgaaaatctaagcattatttagatatcatttctcrccaatagcctggcaaagtttttacatttggtaacaacgtaaaagaatgtcaagaaacagagactctgcagagactcttggtagagcgtacatggataccgctgtcatagggaacaatttgtcagtccctgtcaaaattctgagtgtgtagacgtttggcctagcacgtctaattctaggaatttatctgagagaaatacttggacactttttcaaaggtatatgttcaaaaatgttcacagcactgtttgaaatggcaaagaattggaagcaacactaacattgatatacagaaaattcaatgggccaggcacagtggcccacacctgcagtcccagcacttgagaggctgaggtgggtggatctcttgagcccaggagtttgagacaagcctgggcaacatgacaaaacctcatctctactaaaaatttaaagattagctcggtgtggtggtgtgcacg

SEQ ID NO: 686834 - DNA, 618 bp, Homo sapiens
acaaagaactctcacaggtcaaatttttaaagagacgaaggacaaacacatgctcttcaaaagagaagcagttcatatggctagtcactgtaaaaaatgctcaacttcactgatgatgaaaaatgaaaatctaagcattatttagatatcatttctcaccaatagcctggcaaagtttttacrtttggtaacaacgtaaaagaatgtcaagaaacagagactctgcagagactcttggtagagcgtacatggataccgctgtcatagggaacaatttgtcagtccctgtcaaaattctgagtgtgtagacgtttggcctagcacgtctaattctaggaatttatctgagagaaatacttggacactttttcaaaggtatatgttcaaaaatgttcacagcactgtttgaaatggcaaagaattggaagcaacactaacattgatatacagaaaattcaatgggccaggcacagtggcccacacctgcagtcccagcacttgagaggctgaggtgggtggatctcttgagcccaggagtttgagacaagcctgggcaacatgacaaaacctcatctctactaaaaatttaaagattagctcggtgtggtggtgtgcacg

SEQ ID NO: 686835 - DNA, 618 bp, Homo sapiens
acaaagaactctcacaggtcaaatttttaaagagacgaaggacaaacacatgctcttcaaaagagaagcagttcatatggctagtcactgtaaaaaatgctcaacttcactgatgatgaaaaatgaaaatctaagcattatttagatatcatttctcaccaatagcctggcaaagtttttacatttggtaacaacgtaaaagaatgtcaagaaacagagactctgcagagactcttggtagagcgtacatggataccgctgtcatagrgaacaatttgtcagtccctgtcaaaattctgagtgtgtagacgtttggcctagcacgtctaattctaggaatttatctgagagaaatacttggacactttttcaaaggtatatgttcaaaaatgttcacagcactgtttgaaatggcaaagaattggaagcaacactaacattgatatacagaaaattcaatgggccaggcacagtggcccacacctgcagtcccagcacttgagaggctgaggtgggtggatctcttgagcccaggagtttgagacaagcctgggcaacatgacaaaacctcatctctactaaaaatttaaagattagctcggtgtggtggtgtgcacg

SEQ ID NO: 686836 - DNA, 1364 bp, Homo sapiens
  misc_feature 2, 3, 4, 5, 6, 7, 8, 9, 10, 11, 12, 13, 14, 15, 16, 17, 18,19, 20, 21, 22, 23, 24, 25, 26, 27, 28, 29, 30, 31, 32,33, 34, 35, 36, 37, 38, 39, 40, 41, 42, 43, 44, 45, 46,47, 48, 49, 50, 51, 52, 53, 54, 55, 56, 57, 58, 59, 60,61: n = A,T,C or G
  misc_feature 62, 63, 64, 65, 66, 67, 68, 69, 70, 71, 72, 73, 74, 75, 76,77, 78, 79, 80, 81, 82, 83, 84, 85, 86, 87, 88, 89, 90,91, 92, 93, 94, 95, 96, 97, 98, 99, 100, 101: n = A,T,C or G
cnnnnnnnnnnnnnnnnnnnnnnnnnnnnnnnnnnnnnnnnnnnnnnnnnnnnnnnnnnnnnnnnnnnnnnnnnnnnnnnnnnnnnnnnnnnnnnnnnnnntgagagtgaagaaaaccatgccattttttctagaaggtaggagctttttacatgctaaaatttttagggctgtctacgaatacattatcatagggaattatggaaatattgtttgtattatgataaatacttgtatctgttaacatacatatgtcaggggaaagatcctgaagctagcatttccatttgaaattcttaagtgaatgcgctgagcatgacttactaagtgaagtaattacacagtgggaaataactcagaacagattttaattgagcttgttacggtagtgtgtagttttattttttttaagctcatttcagggaatgtcttgtccagaatgttggctgcaccaagaacctatgattttatgtcttatttgacaaattatgtcttctggtagaaaacctctagtttcagaaatatatgaattatgtagtacagagaaatgttatagacaactcagcctttgtttaccgaacacttatctcaaggatcttacaatcagttctaaaactaaattcccatgaagtggttcaatgataatacaaagcagtagatgactaaatgccacagagagcatttaggacaagggagcaatcattttgaatgaaaaaggcaaaggggagacttgaccccagaccgcaaacaatgggtagaatttggatttatggggaagagacgggaggaccaagatatagctgagtgtgctgtatttgcaagaacatgaggtggctgccactgaagtgttcagttggtgagaagcaggagttactggccagtctgatggatgaagaaccttatctgccaaatactcaccaatctattctttccctgttgaccagccctccagtggcaacctcctcgtgttcttacaaactgttctgagaatagacacccacagaaaacatctggtcaggggagtgtcataatgaaagtggggtttggggatgctaattgatttcgttatgtatgcctaacttcataggaaaaccaaaagcaaccctcagacaaccaggatttgcttcaaatttttctgttggcaaaaaacctaatccagcaccgttaagagacaaaggaaactctgytggagttaagcctgatgctgaaatgtctccttatatgctacacacaactcttggaaatgaagcattcaaagacattccagtgcaaaggcatgtgaccatgtccaccaacaacaggtatttggcctctgactcacagaagtttggtgaatctagggtaaaaagtgttacaaatgtatg

SEQ ID NO: 686837 - DNA, 1214 bp, Homo sapiens
tactacatagattaatacacactgttgttatctgctagtgaaattaatactctacattatttgcagcaaattactcagaaacctagtttcatgttacttccctgctcaaaaccctctaatgcagtggttcttaaacttaagtgtgagtactgggcctctcctctggggtttctgaatcaggagatgtggagcagggcctggaactttatatttctgacaagttcccaggtgatgcttatgctgtttgtctgagaattgcatgttgtaaatcactactctagtgacttttcccttgcaataaagtccgtactccttattcttgacctacaaggccctgcctgagctaccccctgttctccctgccctcattggcataagtctgtattcctgatgtggcgtttttttctggtcatggaatagtccaagttcattaccacctctgggcctttgatgaaatgtcttccttcagatgtttcaagtggctgtggcttcttcagtctcagctcaaaagtccccttcaccctgaggtgtctttcctaatcatgatcagccatcctcccctcatcacttccataattctttatcatatcgctttatataccatgctcatttgtgtgctaccagcctctcttctctgccctaaagaaggcaagctttttcatcactgtgttccttttgctttaactgtcctttcttaataggtatttagtaagtactaacgggtgaatgaaygaaacttcttgttgaagtcagcaagaagttaggattgaggggaaggcatagaaccaggagcttctttggcatggctggctttgataggatatgactcctataggtttctatgtagaggtccctgttacctattcatgtatatgaagtggttcttttaccagacatctatgaccagcaggctactttatgattttttccttaattaaagtaactacttcatatttgctctatcatttttttccagaatgttgactatttcagaatatgattgtgtgctccagatgatattgaatggatggtcaggatagtccatgcctgattaacatttttaacagaatattgttcaaattgatattgagacttcacgttattgatttctgaattctactaacttgctgtaagtgagcaaaggaatagtttatgaagtaaaaaaaatcctttgaatatgactttatgattttgctttaaataaactcagatgt

SEQ ID NO: 686838 - DNA, 1363 bp, Homo sapiens
aaattcttacagtgaaaaagttatttgtgttttttttttctttctgggcaaaatttcctggaatagtgaagctatgctgacgaagacaggrggctggtgaaggcaatatcactatagtcagtaagctgtgtaaaggtagatagtttagattctcagagtccatctgcccatccccacctccaaacatataaatcaaacctcactgcaagccacacagccctcgaacggcagaagataaactggagccaggtcctgaattccccaccctctggcatttcatgacccaagaatctattacccaagccaaatgaataaggaccatccttggccttgaaaacaaaaacttccctcgtagtcttattttaatctttttttgaaagattaggggaagaaaataagagatagaaatgagatagagaatatgtgtgtgggagaagtctggcacctcagagaggggtcctggaaggtctctctgaggaggtgacatttgagatgtgaccagaatatgcaaagaacctggaaagaagctctctaagttgaagaaagtgattacaaaagagacaccttgggggtcagaggaaaagaaagactgtgcctggctggaacccagtggacaggagaagaggtaggagctgaggtgaggctgaaagataaggccagaccactgagtgtcttgcctgcttgagatgggtgttcctgctgctgcttgtgcagagtgccgctggcttgccccatggaacctcatggtcagagctacttttcagtgggtagtgaagaggaccatctccagattctcccagcaagggggctggagaatatgcagatgatcagttgtttattttcccctgagcaaagtgaaaaaatgcctcagctaagtcagccgtggggcttcttggagcagtacattattactatttttttttttttactttcggttttttgtaagaaatatctgtgacttctggatagtctctttttattcttagccattatcacactctaacatccattttcatttccagtgttgagctggatggtttttatggcatctcagctaaagaaaaagaaaatgaatgtacaaaataaaagataaaatttgtttatttatttttgagtgtaaagagtattcctatctttttttctaaagaaaaaaaaaaccttttaggaggattcaatttgacacaccattttctctttttaatatacacacgggtactaactggacaacttgcagtatgtatgccactattactaacatacgatgattaaaaaatttcaagagtgttgtctgatgcttacatgaaactactcaatagtatatatgcaggcttactgaagttgtgtaacagagctgaaaagcaag

SEQ ID NO: 686839 - DNA, 1363 bp, Homo sapiens
aaattcttacagtgaaaaagttatttgtgttttttttttctttctgggcaaaatttcctggaatagtgaagctatgctgacgaagacaggaggctggtgaaggcaatatcactatagtcagtaagctgtgtaaaggtagatagtttagattctcagagtccatctgcccatccccacctccaaacatataaatcaaacctcactgcaagccacacagccctcgaacggcagaagataaactggagccaggtcctgaattccccaccctctggcatttcatgacccaagaatctattacccaagccaaatgaataaggaccatccttggccttgaaaacaaaaacttccctcgtagtcttattttaatctttttttgaaagattaggggaagaaaataagagatagaaatgagatagagaatatgtgtgtgggagaagtctggcacctcagagaggggtcctggaaggtctctctgaggaggtgacatttgagatgtgaccagaatatgcaaagaacctggaaagaagctctctaagytgaagaaagtgattacaaaagagacaccttgggggtcagaggaaaagaaagactgtgcctggctggaacccagtggacaggagaagaggtaggagctgaggtgaggctgaaagataaggccagaccactgagtgtcttgcctgcttgagatgggtgttcctgctgctgcttgtgcagagtgccgctggcttgccccatggaacctcatggtcagagctacttttcagtgggtagtgaagaggaccatctccagattctcccagcaagggggctggagaatatgcagatgatcagttgtttattttcccctgagcaaagtgaaaaaatgcctcagctaagtcagccgtggggcttcttggagcagtacattattactatttttttttttttactttcggttttttgtaagaaatatctgtgacttctggatagtctctttttattcttagccattatcacactctaacatccattttcatttccagtgttgagctggatggtttttatggcatctcagctaaagaaaaagaaaatgaatgtacaaaataaaagataaaatttgtttatttatttttgagtgtaaagagtattcctatctttttttctaaagaaaaaaaaaaccttttaggaggattcaatttgacacaccattttctctttttaatatacacacgggtactaactggacaacttgcagtatgtatgccactattactaacatacgatgattaaaaaatttcaagagtgttgtctgatgcttacatgaaactactcaatagtatatatgcaggcttactgaagttgtgtaacagagctgaaaagcaag

SEQ ID NO: 686840 - DNA, 595 bp, Homo sapiens
tttttttttttttttttttggttaccattaggctaaaacaaaacatcatatagttgtaacagtctattttaagctgataacaacttaactttaactacatataaaaactcaacgccttaactttcctcccaatattgkatggcttttttatgtgtgtttgtttttagacagggtctcactttgtcacctaggttggagtacaatggcacaaacatggctcattgcagcctggatctgctgtgctcaagcagtcctcacacctcagcctccctagtatctgggaccacaggcatgcaccaccacacccagctaattaaaaaaaaaaagttgtagagatggggactcatcatgttgcccaagctggtcttgaactcctgggttcaagtgatcctcctgctttggcttcccaaagtgctgagattacaagtgtgagccactatgcctgggccatgttatgttattgatgtcacaatttatgttttcttatattctatattaattaataatcagttatttataattattttattttaacttttatactagagttaaatgtgctttacatactaccattacagtattagattattctaaa

SEQ ID NO: 686841 - DNA, 632 bp, Homo sapiens
agtatataatacacaattaatttaaagatagtagaataaagaaaaaagcaatggggcacattaactgaagatcatagattgagttagaccatagattctaacatggaaactaaaagtacaagttgtcttaaagaaagagtaggataatatcttcattactttaaggtagtcacagatttctaaatgtgcataaaagctaaaacttaaaagaaacataaaaggaaaaattgataaatttgacttcaaatttaaaaaaaaaaaattctcaaaagtactgaaaaacaggatgacgttagtagaaatkgtaaaggagaaaattctgaaagtccatctttccacaaaagcaatgaacagacataaaaactgtcagaatcacctttttttagaaatctggagtctaatcaaaagcttacaataacgagaaaaactctaaatccaggaaaatagctgactgttgataagagaggtttgtggtgatttgacttcctcttgtatcattctccacttccagttttgtggcagccttgaggacagccttcattcctgatatgtacctaatacctgagagatcaggtgatttattttgacctggccaatggctccctgaaggaccagataaagcgcttgccttt

SEQ ID NO: 686842 - DNA, 2669 bp, Homo sapiens
attttggaaaattgtagaaaccaaatgggagaaacatgatatagaaaaacgtaaacaactacagaacattttatgaactttgtttaaattttttttaatttataaacaagaagagatgatagagctaaaataaacaaaaaagttaagtgggaaaaccacaatcatcagggattgcgcatagtctttattgatttggagatacgttgttctgcaaaggaagcatttataaaacttttattctcatgtagttttaacatagccccatgaagttagaaatctaattctataaaagtggttactgaaagaaaataattttcaaacttcagttttcaacctactgtctacagtagcttctgtacacttgaaacaataaaattggctatttatattactttatctctgactctttagaatggaattatttcatcaatacctttttgctaaggaatgtagacatccctacattttggaatttttattgcaagtacatacagttttactcataaattgaatttttatctccacaatatttgagtaaattatgaggattcaaaacaaaagtgtgaaactgtcatcgggaggagaaagatttcaaataactttattatgtctcataaatctagggagatagtgttatatcataaattaaatattattttttgggagataaaggaactgattttcagtaaaaggactgttcctaactagtcgtgagagtttggaagactcatttaaacttgatggaccaccaccagctccaccttagagccaatgaactgtaactttccaatagcattatttaatgtgaaaagactttctgtgaattattggatttacaacatgagtaattagtgattttagcaaataaggtatactaagaagtaaaaacgacmgtatcagcgctgtacatcatttagcaggttgtatcttgtagctgtgcaatgtgtttgtctgtgtgtgtgtgtgtgtttcagcttgttagattctccaggtaactttgtagatccagtctgatttagcttttgttaaagtttcctcttcaacaaacagaagactgtttattcaaaatattcactcagtatggcactaagatttctaaagcctttacattaaaataatgcaggtagcataagactgataaaactggggccgggcgctgtggctcacgcctgtaattccagcactttgggaggccgaggcgggtggatcacgaagtcaggagatcgagaccatcctggctaacacggtgaaatcccctgtctacaaaaatacaaaaaacttagccgggtgtggtggcgggagcctgtagtcccagctactccggaggctgaggcaggagaatggcgtgagcctgggaagcggagcttgcagtgagccgagaccacgccgctgcactccagcctgggtgacagagagagactccgtctcaaaaaataaaaataaaaaagactgataaaacatggccaaaaaaaaaacacctaattgattagaaagttatgcagtcttttcacatatgacataaggacacacctatcttttcacagtttttttgtttgtctattttttgcataaacgttaagaaattcacatccccgttatatttcttattgaactagtctactaatattacacccatagtgaacagatcaggttgatgagagcaactgtagtaaaccagtatctatttctcattttaaatttactgattcagccaactgcactgatttagaaaagaaaaataccttatgatagatctgagaatgcttaacaaacattattgcaattctgaaaatgcttttactgtctgtttcattccggcttctgccaaaaatacctatggatcacgtttaatacactgtggtgtatgcttaaaccttgacataatgggagaaacactacaacttaatattgaatgaggtagtattggattctttgtgtctataacaatatacttttctaccaatgcatgtctcataagttttatttcatttcattggcatttaacaaaaaggagttttgatttcttacccctttgaggtacacctgcatttttctcgctctgttcttcttgcaagtgtttcaaaatattcactcaaaagaattgagaccgttcataggaagcaatgggaaatttttaaaagggtaataataactgaggttagatgtatcctcagacaaaacaaaacacaattgtttgctttattaacaagccctacttctcaacatatttaggtgttacattttctatagaaaaagaaagtatggagtttaaaagcttcactgttttatgcaaattatggtattaagaaggtgatattattgatgtaggatattttcttgacctcttcaagtgactcgtgacaggggtgccctgttcgctcagcccaccctgctcaacccctcgggggagggagcacaccagtgagggaggggaagggagcgagcaagtgcaagaactggcaggtggcctggcaggagcaaactccccttcactcagatctgcagggctccaccccatgtaggagggaccatgcaagtggaacaagtgcacgaactggccagctacttcaacactggcaggagcaatgtccatgcagtccccgccgcggcatcccattgtggtgcttgcgaccccaaggcccaagagggcgttttacaatactctatta

SEQ ID NO: 686843 - DNA, 665 bp, Homo sapiens
caacattaggggtatatgggtggatgtcctcaaaatgtatccatgtattatttcaaaaacagtattcaaaggtgaggacctggacaaagtttcattgsagtcatttgtaactattaatagaaattcaggaaccaggtttatcagtgaatgcaatcaaggctgtcattaaatattgcattatgacatttatttgtattgaaaatgaaataaattatttcctacagctttcttcatgctctttcaaagggtgagatgacaatgcatgtgcaatctaatgtccgtccacctgagagagctgcctgtagtcactcaagatcaatgtaacccagcagctgtttctgctttaaaggtcattgagaatttataaacagtttttttctttcctgtttttcttaagcttaaatagttctataatgaaaattagacatattttaatatgtctcatgagcacatccaaaggtaataaatatctccagaatactgccctttacagaaggttcttttgtaagaactagatagacctgtgactggttttgtagtcctatagacctgggttcaaattctcactctgctatttggtctctatatgacatagatggccttagacaaactacatactgtatctgagtatcagtttattgatctggagagtaaggtaaattaat

SEQ ID NO: 686844 - DNA, 665 bp, Homo sapiens
caacattaggggtatatgggtggatgtcctcaaaatgtatccatgtattatttcaaaaacagtattcaaaggtgaggacctggacaaagtttcattggagtcatttgtaactattaatagaaattcaggaaccaggtttatcagtgaatgcaatcaaggctgtcattaaatattgcattatgacatttatttgtattgaaaatgaaataaattatttcctacagctttcttcatgctctttcaaagggtgagatgacaatgcatgtgcaatctaatgtccgtccacctgagagagctgcctgtagtcactcaagatcaatgtaacccagcagctgtttctgctttaaaggtcattgagaatttataaacagtttttttctttcctgtttttcttaagcttaaatagttctataatgaaaattagacatattttaatatgtctcatgagcacatccaaaggtaataaatatctccagaatactgccctttacagaaggttcttttgtaagaactagatagacctgtgactggttttgtagtcctatagacctgggttcaaattctcactctgctatttggtctctatatgacataratggccttagacaaactacatactgtatctgagtatcagtttattgatctggagagtaaggtaaattaat

SEQ ID NO: 686845 - DNA, 756 bp, Homo sapiens
ctatttttaaaaagttatcttcaaaaggaccacttaatgaaaccaacagtactttgcctagaagcataaagggttaaaggggaaatttccaaaccacagtttttcttggggtgaggaagggaccacattactttcattcttggaacatcctgcccaacagatggcagaagtgttcttaaccttttgcctttaagatttccatctcagctttaaacttttccattcctttctgtgaaaattttaagatccattagaaaatatctaatattgtaagcacttagcaactgtaaagactgaaattatctccatccatcaactcagtatacaaaacaataccacccattagaagataggcaaaaagaacagataaagtccaatctatcagccgggtgcagtggctcacgcctgtaatcccagcacttcctgaggccaaggggagaagatcatgaggtcaggagatcgaaaccatcctggctaacatggtgaaaccccgtctgtactaaaaatacaaaacattagcctggcgtagtggcgggcgcctgtagwcccagctactcagaaggatgaggcaggagaatggcatgaacctggaagggggagcttgcagtgagccaagatcacgccactgcactccagcctgggcgacagagcaagactctgtctcaaaaaaaaaaaaaaaaaaaatgttgaatctacctcagtagagaaatccaggtctcaagcagagtttctttaatttgtatagcaaaatcacaa

SEQ ID NO: 686846 - DNA, 589 bp, Homo sapiens
gatggatttcattattgtaattatttacaataattttaggttattatttttagtttcttggtagagatcttacatttacatgagtaatagtgaaattttatgatgaaatggttccaaaaggaaagtaaaatgactaatggcttgaaaagatcttgggatataagagacctagacaatgtttatatttctgatatttcatttacagaaataaatatgcttttttgaacctggccgttcatacaacctagaggaaacgtaacacaggaaaagcagcattgaaactcagaatccagatttaagtctcaattaactcactggttttggttttagccctgaaaaccaatcatcttggtgttagcactgaaagtcatgtgttccaggaaacccctaagttccaggtaaaccgagatggttggttactctaggtgaaggtgggcaattcacttcacgtgtctgaccaccagtttcttattcataaattaaggaaattaacacycactgtgcttaccccacaaggtagttatgaggatgaaaccagctaatgcctatggaagtatctcgaaaactatttattcaacatgatataaac

SEQ ID NO: 686847 - DNA, 1813 bp, Homo sapiens
gtttacctgtcttcataataattactgtcgttgggctgggcatggtggctcacgcctgcaattccaggactttgggaggccgaggcaagtggatcacctgaggtcaggagttcaagaccagcctgaccactgtgatgaaaccccctctctactaaaaatgcaataataataataatagtaataattaccattgtcaaaggtatcagtgattattatgcttctgctcatcaaatttggttaacctagagtggcaaaacaccattgatgtaattgactactggagaagtcacaaatctatttcagcttcacctttcttattatcttttgacatgatggtgcattagatgaatatttttatacatatataaatttatagaaatgtatgtataatctggtttgccaaaattacatactttaacagcaaagtgaaaaatcctaattggttaaaaaaaaaaaaggccatgaataagggctaggtgcagtgactcatgcctgtaatttcagcactttgggaggccaaacggggaggagtgcttgagggcaggagttcgagaccagcctgggcaacatgttgagtccccagctactcaaaaggctgagcttggagggttgcttgagcccaggagttggaggctgcagtgagctataatcatgccacggcattccagcctgggtaacagagtgaggctgtctcttaaaaaaaaatgccatgagtaaaagtaaggaagcatttggaagaaaatatgccctaccaagtttgtctgtatccagaaccaacaactatttggctgatatttcatgttgagatgctttgatggcattgctttactgtcttattaaattatgtcaatggaaggttttcacacatctttatcgaggttggactggtttgccactgacagatgacttatcttcagagtaagctactcttttctagaccaatctttttccttttgctaattaagaattgactcctctggaatccttttattgaccatgaaggatggtaggaaggaagtctcaaggagaaaatgctatgtgtaatctattctaagcattatttaaagttggcaaagaaaaatgtgggacatagtgttctcagtgttagccatttttattctactagcaattttctccaaaatcagaacatcttgaggtctccagattggaaaagaatcaatttttgtggcagagtgaaatcaacctttttcaaataaccaagctgtggtgttgtaaattcaaaaatagtctccaaatagctgcaactttcaactgttcttacaaataaaaacatttttaaaaaaccagttttatccacttccaaatcctaagacaaagaattaattaaactaccttcatggaaaagagacaaacatttttaaaaatcaaatgcattctgacataaaaacattacaaacacttgcttacttaagattagaaaaaccaaccaaagtgatgcccataaaaatggtgaaattacattatgagcctatggaagagctgatcttaactatcatattcagtattaattttttgaaaacaatattcrtcttaaagacttttcactattaaatataatccaaccttaacaaacatttaaaacaaatgcttgtgtaaccaccatgcacgttatgaaaaataatactgctgcctctccaaagcaactccataaccctcccccagagacaacttagcctgactgtggcaatcacttccttgcatatcttttacttaatatataaatatgcacctaaatatgtgttctgaaatactattgtgtgagttttgccaatggctactggctactacattg

SEQ ID NO: 686848 - DNA, 1813 bp, Homo sapiens
gtttacctgtcttcataataattactgtcgttgggctgggcatggtggctcacgcctgcaattccaggactttgggaggccgaggcaagtggatcacctgaggtcaggagttcaagaccagcctgaccactgtgatgaaaccccctctctactaaaaatgcaataataataataatagtaataattaccattgtcaaaggtatcagtgattattatgcttctgctcatcaaatttggttaacctagagtggcaaaacaccattgatgtaattgactactggagaagtcacaaatctatttcagcttcacctttcttattatcttttgacatgatggtgcattagatgaatatttttatacatatataaatttatagaaatgtatgtataatctggtttgccaaaattacatactttaacagcaaagtgaaaaatcctaattggttaaaaaaaaaaaaggccatgaataagggctaggtgcagtgactcatgcctgtaatttcagcactttgggaggccaaacggggaggagtgcttgagggcaggagttcgagaccagcctgggcaacatgttgagtccccagctactcaaaaggctgagcttggagggttgcttgagcccaggagttggaggctgcagtgagctataatcatgccacggcattccagcctgggtaacagagtgaggctgtctcttaaaaaaaaatgccatgagtaaaagtaaggaagcatttggaagaaaatatgccctaccaagtttgtctgtatccagaaccaacaactatttggctgatatttcatgttgagatgctttgatggcattgctttactgtcttattaaattatgtcaatggaaggttttcacacatctttatcgaggttggactggtttgccactgacagatgacttatcttcagagtaagctactcttttctagaccaatctttttccttttgctaattaagaattgactcctctggaatccttttattgaccatgaaggatggtaggaaggaagtctcaaggagaaaatgctatgtgtaatctattctaagcattatttaaagttggcaaagaaaaatgtgggacatagtgttctcagtgttagccatttttattctactagcaattttctccaaaatcagaacatcttgaggtctccagattggaaaagaatcaatttttgtggcagagtgaaatcaacctttttcaaataaccaagctgtggtgttgtaaattcaaaaatagtctccaaatagctgcaactttcaactgttcttacaaataaaaacatttttaaaaaaccagttttatccacttccaaatcctaagacaaagaattaattaaactaccttcatggaaaagagacaaacatttttaaaaatcaaatgcattctgacataaaaacattacaaacacttgcttacttaagattagaaaaaccaaccaaagtgatgcccataaaaatggtgaaattacattatgagcctatggaagagctgatcttaactatcatattcagtattaattttttgaaaacaatattcatcttaaagacttttcactattaaatataatccaaccttaacaaacatttaaaacaaatgcttgtgtaaccaccatgcacrttatgaaaaataatactgctgcctctccaaagcaactccataaccctcccccagagacaacttagcctgactgtggcaatcacttccttgcatatcttttacttaatatataaatatgcacctaaatatgtgttctgaaatactattgtgtgagttttgccaatggctactggctactacattg

SEQ ID NO: 686849 - DNA, 2954 bp, Homo sapiens
taggttttatgctatagctaaaggaaaagaaaaaatgaacatgaaaatttaaaagctttatatatttttagattacgaagtaatacaggtttattgtcaaaaattaagaaaatgcagaaaggtataaagaagacaagaaaacaacttataatcctatcacttaataataactatcattaatgctttcagttttacagttggtccttgaacaacacaggtttgaactgaatgggtccagttttacgcagatctttttcaaccaaacttggataaaaaatacaaaatttggcttttctgactatgaagtagccattcttttattcttttactttcttaatcaacttgctttcacttaaaaaaatacaaaattcatatttgagggatgggaaacttgcatatattggcagtcggagggggctgacttttcatatacatgggttccgcaggtccgactgagggacttgagtatgagtaagattttggtatgcacaggtggtcctggaaccagtcctctgtgtataccaagggaaaactgtacttttagcctttttgtctgtatattatactttacaaaataaaccaagagaagctgggtgcggggctcatgcctgtaatcccagcactttggtaggccaaggtgggaggatcacttgagctcaggagtttgcgaccaggctaggcaacatggtaaaaccctgtctctacaaaaatgcaaaaattagctgcggactaatttttaattaattttaaactaatgcctgtggacccagctactcaggaggctgaggtgggaggatcacctgagcccaggaaaagttgaggctgcagtgagccatggtggtgctactgcacttcagcctgggtgacagagtgagaccctgtttccaaacaaacaaacaaacaaacaaaccaagatcagtcagtgtaccaagtcgatttccaaaggatttagcaatgctgctggagcaactgaatatccacatggaagaaaacaaatgaactttgacccatatctcattctatacaaaaaaactcatttgagacagatcatagacctcaacttaaaaccagaaacataaagtttcaagaacaaaaagagaatatctttttgatcttagggtgggcatagatttcaaggaaagaacacaaaaagcattaacaataagagaaaaaatgttaaattcgatttcacaaaaaattttctgctttttaaaaggcatcattcagaaatgactagacaagtcttaaactgggaaaaaaatattctcagctcatatgcatgcaaaaaatttgtaggcagaatatataaagaacacccaaaaatgttctatttcttgttggatggtagttatgctagtgtatacaattgccaagatatgtaaaactgaacacctaaaatttgtgcattttattttatgttaatattataataaacataaaatgaagatcactagagttttatctgatgcttcattgaattcacattattatttttctatgctctttactacttttcgagaaaatgtttttgatagctatgtattgttgcatgatatgaatacataaaaactaggctgaactcaaaaaaattttaaagtacagataaattttcttttatctctggatatcttgttttgtttgcatttctgattatgagaacatcatatttaagctgttatttcaagaatatctgtgttcctgattgagcaatgagggttaagattctcttatacttagttgttttctccctccctcccttctttctttctttcccttccttcctttttctctttctctctttctctttctttctttcttttttctttctttcttctttctttttttcttctttctttctttctttccttcttctttttctttctctttctctttgcatctctcttgacttttgtattttacatatatatatatttttcttttcttttttttttttttttttgagatggagtttcactcttcttgcccaggctggagtgcaatggtatgatcttggctcactgcagtctccacctcctgggtccaagagattatcctgcctcagcctcccgagtagctgggattacaggcatgtgccaccacatctgggtaattttgtatttttaatggagacagcgtttcaccattttggtcaggctggtctcgaactcctgacctcaagggacccatccaccttggcctctcaaactgctgggattacaggcatgagctactgcgcccggacccatatttttattttgaaaaaattcaatcttacagaaaagtaggattaaagtagaatataatgaagaacgtatattcttcacctagattcgccaattcttaacactttgccacatttgcattctgtgtgtgtgtattcacacagtttttttttaagtttcagatgtttcttcagtatgtggaaacaagctaatatattgcataacaaaattattactctctcaaaatttaacactgatgcactaataccaaatagagattacacattcaaatttttcccacgtgccagaaacattctttacacttaaaaaaatgcaggccccaagcaaatataatgcatacattagttattggatatccttagtctcctttattttagaaaaagccctctactttttaaaatgtctgacatacattgatattttgaggagtccaaatcaattgtcttatagaatagtctacwcctggatttttctgattatttactcatgattaggttcaggacaaacatttttggcaagaatactttaaaggtgatgtgtataatctgttatattatataatgtgcattatacaaagattggtgatgttaagttttatatttttggtaaggtattttcaccagatttctctctttttggagctgaaaagtattaagtgaggcgattgtatgaatatcctgtcctccaataatccctcacgcaatagcatta

SEQ ID NO: 686850 - DNA, 644 bp, Homo sapiens
gattccatttccaggttcaattctgtctgagtctgccacatcccactaaaattatttaatattcagattaacctaataagtggaacatattttatctaatagtacatctgtattaagaaagtatactatttacctttcacacagctactccatatttacatgaataatggattaatttgtggttggtaataatgagccttactgcattactcagactactttttgttgtaagactctttaggggcattattataatttgcaaagagtaagcttaactagkaattctatacataatttctaattccttcttatatattaacatctgatcaatatagtaattattattctcaaagttcaaaatattatgcttatttaaatataatacattttttgataaacagttgatatttaaaaggtttcattccagaagtgatttttcctttcttccacccttagttgattggcctgtgattagactggattgaatatgaaacttccaaatttgctagagtactgagttactgaccatctcaaatatatgtgtatgtaaaaaatgtatacacacatatgtgtatgtatgtgtgtgtgtatgtgtgagtgggggaagagagagagaaaaaaatgcacaaatcagaatctagcat

SEQ ID NO: 686851 - DNA, 605 bp, Homo sapiens
aaggctgggaaaataacagtactgaaggagacagtgtgatcagataaaagtcacctaagttactaatatagtttgtatctgtgtccttgcccaaatctcatgttgaattgtaatccccaatgttggaggtggggcttgggaggaggtaattagatcatgggggmagattttccccttcgtactgtgttgccatagtgagtgagtactcatgagatctggttgtttaaaaatatgtagtacctgacacctctctctcggtcctattcctgtgatgaatacgacctgctcccacttcgccttccaccatgattgtgagtttcctgaggcctccccagaagcagatgttgctatgcttcctgtacaggctgcagaactgcaagtcaattgaacctcttttcttcataaattgcccaatctcaggtatttcgttatagcagtgtgagaagagactaatacagtcaccaagcagggacaatgaaatttcctgaatgtgattgcctcttttctggtggtgagcacgaaattgctacaagcaagtaaggcaggcaattgggagaaaaaaatgcaaagtaaaggtaagtatagataaacagcatctcacagga

SEQ ID NO: 686852 - DNA, 749 bp, Homo sapiens
aaatcagtaaaattttaaaattccgaatttttttcagtagttttatacaaatgcatgcagtagtatatagtcaagatcttaaatattaaactgggatattttttcacaattttatagctctagatgattttagttgatataagatcttggcattaamtaacattgaatctgatgatgatgtcatttaatcgcttcagtttgctttcagtatacctgattacttatatatgtttggttccagtttttaatacttttttttttatgataacagtttctagctggaacttttaaaagactagtttctgttcttctgttttcagttgagttttttagtttttgttaccttctattcttttgttgccttttatttgtgacaaatgattcttttcaaaggggttcataccatttcatatcatcctattctgaggccctggataggaaggcacttttatgtattctggagtgtctgttcatagcgtggcaagcagaactgcccactttttaaaaattactatttctttttccttattcattcatgtattaatttattaatttttttccaaggacatatcattgatttcatataagctaaagtcatattaaaatgccacttctctttagaaatgaggttgtagatttttttcatgtatttttcatttgcattttctcatctgtaagtttcttgttcatatcatttctctatttttctattagatcatttgtctttttccttttcaatttgtgggtta

SEQ ID NO: 686853 - DNA, 1434 bp, Homo sapiens
ccagcgtttcttaatgaggattggtggtattatatctctaacaggcatttggaagagtgtgaagatgtaaagatgttttagttgtcacaatagctgggggatatggtcataatttagtgggtggcaccagggatgaaaaacaccctgcaaagcatgtgagactattcttacaacaaaaaaattaccctccccaatgtcccagcagtgttcacgttgagaaacacttatttaagccatgattgtgttcatggcacactttacacaaaatactggaatttttggatgcacattcaaagaaatgcagttgtagtcacatattacwgcatttccttggatgacctttagcactgtcttgctgtttgaatagaagcgtttactgccttgaattccatcccataatctccaccggccaaattctcatttgtttcagtaaacccaaatctttcctaggtgctaagtttgtggatgtatgccacctcttctatgttccttgcagcaatttttgctccactcttcaccacatcttttttccagctttatggaagtaggatcaactacaccacatcttatgacactcagggctgtgagttcagtctgccagacatttctaaaatagctttcattctcagctgtagccaaaactcgatgagcaaaatctggtaccacatttgtgggaaatgtctagcattcaagcccaggaagtcaactgagaatcaatgacatacagaccaacagattttgatttcacatattaacaggtaactttttcagctctttcttttcaccttccatgactttctttaatattttcaccaaaataaacatgagttcttacgaaggacagtttattagcagtcttttagttactactcctttgttatgtccatctttttccaaatgaggtgggctcttatcaatagtgaaacccatcattagttagctgtgccttctatttcctctttcacttagtacacccgcagctaaagtggcttgattgccctagggtgctaatcaaacactttttcaataacagatggttcaacagctgttgacatttgatgaatctacttgttcttattccagaacattttgtttattctcattaaatgcaaagggaagaaatgaaagaaaacacaggagagaacttgcaaactgaagtgttttccagggaactttctggcttaacctatgagccatgaaattagtgatatactaaacaagttgaaaatgttacaatttaaagagcttgacagaatggaaggtggggtgctactcctttgcccatgaatataaggaaacacataaattatggatataaattataactaacatcaatactgcaaataaacctccttaaacaggggttggcaaactgaggctcatggacaaatctagtctgccacccatttatgtatggctcaggaactaagaatg

SEQ ID NO: 686854 - DNA, 1434 bp, Homo sapiens
ccagcgtttcttaatgaggattggtggtattatatctctaacaggcatttggaagagtgtgaagatgtaaagatgttttagttgtcacaatagctgggggatatggtcataatttagtgggtggcaccagggatgaaaaacaccctgcaaagcatgtgagactattcttacaacaaaaaaattaccctccccaatgtcccagcagtgttcacgttgagaaacacttatttaagccatgattgtgttcatggcacactttacacaaaatactggaatttttggatgcacattcaaagaaatgcagttgtagtcacatattactgcatttccttggatgacctttagcactgtcttgctgtttgaatagaagcgtttactgccttgaattccatcccataatctccacsggccaaattctcatttgtttcagtaaacccaaatctttcctaggtgctaagtttgtggatgtatgccacctcttctatgttccttgcagcaatttttgctccactcttcaccacatcttttttccagctttatggaagtaggatcaactacaccacatcttatgacactcagggctgtgagttcagtctgccagacatttctaaaatagctttcattctcagctgtagccaaaactcgatgagcaaaatctggtaccacatttgtgggaaatgtctagcattcaagcccaggaagtcaactgagaatcaatgacatacagaccaacagattttgatttcacatattaacaggtaactttttcagctctttcttttcaccttccatgactttctttaatattttcaccaaaataaacatgagttcttacgaaggacagtttattagcagtcttttagttactactcctttgttatgtccatctttttccaaatgaggtgggctcttatcaatagtgaaacccatcattagttagctgtgccttctatttcctctttcacttagtacacccgcagctaaagtggcttgattgccctagggtgctaatcaaacactttttcaataacagatggttcaacagctgttgacatttgatgaatctacttgttcttattccagaacattttgtttattctcattaaatgcaaagggaagaaatgaaagaaaacacaggagagaacttgcaaactgaagtgttttccagggaactttctggcttaacctatgagccatgaaattagtgatatactaaacaagttgaaaatgttacaatttaaagagcttgacagaatggaaggtggggtgctactcctttgcccatgaatataaggaaacacataaattatggatataaattataactaacatcaatactgcaaataaacctccttaaacaggggttggcaaactgaggctcatggacaaatctagtctgccacccatttatgtatggctcaggaactaagaatg

SEQ ID NO: 686855 - DNA, 615 bp, Homo sapiens
ggaaaacattgatttgctatcaagacgtctcaaatgagcaatggataagagatagaatttcaaagagggggtctctcagagaatgaagatttcttgatatggtaaagaaaaagagggtgataaaatagattttaaaattctctactattcagtaaawtttactttatttctacttgtatattaggactatatattaacaaccaaaattatagttgagttttgatttgacccaatttgaacatgtttgtgtttagtgggaattgaacaaagtttgagttattgtgatcactgatacctttttttttttacctcttttaaaattttatttttgttccacatttggaacaagttttttgtatttttctagattgctatgtttttgcttttatgtttgcctttatgttttacaaaagagcttcttatttatccaaattttaaaatcaaacgggaaatgctaacatatgagaagtttaacacaattttattttatctgcctctaccagatatattagtctttggggagactgtttttgatcaaaattgtttttataacattgtattctttttaaaaatataacagctttattgaaacataattcacatagctcacctttt

SEQ ID NO: 686856 - DNA, 1263 bp, Homo sapiens
tgcagctccaatttcctttataaaagagatcacttgattgaaaaaacaaaaaaaatgcttcttcaggcttctggataaaaatggcagagtgaaaataggcatttacgtttgctcccttctgcatagaaactgaaactatgggacagatgttattgacactaaagaccaaacagaaaataggcaaaaagaataaagcagcagaaaaaaattgtaaaactgagctgtaaatagacaagaagcaatttacctaggctagagtgctgaatcccaaagaagttttaagggtagcacagaaatggcccaatttacaccacagaaattaactaacactgacaatcttaagtatcagtggcacctagtgcctctgaagtagaggtggaggtaaaactacaaagaagagcattaactagaagtttgtttaagaagttgttagtgcccaatccccgtcccctattccatgcaaccgatgtctttctttctccaatacttgcagaagaggaaaggtttattctctaaagatagtaaaatcaggcaatcaggcaattttcagactaaagaaagttgggcagataagggtaggagtactatactgaaaacaggtgaattacgtaaaatatttatatctagactaccgaagccacttcagactcatatataccactgcctaaatgtaagaaataaaattataaaaatcttagacaaaaacctaagtatatcttcacaaccttaaaatagacaatgatttattagctatgacaccaaatgcacaagcaatccaagaaaaaatatatataaattgaacttaatcaaaattaaaaattttgactggaaagaacattatcaagaaagtgaaaagacaacccacagaatgggagaaaatattggcaaattatatgcctgataactgyctatatattaatatattctttataatataaatattatattaagaaatttaaaattgaataagaaaacaatccagttaaaatgggcaaaggatttgagtagacatttctttaaagaagatataccaatggccaattatcacacgaaaagatacttaacatcattagctgttagagaaatactaaccaaaaccccaatgagatgcctatgtccactagaatggctagaatcaaaaggaaataataacaagttttggtgagactgtagagaaattggagccctcacccattgttggtgggaatataaaatgatgtggcttctttggaaaccagtttaacatttacttaaaatgataaa

SEQ ID NO: 686857 - DNA, 640 bp, Homo sapiens
tgtgccatataaatgtgtgcacatatctgaaggaaattattagtttccttcagtagacattttcacttagtcaccatgagcattttacatttttcctatctcgtgtgaaataataagcctggccttactatgtgaaaagctaactcagctgaccttggcaggcaatggcaatgaaagttaccaccaaagcgttttcctctaatccagtggttctcagcctttgtcttaccctggaactcagggaactttacgtagtactgatgcctgggacccarccccagatttgctcatttaattggtttgggggcagtctaagtattgggtgttgtagaagcttcccagatggctctagtgcacagccaaggttgagaactctcgccaaaccttctttcatggaggtgaagtgcgagtggggtttttgaaggtcagattcactcaccacatgaaaccaggatgttagtagtgcttcttgaaaaataagtgtttcaatgccaaatacattttagaagttctgggttaaacaacagcaaataataaacaacctttgtttgctagaggatttataggacttttaagggcctttggtatgttaatggacattgaaactctcaaagagggggaattttacatggagcctttc

SEQ ID NO: 686858 - DNA, 660 bp, Homo sapiens
tattcatgttaggtctatttgtcatcatgactttaactagcgtaagtataaataaagatgtttttctctgcttatagagggcaaagagaccatttcccccttctctcttaaaatggtttcttggagccataataaatctgagcttttattctaacctttgtaataaagataaatctttttagatattaagcctaatctttaggttctacaatatagagatatttctaaggtcatgagatagctctttatgtaagagtgtacccctggaattaggtcagaagcatctcaggaggtgagcggaaattgtcacacactttagcatcttcgtctcttgaggaaataagggaagttttaattgctctttctactaccttactgtagaaatttgtgygaaattctgtccagactttgtagtcacatttttatgacctcacatgtgtataaatcctctaatgcttcccagtaatagtgttctatttctttcttcaatattggtgtggaagagtctttttgttggcatgattattttatgtcccccaacaactgactagaaattgacatcagaagtagggctctactttaacaaaaaatgaaaatatgtgggttctgcttagtggtcaagcatctgctgaggagtaaacaaatattcagaggctagaa

SEQ ID NO: 686859 - DNA, 616 bp, Homo sapiens
ttggcagcactttgtcaactgaatcaaggagatactgaactataattccaagttttaatggtgctgaaaggacacataagagactacctcagtgctctgtttaaagagaaattaataatgcttcctattttatgaattgcatcatttatacacatagatcttcaaacaaaggtttgttgcttgataatctgaagtgagaagtattgrcttatcaagagaaataatttatactagggagagaaaagttagcaattgtagagctacatgcaaataacaaaataactattaccattgataattattcaattcattagttaatttattcttcactcatttcatatgtttatatgcagtgcctgtgatgcctgcaagatattatgctaaggttcctgggaaacacaaaggtaggtaaaggtaggtaaaggtgggtaaggttcctgggaaacacaaaggtaggtaaagccacttctgccctcaacaagctagctcctagttttttaagaactaagtgatggatattcagcagggaattttgattcagtaggaggggacagcactcagtcacttctggagaaaagggttaggtggcacattttccctctgtactcgttttgta

SEQ ID NO: 686860 - DNA, 616 bp, Homo sapiens
ttggcagcactttgtcaactgaatcaaggagatactgaactataattccaagttttaatggtgctgaaaggacacataagagactacctcagtgctctgtttaaagagaaattaataatgcttcctattttatgaattgcatcatttatacacatagatcttcaaacaaaggtttgttgcttgataatctgaagtgagaagtattgacttatcaagagaaataatttatactagggagagaraagttagcaattgtagagctacatgcaaataacaaaataactattaccattgataattattcaattcattagttaatttattcttcactcatttcatatgtttatatgcagtgcctgtgatgcctgcaagatattatgctaaggttcctgggaaacacaaaggtaggtaaaggtaggtaaaggtgggtaaggttcctgggaaacacaaaggtaggtaaagccacttctgccctcaacaagctagctcctagttttttaagaactaagtgatggatattcagcagggaattttgattcagtaggaggggacagcactcagtcacttctggagaaaagggttaggtggcacattttccctctgtactcgttttgta

SEQ ID NO: 686861 - DNA, 616 bp, Homo sapiens
ttggcagcactttgtcaactgaatcaaggagatactgaactataattccaagttttaatggtgctgaaaggacacataagagactacctcagtgctctgtttaaagagaaattaataatgcttcctattttatgaattgcatcatttatacacatagatcttcaaacaaaggtttgttgcttgataatctgaagtgagaagtattgacttatcaagagaaataatttatactagggagagaaaagttagcaattgtagagctacatgcaaataacaaaataactrttaccattgataattattcaattcattagttaatttattcttcactcatttcatatgtttatatgcagtgcctgtgatgcctgcaagatattatgctaaggttcctgggaaacacaaaggtaggtaaaggtaggtaaaggtgggtaaggttcctgggaaacacaaaggtaggtaaagccacttctgccctcaacaagctagctcctagttttttaagaactaagtgatggatattcagcagggaattttgattcagtaggaggggacagcactcagtcacttctggagaaaagggttaggtggcacattttccctctgtactcgttttgta

SEQ ID NO: 686862 - DNA, 1461 bp, Homo sapiens
  misc_feature 206: n = A,T,C or G
ggtgggcagcwtaaattctgccagatcctggggccagtctattgaatcacagaggagtgaagctgccaataagaggctgagacctggaactggatccattccctggtcagggaggcctggggggacgccgaggccagcaggcagaaactggaatcgcaccagtacagcaaagcggacgcagcccctgatgtgactatagggtaatntggcgcagccaggccagtggggtttagggtgtcagcatagagcagggttctggccatggggtggtgcctgaggcaggagagttggcaggaacaaggcaggtcccagtgttcaatacgctgagaaacttggcagcatcaagataggaactaagatggcaattcagggatcaatggtggtatagtcaaggcggtgttgcctaatggttatgagcataggcttcaatgtgagacaaatctgggtttaaacccccactcagccacttcaaagccgtgtgaacttgtgtgaatttcccagcctcccctagcctcactttcctcacaggcgaaaaggataatgatacttatccacaaggtagttagttacaaggatgaaatgaaatgtgctatgtgtgtgtttggcactgtatgacctatgacaactgctattattgttttagaaatattatttattctggtgggtcttgggaataaggcagcttcctggaaatcatacctggggcaaaggccagagccaggcccatcacatgggtgaccagtcgcccagcccttcagtccctactgcctctggtagggctggggagaaaggaggattgtagatatgaggaattaggccaggtagaacagcagctccccaaaacctaagcataagttgtgaggaggttattgtcctctaatgacagcaattacagggcctgctggaagtttctcacccagccacctcctcccctctctcagggtctctgcccgagccgttccctctgtccagcctgctccttccacaatctttgccaggttggctcctttttgccactgataaattttgactgtcattttcccagagaagcccttcctgactactccatctaaagctgcccccagttatagagccctccacccagctacaatgggatactcatttttttcaaatgtaaatggatcattcactaccgtaggccatatgctggtcataaatcatgtctcaataagttaaaaggattgaaattatgcagagtatattctttgaccacaacaaagtgaaaaatcattaaccaagaaaaatctaggaaatctccaagatttgggaattaaataatactttcctgaacaagccatgggtcaaacaagtcataagagaaattagaaaatattttcaagtgaattataatgaaaatacaacataacaaaatttgtggggttcagctaaagcaatgctttagggcgaaagtgttagctttaaatgcctacatttagaaat

SEQ ID NO: 686863 - DNA, 1461 bp, Homo sapiens
  misc_feature 206: n = A,T,C or G
ggtgggcagcataaattctgccagatcctggggccagtctattgaatcacagaggagtgaagctgccaataagaggctgagacctggaactggatccattccctggtcagggaggcctggggggacgccgaggccagcaggcagaaactggaatcgcaccagtmcagcaaagcggacgcagcccctgatgtgactatagggtaatntggcgcagccaggccagtggggtttagggtgtcagcatagagcagggttctggccatggggtggtgcctgaggcaggagagttggcaggaacaaggcaggtcccagtgttcaatacgctgagaaacttggcagcatcaagataggaactaagatggcaattcagggatcaatggtggtatagtcaaggcggtgttgcctaatggttatgagcataggcttcaatgtgagacaaatctgggtttaaacccccactcagccacttcaaagccgtgtgaacttgtgtgaatttcccagcctcccctagcctcactttcctcacaggcgaaaaggataatgatacttatccacaaggtagttagttacaaggatgaaatgaaatgtgctatgtgtgtgtttggcactgtatgacctatgacaactgctattattgttttagaaatattatttattctggtgggtcttgggaataaggcagcttcctggaaatcatacctggggcaaaggccagagccaggcccatcacatgggtgaccagtcgcccagcccttcagtccctactgcctctggtagggctggggagaaaggaggattgtagatatgaggaattaggccaggtagaacagcagctccccaaaacctaagcataagttgtgaggaggttattgtcctctaatgacagcaattacagggcctgctggaagtttctcacccagccacctcctcccctctctcagggtctctgcccgagccgttccctctgtccagcctgctccttccacaatctttgccaggttggctcctttttgccactgataaattttgactgtcattttcccagagaagcccttcctgactactccatctaaagctgcccccagttatagagccctccacccagctacaatgggatactcatttttttcaaatgtaaatggatcattcactaccgtaggccatatgctggtcataaatcatgtctcaataagttaaaaggattgaaattatgcagagtatattctttgaccacaacaaagtgaaaaatcattaaccaagaaaaatctaggaaatctccaagatttgggaattaaataatactttcctgaacaagccatgggtcaaacaagtcataagagaaattagaaaatattttcaagtgaattataatgaaaatacaacataacaaaatttgtggggttcagctaaagcaatgctttagggcgaaagtgttagctttaaatgcctacatttagaaat

SEQ ID NO: 686864 - DNA, 1141 bp, Homo sapiens
ttttgagacagaatctcgctctgtcgaccaggctggagtgcagtggtgtgatctcggctcactgcaacctctgcctgccgggttcaagtgactctcctgcctcggtctcccaagcagtgtggactacaggcgtgtgccaccacccccagctaatttttgaatttttagtagagacgggatttcaccatgttggttggctaggatggtctcaatctcttgacttcatgatccacctgcctcggtctcccaaagttctgggattacaggcatgagtcactgggtccggccctccactatgaatttttaatgaaccctgaggatgcatcttagattagtaacctttccagattcactacatttgcctggtttttattgagtggatctctcacgacaaaatcatgaatattacactgaaaggcttattacattatctttgtgtagttactctccagtataaaccctgtgatgttccggttttgatgcctgggtaaaagcttaagcatgcacgttacatttgtatggtttcatcaaaaaagtttttgatgcctagtgagactttggcctgcggaaaatctctatcacatataattattataaatgctctttagtatggattctctgatgttgatgaatgtttgaagtcataatggtttcccactctcagtgtttttgtttctctcaagcatgaatttttgcaatattgtacaatgtgagaattgtgccagaagaccttgccacattcattacatttgttaggtttctcaccagcaagaattctttgaaraatcctggtctcagattttaccttaagaccttgccacattcagtacattagtaaagtttctgtcctctatggtctagctaacggttattaagccttgaacaaaaactaaaggctctgctacattcattatacttgcaaagtttttctccagtataaattattgtatgtcttacaaggctttaatgctaactgaacactctgccacattaattacatgtgttagatttctttccggcatgaaatctctgatgacgtacaagatatgaattgtcgcggaagagtttgccacattcattacatttgaaatgtttctctccagtgtggatcgcatgatgattagtgaggcttgaacgcata

SEQ ID NO: 686865 - DNA, 442 bp, Homo sapiens
aaggaagacgggcgagaatttccaggtctgtggggaccccacgtcccagggacagaagcggcggggacctgggaagcggagacttaatgcaacacagagcaaaactcaccatggcgacgtgaccttcactccacccgatccgcttccgggtttgcgttaatctccgcgcgcaggacggaagccaggcctgggcgggaggtgggaggaggtgggcggggcctgggcraggtagcggcggggcgcgaggcgctgagaccttgccctttagaaccggcagagggcggggccggggcggggccggggcgggacttgcgcgtctttcagcctctctcctagcgtctctgtttttaggttgtggaggcgagagcgccagaaagtctgaggcatgattccaaagccctggaattgtctggaaccgggatgcaaactagaatgtgaaatg

SEQ ID NO: 686866 - DNA, 689 bp, Homo sapiens
tgtgagggaagaatcacggaaagagagtatcattagaccaaaaagtcgctgtatcttagatatagacatgatgacattcagcttggtctaaagttgtccaactataaatactattaatataccaagaattcagaacaatttttcttttttttaaggtcatttgacttcttcaagcttctgtaccacactaaaaaattctgagtattcagaaacatttttatttgacaaaccaactcagtaaacttgggaaccaataattaaaatggatacatgttttaattactttttttaatgaacatgaaattctttgagaaattgtgtctgaggttcttcattttttatctacatttcttctcttggattcagtgataacagaagatataagttctatttagtcaaaaaataataggktattgataaatgtattcccagagccactggtgatttttttcctctctgctgtttggtaaggaaagaaagcacactttttgttatttataaaacagtttgagtttgcaagtctagtcatggataaatgatatttacttccaattagcatctgttttgtgaatggcaaggggcatatgttggggctgtgtacatttttggtcaatattaacaacttaaggctttggcttcattctgtcgtaaaagtgaatatttttcttataaatgctgaatgaatagaa

SEQ ID NO: 686867 - DNA, 689 bp, Homo sapiens
tgtgagggaagaatcacggaaagagagtatcattagaccaaaaagtcgctgtatcttagatatagacatgatgacattcagcttggtctaaagttgtccaactataaatactattaatataccaagaattcagaacaatttttcttttttttaaggtcatttgacttcttcaagcttctgtaccacactaaaaaattctgagtattcagaaacatttttatttgacaaaccaactcagtaaacttgggaaccaataattaaaatggatacatgttttaattactttttttaatgaacatgaaattctttgagaaattgtgtctgaggttcttcattttttatctacatttcttctcttggattcagtgataacagaagatataagttctatttagtcaaaaaataataggttattgataaatgtattcccagagccactggtgatttttttcctctctgctgtttggtaaggaaagaaagcacactttttgttatttataaaacagtttgagtttgcaagtctagtcatggataaatgatatttacttccaattagcatctgttttgtgaatggcaaggggcatatgttggggmtgtgtacatttttggtcaatattaacaacttaaggctttggcttcattctgtcgtaaaagtgaatatttttcttataaatgctgaatgaatagaa

SEQ ID NO: 686868 - DNA, 587 bp, Homo sapiens
catttatttatgaacatatgaatgtatacatgcatgtatttgtatatgtatggatggattatgtatggggacttaaagtgagcatgtggtcactgtatatctcattgttttatggaaaagtgccagttacaaataacggaccrataaataactgtttaaatcaggtctgttcttgaactgggaggttaaagaattctaggaatatattgtacagtaaattatgattcatttgaaaaagaatttgagtattcaaggcaaagcaaatgctgggtggaagaagttccaagaacataaaatttaacacagcattaagatatttgtaagtgagacttgtccggaaattgtatgggtttcttgaaaggaatctactccaggggcatggagatagagatgagagatcacctttctggtgtctgtctaaaaaattcttcagccgggcgcggtggctcacgcctgtaatcccagcactttgggaggccaaggcaggcggatcagaaggtcaggagattgagaccatcctggctaacacggtgaaaacccatctctactaaaaatacaaaaaaaaaaaaaaaaaaaaaattagctgg

SEQ ID NO: 686869 - DNA, 587 bp, Homo sapiens
catttatttatgaacatatgaatgtatacatgcatgtatttgtatatgtatggatggattatgtatggggacttaaagtgagcatgtggtcactgtatatctcattgttttatggaaaagtgccagttacaaataacggaccaataaataactgtttaaatcaggtctgttcttgaactgggaggttaaagaattctaggaatatattgtacagtaaattatgattcrtttgaaaaagaatttgagtattcaaggcaaagcaaatgctgggtggaagaagttccaagaacataaaatttaacacagcattaagatatttgtaagtgagacttgtccggaaattgtatgggtttcttgaaaggaatctactccaggggcatggagatagagatgagagatcacctttctggtgtctgtctaaaaaattcttcagccgggcgcggtggctcacgcctgtaatcccagcactttgggaggccaaggcaggcggatcagaaggtcaggagattgagaccatcctggctaacacggtgaaaacccatctctactaaaaatacaaaaaaaaaaaaaaaaaaaaaattagctgg

SEQ ID NO: 686870 - DNA, 587 bp, Homo sapiens
catttatttatgaacatatgaatgtatacatgcatgtatttgtatatgtatggatggattatgtatggggacttaaagtgagcatgtggtcactgtatatctcattgttttatggaaaagtgccagttacaaataacggaccaataaataactgtttaaatcaggtctgttcttgaactgggaggttaaagaattctaggaatatattgtacagtaaattatgattcatttgaaaaakaatttgagtattcaaggcaaagcaaatgctgggtggaagaagttccaagaacataaaatttaacacagcattaagatatttgtaagtgagacttgtccggaaattgtatgggtttcttgaaaggaatctactccaggggcatggagatagagatgagagatcacctttctggtgtctgtctaaaaaattcttcagccgggcgcggtggctcacgcctgtaatcccagcactttgggaggccaaggcaggcggatcagaaggtcaggagattgagaccatcctggctaacacggtgaaaacccatctctactaaaaatacaaaaaaaaaaaaaaaaaaaaaattagctgg

SEQ ID NO: 686871 - DNA, 711 bp, Homo sapiens
aggttaaattatctaagaattccgtgttaagattataaaggagaaataataacatatttgttatacaaagggaggcttgggactgtgctggattttcagggctatagctagccttgatcctctctgtggtattgattttacgtggtctttgaaaattacagatgctacttactgcagtcaccaaataaatatgaagattgcatttgccacttttatacttcaaacaatttagttggctgcttagagctttagactgttagaccatgtctaacagtccacaacttgtccctctactaggccccagggactttcctccaacactactcagtctataattaaaggatatgagaacattaagtgatattattttattacactagtaatatagggtaataacaaaataggtcccaattttaaaaaaacagaaacagaagtattatgatgccagttatctagaaaactaaaagaattatttggtttgtgtaaaaagtgtatttaatctcaataagatatacgctatggccatacaaagggggttagatgtggaatgttatgcagtaggtgackgtaaaagaaacaatgatttactctcttttttaaaaaagtgaattaatattttatattcttatctccaaatgtgaggaaataattttcaacctctcagagaatttctgaattatgtattcagtgtttagagggaaagatgtttcc

SEQ ID NO: 686872 - DNA, 1143 bp, Homo sapiens
gtgtccctacctaaatctcaccttgaattgtaatccctataatccccacatgtcaagagccagaccaggtgcaggtaattagatcatggggacggtttcccctgtactgttcttgtgatagtgagtgagtctcacgagatgtgatggttttataagtgtctggcatttcccctgcttgcactcattctctctcctgccaccctgtgaagaggtgccttctgccatgattgtaagtttcctgaggcctccccagccatacggaactgtgagtcgattaactcttttctttataaattacccagtcttgggtatttcttcatagcagcatgagaatggactaacacactaggtatctacccaaaggaaaataaatcgttctaccaaaaagatacatgcacttatatgttcatcgcagcattattcacaataacaaagacaaggaatcagcctagtgcctatcaatggtagactggacaaagaaaatgtggcacatgcacactatggaatagtgccatggggcaggctggtctagacagcagggggatgttttcaggattaaaggttcccccaacctagtcctgaacacatcaggtgctggagcacctgtgttcccatgagggcagcgtgggccatgcatgacttcagaagaccctcaaggcttgactaagtacaccagtttcattctgaacatgctgctctaaaacacatccctgttgaaccacagcaggatcagatatgtgagcttctggcctactgatgctcaagagccagggcatgcagggaagactccagaactcctaactcttgctaaccttacatctgggattcttacgccctcagctaaagaactcratgaatttcaactttgaagaggttcttctaacacttggccatttcaaccaggttttgctaaagtcctctgaaattggggaactgaaagccaattacttggatcacaagttgcctgtgaaatctgcaaggacctgctgtcggggctcattaaaccccaaagtatggcaccttggcatgcggactattctgacccagaggagactggaaggcctcagaagccaggtctttgtccttccctcctggttcctgcccccttttctccccgaaagtgagtcacagaaaccagaattc

SEQ ID NO: 686873 - DNA, 1143 bp, Homo sapiens
gtgtccctacctaaatctcaccttgaattgtaatccctataatccccacatgtcaagagccagaccaggtgcaggtaattagatcatggggacggtttcccctgtactgttcttgtgatagtgagtgagtctcacgagatgtgatggttttataagtgtctggcatttcccctgcttgcactcattctctctcctgccaccctgtgaagaggtgccttctgccatgattgtaagtttcctgaggcctccccagccatacggaactgtgagtcgattaactcttttctttataaattacccagtcttgggtatttcttcatagcagcatgagaatggactaacacactaggtatctacccaaaggaaaataaatcgttctaccaaaaagatacatgcacttatatgttcatcgcagcattattcacaataacaaagacaaggaatcagcctagtgcctatcaatggtagactggacaaagaaaatgtggcacatgcacactatggaatagtgccatggggcaggctggtctagacagcagggggatgttttcaggattaaaggttcccccaacctagtcctgaacacatcaggtgctggagcacctgtgttcccatgagggcagcgtgggccatgcatgacttcagaagaccctcaaggcttgactaagtacaccagtttcattctgaacatgctgctctaaaacacatccctgttgaaccacagcaggatcagatatgtgagcttctggcctactgatgctcaagagccagggcatgcagggaagactccagaactcctaactcttgctaaccttacatctgggattcttacgccctcagctaaagaactcaatgaatttcaactttgaagaggttcttctaacacttggccatttcaaccaggttttgctaaagtcctctgaaattggggaactgaaagccaattacktggatcacaagttgcctgtgaaatctgcaaggacctgctgtcggggctcattaaaccccaaagtatggcaccttggcatgcggactattctgacccagaggagactggaaggcctcagaagccaggtctttgtccttccctcctggttcctgcccccttttctccccgaaagtgagtcacagaaaccagaattc

SEQ ID NO: 686874 - DNA, 1143 bp, Homo sapiens
gtgtccctacctaaatctcaccttgaattgtaatccctataatccccacatgtcaagagccagaccaggtgcaggtaattagatcatggggacggtttcccctgtactgttcttgtgatagtgagtgagtctcacgagatgtgatggttttataagtgtctggcatttcccctgcttgcactcattctctctcctgccaccctgtgaagaggtgccttctgccatgattgtaagtttcctgaggcctccccagccatacggaactgtgagtcgattaactcttttctttataaattacccagtcttgggtatttcttcatagcagcatgagaatggactaacacactaggtatctacccaaaggaaaataaatcgttctaccaaaaagatacatgcacttatatgttcatcgcagcattattcacaataacaaagacaaggaatcagcctagtgcctatcaatggtagactggacaaagaaaatgtggcacatgcacactatggaatagtgccatggggcaggctggtctagacagcagggggatgttttcaggattaaaggttcccccaacctagtcctgaacacatcaggtgctggagcacctgtgttcccatgagggcagcgtgggccatgcatgacttcagaagaccctcaaggcttgactaagtacaccagtttcattctgaacatgctgctctaaaacacatccctgttgaaccacagcaggatcagatatgtgagcttctggcctactgatgctcaagagccagggcatgcagggaagactccagaactcctaactcttgctaaccttacatctgggattcttacgccctcagctaaagaactcaatgaatttcaactttgaagaggttcttctaacacttggccatttcaaccaggttttgctaaagtcctctgaaattggggaactgaaagccaattacttggatcacaagttgcctgtgaaatctgcaaggacctgctgtcrgggctcattaaaccccaaagtatggcaccttggcatgcggactattctgacccagaggagactggaaggcctcagaagccaggtctttgtccttccctcctggttcctgcccccttttctccccgaaagtgagtcacagaaaccagaattc

SEQ ID NO: 686875 - DNA, 1217 bp, Homo sapiens
tttctatattgcagattagttgcacttacaaagagacacttatttatctctatcttaaaataacatacttaattattaaaaattttcctcaaatataacataaaaattagagagcaggaagtcttttctctcaaatggtacataacttcaataattacagattctttgtcaagcatcatgttgaacactttatacatattttctatttaatcgttccattattctcattaagacaattaattttattacacttattttatgaatgaataaaaataaatgttcacaatggggtagtatctactaatggtgacataattagcttatcagtaattacatttaactgcaaataacaaatctggraacagtggctaaggtgaaatgagtattttatttttctcacacagaatttgggaagtaggtaaactaggatactaattccttgatgccatcagaattctgaaattttatattttatatgttcagtaacctttagcatgtgctctttggttcataatggaaagacacatgttccaattctagcatctagtgttctttgcagtgaagaaggaaaacaacaaatgtaaaaatattctaactagtcttttctcccattttaagaagagattcccaggagcctcatccaaaaattctcacctctcattattataagcatatgtcatatgctcacccttatatggaaaggaggctgggatgagaaatgcaatttacacagtaaaattgagaactttgctaacaacaaagtaagaatgccgtaaggaagatattaaaggaacatcagagagtaaggaaaaaaggggagtcaggaagaaaggaaggagaaaaggtttttgttgttgttaattttgtgtgtgtgtttgtgtgtgtgtgtgtgtgtgtgtgtgtgtgtgtgttcaaaccagaaatgttagctctaaattctgaagggactgagctaggtcttgaagccaaggttttctaattctaaacctaagactactagttagtaaattaaagaatgtcacatggatttcctgagatttagacacattagagcttaaatataatataaataacagtaaacactgaatgtacaattgtgtaagtcttaccaaaaaaaccatagtggattataaaggatacatggagttccttgtatatttttttcttaaaattgtaatgataactataaagcattatatgataactgttagaaatca

SEQ ID NO: 686876 - DNA, 657 bp, Homo sapiens
aagattaagtcttttaccatgcaaagttgactctgttaatggagaactctcaggtacattttaacatgggtatatttttcttattgttttccagagccactgggaaattattcttggctcttcacagtgagaatcttgtgggattgctaaaggatacatgcgtaaatgtgtgcccccctccccccaagactgaagtcacctgtagtttctcactttcaatgcagtccacaagaagtctgtagaaacttatcagaattaccatttaagtattccacccagtttatgcctctagctgacagaacttctgcttcaggtaagaccttggccgttactcttgatttgcctgtgtgtccaggtttcataagggtggtttaccctacaagctctgttatctaatgggtaygaaaaatatgttgatcttcagtttgttctaatattagtttttgtaatgatggaagtgacaagtttcaagttgtttatatattgaagctgaaatgaaactccaagtatgtgagttataatttggaatttataggaatctgtcaaaactagcaagacataaaagaagacacaacaatacaaccaaaaccaaataaaaagagaggaaataaaagctacagtagatctaaataactagattcattcgtcatggacttt

SEQ ID NO: 686877 - DNA, 710 bp, Homo sapiens
  misc_feature 262, 263, 264, 265, 266, 267, 268, 269, 270, 271, 272, 273,274, 275, 276, 277, 278, 279, 280, 281, 282, 283, 284, 285,286, 287, 288, 289, 290, 291, 292, 293, 294, 295, 296, 297,298, 299, 300, 301, 302, 303, 304, 305, 306, 307, 308: n = A,T,C or G
  misc_feature 309, 310, 311, 312, 313, 314, 315, 316, 317, 318, 319, 320,321, 322, 323, 324, 325, 326, 327, 328, 329, 330, 331, 332,333, 334, 335, 336, 337, 338, 339, 340, 341, 342, 343, 344,345, 346, 347, 348, 349, 350, 351, 352, 353, 354, 355: n = A,T,C or G
  misc_feature 356, 357, 358, 359, 360, 361: n = A,T,C or G
cacaacattagttattttaagcaaaagacaggaacacaattagagtgagcactgcattcaatggaaaagtcattagcagtaataacaawgtatgattttacttcttcattctttactagttttattgaaatgacaaaagccagctaaaacacaagacacaggaaagataaaattaaaaagtattatgcaaaaaagttatgcaaaaatataacaacatttgattaagttcatatgattacaaaattcatcaatgtttatatgnnnnnnnnnnnnnnnnnnnnnnnnnnnnnnnnnnnnnnnnnnnnnnnnnnnnnnnnnnnnnnnnnnnnnnnnnnnnnnnnnnnnnnnnnnnnnnnnnnnntatcactttaccagagcttttaggaaatagcattactgtaataaaaggaatcataacaaactggatattatggaatttaacttaggcaaataaaataaaactatcatgttgaaaatagtaattattttactattttatatgaaaaaatatgaattgtcagagttattgatatgtttgggagagtatcaatcttttcagggcaaaggaacataatatgactcagaggacaatggaaaatcacatttttgagagttaattttagtcagatattaaaaggttttgaatgtgatgcaagaaaaatttttactttcttttgaaggcaatcaggattcatggaactattttaaac

SEQ ID NO: 686878 - DNA, 1313 bp, Homo sapiens
gtgactcttcttaaatggacacaaatcctgttagatcagaactttgcccttatgacatcatttaacctaaatcacctccttataggtccagccttcaaataccctcatattgtactttagggctttaacacatgaatttgtgagggacagagttcagtcaatagcactagctatctataagcaccatacctgagtagttttcttatttaattaagtggagaataacaagatgggctaaaaatccacaatttgccatgagtcacagaggctatttacagagtagactttccttagaaatataaagaaattagaaactttagttatcatctatcctttaagagaggagtattttcatatcctaagggggaaaagaatgttagcacttcaaagattctggagtgagggaaggtgcttcaaataacaacaacagtaataataataacaagaataatcatgatttaatcattatagatgcaacaagactttagttcttaaattgtttcctatcaggcattatwtatagtcttagaaagtattgagagtccaaaaatttgtattcatgttagacctattaaaatttataatattagaaattcaatctgaaaaaatattaaatactactaattaattcactttaaagaataataaaccattatataaataacattatttattaaaatagatatgtattttatataactacttttaattatgtaaaatacctaaagaaagtagatagtgaaaacagtgacattgttttacataatagttctgcaaatctcttaaatagcttgcttaatgagaccatctggatccatacacatccttttgtattcaatctattgcagtatcacccacctggtagcctgtagaaaagtctacatttatgggggaatgtgaatgaaaaagtatcatcatgacagtagtttgatttctggagcccctagaagtttattggaaaatcctgttagtgctggtatgttaaaatctgcaatagtgatactatgatagtttaactgttcagtagatagtttaactgttttatagctaacatagagacagaaacaatgagtatacttagaaagagtcaatgtcagttgatatattggactaccccttggtgctgatcataatattctgtaacctccatgtttgatattgacaagatttttctctattgtctgaagcaagggcatgattcattacctcgcctgtgaatcctcttcaagaaccttccgtacatggatggggatagttaaatataagtttaaagaatactgtaacctattttcttcatacagagctgattaagg

SEQ ID NO: 686879 - DNA, 2036 bp, Homo sapiens
tatcaaacaaggtcatgctggcaaagaacaaagcacacagctcgcacaagggaggtactcaggatgagatggtgatggcgatgagatgaccaccatcgaaacactgcaaagcccctccacagcgaagacaataatgatgaccatcatgggggtggtgcaggccctggagactgtgaagaccatcatgatgatgatgatgaccatcgtgggggtggtgagaaccctggagactgtgaagccctggcatggtgatgatgatgaccatgaccatcgtgggggtggtggtgaccctggagactgtgaagcccgtcatgatgaagacaatgacgatgaccatcgtgggggtggtggggacctggagactgtgaagccccagcatcatgatgatgatgatgaccatcgtgggggtggtacaggccctggatactgtggagcccatcattatgatgacaatgaccatcgtgggtgtgatggggaccctggagactgtgaagccccagcatcgtgatgatgatgatgaccatcgtgggggtggtggaggccctggatactgtggagcccgtcacgatgatgacgatgaccatcgtgggggtggtgtaggccctggatactgtgaagcccgtcatgatgaagatgatgacgatgaccatcatgggwgtggtggggaccctggagactgtgaagccccagcatcgtgatgatgataatgaccatcgtgggggtggtggaggtcctggatactgtggagcccatcatggtgatgatgatgatgacgatgaccatcgtgggagtggtgcaggccctggatactgtggagctcgtcatgatgatgatgatgaccatcgtgggggtggtgcaggccctggatactgtgaagcccatcatgatgaagatgatgacgatgaccatcatgggggtgggggggaccctggagactgtgaagcccgtcatgatgaagataacgatgaccatcataggggtggtagggtggtacctaaggtcctgaatattgcaaatcccctaatgcccatggtctccttgaggcagataacctagactttagatagctcggtatttcttacatcacttgtgccagccacaaaggaatttgagaccccactcactcttctggatccttcttgatagaaacttaccctggaataaggtaaatagttttacccattgtattaggtaatgctagttgctgttaaaaaataaatccaacatctcagtgactgaatcttctcacagcttttctcttgcttaggtagctgtccatagcagatatctcctctctgtgttggcccccatctccctgagcctggagtcctctgcattggccagaggagaactcacactgcaggaagccctgtgcttccctgagatgccccacgatgcactgtggggacaaggtggcggctccacctgggtggggggagctgggctgcaaactcctgcccacccccctcccctgcgggctccaggaaagggccatgtatctccagtggacaagccaccatctcagagatgctctccatttctgtcatatattctattattattttctattctcaaagacagcctgatagcagatgtcctcaggattccacaggatgaactgtccctgtagttctgaagtgttgagtctgagtctcctgatgggagacttgttacaggagctgtgccacactgttgggatcacgtcagtgtttcatgccagaaggttccacacagaccattatttaccggagtcagaacagtctcggtgagacggctcctcagctgcttaaccatgccagcgccacccagacagtctcaattctcatggaggttccagtctccatctgtgggcctcggccccaacagctgactgtctgcagcattaacactagaggggctggggtcttcgatgcagcccttttgaatgactccacccttctttctctagggattatttttttctgtgtctcttagatctacgaagccaaaggcctctcagctctggaattagatggaagagcaatcctggttaatga

SEQ ID NO: 686880 - DNA, 2036 bp, Homo sapiens
tatcaaacaaggtcatgctggcaaagaacaaagcacacagctcgcacaagggaggtactcaggatgagatggtgatggcgatgagatgaccaccatcgaaacactgcaaagcccctccacagcgaagacaataatgatgaccatcatgggggtggtgcaggccctggagactgtgaagaccatcatgatgatgatgatgaccatcgtgggggtggtgagaaccctggagactgtgaagccctggcatggtgatgatgatgaccatgaccatcgtgggggtggtggtgaccctggagactgtgaagcccgtcatgatgaagacaatgacgatgaccatcgtgggggtggtggggacctggagactgtgaagccccagcatcatgatgatgatgatgaccatcgtgggggtggtacaggccctggatactgtggagcccatcattatgatgacaatgaccatcgtgggtgtgatggggaccctggagactgtgaagccccagcatcgtgatgatgatgatgaccatcgtgggggtggtggaggccctggatactgtggagcccgtcacgatgatgacgatgaccatcgtgggggtggtgtaggccctggatactgtgaagcccgtcatgatgaagatgatgacgatgaccatcatgggagtgrtggggaccctggagactgtgaagccccagcatcgtgatgatgataatgaccatcgtgggggtggtggaggtcctggatactgtggagcccatcatggtgatgatgatgatgacgatgaccatcgtgggagtggtgcaggccctggatactgtggagctcgtcatgatgatgatgatgaccatcgtgggggtggtgcaggccctggatactgtgaagcccatcatgatgaagatgatgacgatgaccatcatgggggtgggggggaccctggagactgtgaagcccgtcatgatgaagataacgatgaccatcataggggtggtagggtggtacctaaggtcctgaatattgcaaatcccctaatgcccatggtctccttgaggcagataacctagactttagatagctcggtatttcttacatcacttgtgccagccacaaaggaatttgagaccccactcactcttctggatccttcttgatagaaacttaccctggaataaggtaaatagttttacccattgtattaggtaatgctagttgctgttaaaaaataaatccaacatctcagtgactgaatcttctcacagcttttctcttgcttaggtagctgtccatagcagatatctcctctctgtgttggcccccatctccctgagcctggagtcctctgcattggccagaggagaactcacactgcaggaagccctgtgcttccctgagatgccccacgatgcactgtggggacaaggtggcggctccacctgggtggggggagctgggctgcaaactcctgcccacccccctcccctgcgggctccaggaaagggccatgtatctccagtggacaagccaccatctcagagatgctctccatttctgtcatatattctattattattttctattctcaaagacagcctgatagcagatgtcctcaggattccacaggatgaactgtccctgtagttctgaagtgttgagtctgagtctcctgatgggagacttgttacaggagctgtgccacactgttgggatcacgtcagtgtttcatgccagaaggttccacacagaccattatttaccggagtcagaacagtctcggtgagacggctcctcagctgcttaaccatgccagcgccacccagacagtctcaattctcatggaggttccagtctccatctgtgggcctcggccccaacagctgactgtctgcagcattaacactagaggggctggggtcttcgatgcagcccttttgaatgactccacccttctttctctagggattatttttttctgtgtctcttagatctacgaagccaaaggcctctcagctctggaattagatggaagagcaatcctggttaatga

SEQ ID NO: 686881 - DNA, 2036 bp, Homo sapiens
tatcaaacaaggtcatgctggcaaagaacaaagcacacagctcgcacaagggaggtactcaggatgagatggtgatggcgatgagatgaccaccatcgaaacactgcaaagcccctccacagcgaagacaataatgatgaccatcatgggggtggtgcaggccctggagactgtgaagaccatcatgatgatgatgatgaccatcgtgggggtggtgagaaccctggagactgtgaagccctggcatggtgatgatgatgaccatgaccatcgtgggggtggtggtgaccctggagactgtgaagcccgtcatgatgaagacaatgacgatgaccatcgtgggggtggtggggacctggagactgtgaagccccagcatcatgatgatgatgatgaccatcgtgggggtggtacaggccctggatactgtggagcccatcattatgatgacaatgaccatcgtgggtgtgatggggaccctggagactgtgaagccccagcatcgtgatgatgatgatgaccatcgtgggggtggtggaggccctggatactgtggagcccgtcacgatgatgacgatgaccatcgtgggggtggtgtaggccctggatactgtgaagcccgtcatgatgaagatgatgacgatgaccatcatgggagtggtggggaccctggagactgtgaagccccagcatcgtgatgatgatratgaccatcgtgggggtggtggaggtcctggatactgtggagcccatcatggtgatgatgatgatgacgatgaccatcgtgggagtggtgcaggccctggatactgtggagctcgtcatgatgatgatgatgaccatcgtgggggtggtgcaggccctggatactgtgaagcccatcatgatgaagatgatgacgatgaccatcatgggggtgggggggaccctggagactgtgaagcccgtcatgatgaagataacgatgaccatcataggggtggtagggtggtacctaaggtcctgaatattgcaaatcccctaatgcccatggtctccttgaggcagataacctagactttagatagctcggtatttcttacatcacttgtgccagccacaaaggaatttgagaccccactcactcttctggatccttcttgatagaaacttaccctggaataaggtaaatagttttacccattgtattaggtaatgctagttgctgttaaaaaataaatccaacatctcagtgactgaatcttctcacagcttttctcttgcttaggtagctgtccatagcagatatctcctctctgtgttggcccccatctccctgagcctggagtcctctgcattggccagaggagaactcacactgcaggaagccctgtgcttccctgagatgccccacgatgcactgtggggacaaggtggcggctccacctgggtggggggagctgggctgcaaactcctgcccacccccctcccctgcgggctccaggaaagggccatgtatctccagtggacaagccaccatctcagagatgctctccatttctgtcatatattctattattattttctattctcaaagacagcctgatagcagatgtcctcaggattccacaggatgaactgtccctgtagttctgaagtgttgagtctgagtctcctgatgggagacttgttacaggagctgtgccacactgttgggatcacgtcagtgtttcatgccagaaggttccacacagaccattatttaccggagtcagaacagtctcggtgagacggctcctcagctgcttaaccatgccagcgccacccagacagtctcaattctcatggaggttccagtctccatctgtgggcctcggccccaacagctgactgtctgcagcattaacactagaggggctggggtcttcgatgcagcccttttgaatgactccacccttctttctctagggattatttttttctgtgtctcttagatctacgaagccaaaggcctctcagctctggaattagatggaagagcaatcctggttaatga

SEQ ID NO: 686882 - DNA, 641 bp, Homo sapiens
aaaaccaagttcgtgagtaaaaacagtgtgggaggggaagagcagtggacacacaaatctacatggaggtgatttgctttccttcctttctttgttgctgtctttgttttgctctaggagagacagagagcgtctcatctcattctgcagatgatgagcgtggttttgaagccaggtgttctgcactggagggcagctgttgatcttcctcggctgccagcccaggctcatctcgggggtgggggggtttgtggtgggacggccctcgtcctgcctggctccaacgctcagcctcaggggcatacggtgctagctcttggtgctgggcgcctgagaccctgtgtccctcgtcccctcagcctgcggcyccccgctccctgctatgtcttgctggtggagggaaggggtgcgggagcaggtccttctgctggagagtttttggggactcggtgtgaatgcaggagagctggtgagcacactttccctaggggacagctaggaggctcacgagtcgggggggcagggtgggaaaacactttcccccctttttttctttccttctccactgtccagcaggcctgttgtccctgcaggcccgggggagccaccttctagaagttgcataaccttggcctgtttca

SEQ ID NO: 686883 - DNA, 1452 bp, Homo sapiens
gaaagggttggagccttcgccgctggaatgggggaagtgctttcacagtcaaggatgtggccttcctgtgagctatttcacatacctgcattgtaaattcatgagagcgaacagtctttgtgcagcacaaattaatgcaacagtktaacacaaacaattcaaatagaagactgtccttcaaggaaagaaaagtgaagaaatgtggttaatatttgtcttctaaacttgagggaactcttatgccgttgcctaccatatttgttctaggatttcttccatctcgcccaatactgaatatagagcatgagcagccagatcatataaaagtcattacatggccgagaaaaatgtgaaattggtctcagtgccaaacattttggtagtaaaacatcttaaggaaataatacaaaaatgttttaacagccaggtgcagtgacgtgcacctgtggtcccagctccttgggaggtggaagcaggaggattgtttgagcccaggagttcaagtccagcctgggcaacatagggaggccatgtctctaaaaaatattaaaaatgacatcttttaacagcctgattgaccattagtagtggtgatgtatgtacagtaaggctcatctcacctcaaactctttgatgtggaattctagtttgacagcagtttgcatctgtgtacattttccttagcagtgtaggttgcttttctgagtcttgcaaatcatttttactcagaaaatttacaaagaggaatctgaggtttggaagagaaaagggaaggaaagtggcaaaatggaagtgaagtttttaagtgaatcctgggaggaggcagaggaagctaacacccacagagagagctgagggtgatagccttgtatctagagcaacgcccaaacagcagtgcaaatcgatgattactgagggcatccttgaggcattagtgggaccgaagaggtggatgttacccacttccagcctaaaattaaaaggacattgaatatttgggtgacagtttagatgtaggaaaaaaaaaaaaaaaaaaaaaacgcctctttgtgtgtgtattctgtaccaggaagcagataatagaaatcctgcatatctcattcaaatgccaaggaatggtaatccctcaaggcttctagagaacaaagggtgttaaatgggagttaattttgtcatactcatgacccttatgactaatttaaaaggtaagattgccataacagcctttttatttgtgagggtctcccttcatcctggttctccccatcattttctcacaaggagcttttgttcctcatctgtaaatgatccttatcctacaggagggggttgtgaaaacctggctcaggacagatggggaagaattcgtatattttagtacccctgaattaaagcattatacttaggcctaattgttattgactaaacaagaaaataagatgttaatcccta

SEQ ID NO: 686884 - DNA, 2321 bp, Homo sapiens
taaggaataaaacaggaacgtggacaaaggcagtctgttctgaagcctgtacacttaggcacaaagatgtcaaaaagagagacagatttaatgacaaggggccaggctgtaatcccagcactttgggaggctgaggcgggtggatgacctgaggttgggagttcgagaacagcctggccaacgtggcgaaaacccgtctcgactgaaagtacaaaaaaattagccaggagtggtgggttcctgtaatcgcagctacttgagaggctgaggcaggagaatcacttgaggtggaggttgcagtgagctgagatcacgccactgcactccagctggggtgacaaatcgactctgtctcaaaaaaaaaaagatttcatgacaagggctgctattgtttttagaatattatttagttagtatttgactgttcaaatggtatctcaggcttataattacagagtcttaccctccagctgtgcagaaatacttattttttaaatggaaagttattcttaggatttaaggagcttcctgtgaactctgggtggagtggattgatttaacttctcacctgaactgtctgcatgggagatgagtggaagtatgattgcctccgttctagaacacaaagagaagaccaatgattcccagcttccaagtgaccagttccagattccaatcaacaggttcagctcctgatttaatatttgccctgatggtagtaatttagaggaagacacaggtgtgtgtgtgtgtgtgtatgtgtgtgtgtgacacatacacatactcatgtcccttatttaaatacagtcagggccgggtgtggtggctcacgcctttaatcccagcactttgggatccgtccgctgaggcggacagatcatgaggtcaagagtttgagaccagcctggccaacatggtgaaaccctgtctctactaagaatgcaaaaattagtcgggcgtggtggcatgtacctataatcccagctactcgggaggctgaggcaggagaatcacttgaacctaggaggcggaggttgcagtgagccgagatcgcgccactgcactccagcctaagcgacagagcaatactccgtctggggggaagaaattttttttcattaaggccaggcgcagtggctcacacctgtaatctcagcactttgggagaccgatgcaggtggatcacgaggccaggagttcaagaccagcctggccaagatggtgaaaccccgtctctactaaaaatacaaaaattagccaggcatggtggcgggcgcctataatcccagctactcgggaggctgaggcagagaattgcttgaacctgagaggcagaggttgcagtgagccgaggtcgcgccattgtgctcccgcctgggcgacagagcaagactctgtcttaaaacaaaaacaaaaacaaaaacaaaacagtcagaataggagtgcaaagggagaggsaggatgtgtgtgcttgtgatggaagggcagcaatagcaatttggagaagttggccctggccatcatttcttgaaataccaggagactttaaaacaggggtgctcaattttttggctttccttggccacattggaagaagaattatcttgggccacacataaaatacactgacactaacaaaacctgatgagaaaaaaaaaaatccaaaaacatctcataatgttttaagaaagtttacaaatttgttttgggctgcattcaagccatcctgggctgcattaggccggcgggccacaggttgaacaagcttgctttgaaagatgatggacaggccaggggtggtggctcacgcctgtaatcccagcacttcggaaggccgaggcaggcagatcacttgaggtcaggaattctagaccagcctggccaacatgggtgaaagcctgtttctactaaaaatacaaaaaagccgggcatggtggcatatgcacctgtagtcccagctacttgggaggctgaggcaggagaattgctggaacccaagaggtggaggttgcagtgagctgagatcgcaccattgcactccaagctgggcgacagagcgagactctgtctcaaaaaaaaaaaaaaaaaaaaaaaaagatgatggacagttcacagggtaccaggaccagctatgaagagaatgattttagaaggctcagtaagttccatctgtactctcctccctcccacctccatgcacaccttacccaaccctcttagcttccaaaagcaccacttcccttttcactattgaagcaaaatctccagaggtggggcctttgggtccgtatttctctaatagggcctgcagatgagtttga

SEQ ID NO: 686885 - DNA, 2321 bp, Homo sapiens
taaggaataaaacaggaacgtggacaaaggcagtctgttctgaagcctgtacacttaggcacaaagatgtcaaaaagagagacagatttaatgacaaggggccaggctgtaatcccagcactttgggaggctgaggcgggtggatgacctgaggttgggagttcgagaacagcctggccaacgtggcgaaaacccgtctcgactgaaagtacaaaaaaattagccaggagtggtgggttcctgtaatcgcagctacttgagaggctgaggcaggagaatcacttgaggtggaggttgcagtgagctgagatcacgccactgcactccagctggggtgacaaatcgactctgtctcaaaaaaaaaaagatttcatgacaagggctgctattgtttttagaatattatttagttagtatttgactgttcaaatggtatctcaggcttataattacagagtcttaccctccagctgtgcagaaatacttattttttaaatggaaagttattcttaggatttaaggagcttcctgtgaactctgggtggagtggattgatttaacttctcacctgaactgtctgcatgggagatgagtggaagtatgattgcctccgttctagaacacaaagagaagaccaatgattcccagcttccaagtgaccagttccagattccaatcaacaggttcagctcctgatttaatatttgccctgatggtagtaatttagaggaagacacaggtgtgtgtgtgtgtgtgtatgtgtgtgtgtgacacatacacatactcatgtcccttatttaaatacagtcagggccgggtgtggtggctcacgcctttaatcccagcactttgggatccgtccgctgaggcggacagatcatgaggtcaagagtttgagaccagcctggccaacatggtgaaaccctgtctctactaagaatgcaaaaattagtcgggcgtggtggcatgtacctataatcccagctactcgggaggctgaggcaggagaatcacttgaacctaggaggcggaggttgcagtgagccgagatcgcgccactgcactccagcctaagcgacagagcaatactccgtctggggggaagaaattttttttcattaaggccaggcgcagtggctcacacctgtaatctcagcactttgggagaccgatgcaggtggatcacgaggccaggagttcaagaccagcctggccaagatggtgaaaccccgtctctactaaaaatacaaaaattagccaggcatggtggcgggcgcctataatcccagctactcgggaggctgaggcagagaattgcttgaacctgagaggcagaggttgcagtgagccgaggtcgcgccattgtgctcccgcctgggcgacagagcaagactctgtcttaaaacaaaaacaaaaacaaaaacaaaacagtcagaataggagtgcaaagggagagggaggatgtgtgtgcttgtgatggaagggcagcaatagcaatttggagaagttggccctggccatcatttcttgaaataccaggagactttaaaacaggggtgctcaattttttggctttccttggccacattggaagaagaattatcttgggccacacataaaatacactgacactaacaaaacctgatgagaaaaaaaaaaatccaaaaacatctcataatgttttaagaaagtttacaaatttgttttgggctgcattcaagccatcctgggctgcattaggccggcgggccacaggttgaacaagcttgctttgaaagatgatggacaggccaggggtggtggctcacgcctgtaatcccagcacttcggaaggccgaggcaggcagatcacttgaggtcaggaattctagaccagcctggccaacatgggtgaaagcctgtttctactaaaaatacaaaaaagccgggcatggtggcatatgcacctgtagtcccagctacttgggaggctgaggcaggagaattgctggaacccaagaggtggaggttgcagtgagctgagatcgcrccattgcactccaagctgggcgacagagcgagactctgtctcaaaaaaaaaaaaaaaaaaaaaaaaagatgatggacagttcacagggtaccaggaccagctatgaagagaatgattttagaaggctcagtaagttccatctgtactctcctccctcccacctccatgcacaccttacccaaccctcttagcttccaaaagcaccacttcccttttcactattgaagcaaaatctccagaggtggggcctttgggtccgtatttctctaatagggcctgcagatgagtttga

SEQ ID NO: 686886 - DNA, 2321 bp, Homo sapiens
taaggaataaaacaggaacgtggacaaaggcagtctgttctgaagcctgtacacttaggcacaaagatgtcaaaaagagagacagatttaatgacaaggggccaggctgtaatcccagcactttgggaggctgaggcgggtggatgacctgaggttgggagttcgagaacagcctggccaacgtggcgaaaacccgtctcgactgaaagtacaaaaaaattagccaggagtggtgggttcctgtaatcgcagctacttgagaggctgaggcaggagaatcacttgaggtggaggttgcagtgagctgagatcacgccactgcactccagctggggtgacaaatcgactctgtctcaaaaaaaaaaagatttcatgacaagggctgctattgtttttagaatattatttagttagtatttgactgttcaaatggtatctcaggcttataattacagagtcttaccctccagctgtgcagaaatacttattttttaaatggaaagttattcttaggatttaaggagcttcctgtgaactctgggtggagtggattgatttaacttctcacctgaactgtctgcatgggagatgagtggaagtatgattgcctccgttctagaacacaaagagaagaccaatgattcccagcttccaagtgaccagttccagattccaatcaacaggttcagctcctgatttaatatttgccctgatggtagtaatttagaggaagacacaggtgtgtgtgtgtgtgtgtatgtgtgtgtgtgacacatacacatactcatgtcccttatttaaatacagtcagggccgggtgtggtggctcacgcctttaatcccagcactttgggatccgtccgctgaggcggacagatcatgaggtcaagagtttgagaccagcctggccaacatggtgaaaccctgtctctactaagaatgcaaaaattagtcgggcgtggtggcatgtacctataatcccagctactcgggaggctgaggcaggagaatcacttgaacctaggaggcggaggttgcagtgagccgagatcgcgccactgcactccagcctaagcgacagagcaatactccgtctggggggaagaaattttttttcattaaggccaggcgcagtggctcacacctgtaatctcagcactttgggagaccgatgcaggtggatcacgaggccaggagttcaagaccagcctggccaagatggtgaaaccccgtctctactaaaaatacaaaaattagccaggcatggtggcgggcgcctataatcccagctactcgggaggctgaggcagagaattgcttgaacctgagaggcagaggttgcagtgagccgaggtcgcgccattgtgctcccgcctgggcgacagagcaagactctgtcttaaaacaaaaacaaaaacaaaaacaaaacagtcagaataggagtgcaaagggagagggaggatgtgtgtgcttgtgatggaagggcagcaatagcaatttggagaagttggccctggccatcatttcttgaaataccaggagactttaaaacaggggtgctcaattttttggctttccttggccacattggaagaagaattatcttgggccacacataaaatacactgacactaacaaaacctgatgagaaaaaaaaaaatccaaaaacatctcataatgttttaagaaagtttacaaatttgttttgggctgcattcaagccatcctgggctgcattaggccggcgggccacaggttgaacaagcttgctttgaaagatgatggacaggccaggggtggtggctcacgcctgtaatcccagcacttcggaaggccgaggcaggcagatcacttgaggtcaggaattctagaccagcctggccaacatgggtgaaagcctgtttctactaaaaatacaaaaaagccgggcatggtggcatatgcacctgtagtcccagctacttgggaggctgaggcaggagaattgctggaacccaagaggtggaggttgcagtgagctgagatcgcaccattgcactccaagctgggcgacagagcgagactctgtctcaaaaaaaaaaaaaaaaaaaaaaaaagatgatggacagttcacagggtaccaggaccagctatgaagagaatgattttagaaggctcagtaagttccatctgtactctcctccctcccayctccatgcacaccttacccaaccctcttagcttccaaaagcaccacttcccttttcactattgaagcaaaatctccagaggtggggcctttgggtccgtatttctctaatagggcctgcagatgagtttga

SEQ ID NO: 686887 - DNA, 624 bp, Homo sapiens
tgcaatgttagggaggagagggaggagaaggatacagggagagaaggaacgagaatcaggaaatacgtagtcacagagagagactggaacctaaagaccaaaacaatgaacagataacctgtggttggtggaggcaagagcaatggggaatggactgtttcaccataaagtgtgagcccagaatggagagcacggtggcatcctgcagctgaagagaatwcacataactcatactagagctgtattgaaatgaccttccaggctctgggagtatgtctgtggccactcgagcttgttttctggcttctttgctgtgtgttcatctcttgtccttccctaaacatccattttgaattttaaacattattttaaattggcagtccatatattaatagaaatagcctaaggtgtttactgcaacccagaagagcccagtgggccccatccctgctttcaggactccctcttccccatctgaggtgtcctgttgtcctgtcttttcactgacctcccttttttcctggcacctgccttcctagccatcattatactaacgtaagagcctttatcagcagagccatgtttttcctttgcgatgctccatgaaatggtaaagagcccagt

SEQ ID NO: 686888 - DNA, 624 bp, Homo sapiens
tgcaatgttagggaggagagggaggagaaggatacagggagagaaggaacgagaatcaggaaatacgtagtcacagagagagactggaacctaaagaccaaaacaatgaacagataacctgtggttggtggaggcaagagcaatggggaatggactgtttcaccataaagtgtgagcccagaatggagagcacggtggcatcctgcagctgaagagaatacacataactcatactagagctgtattgaaatgaccttccaggctctgggagtatgtctgtggccactcgagcttgttttctggcttcyttgctgtgtgttcatctcttgtccttccctaaacatccattttgaattttaaacattattttaaattggcagtccatatattaatagaaatagcctaaggtgtttactgcaacccagaagagcccagtgggccccatccctgctttcaggactccctcttccccatctgaggtgtcctgttgtcctgtcttttcactgacctcccttttttcctggcacctgccttcctagccatcattatactaacgtaagagcctttatcagcagagccatgtttttcctttgcgatgctccatgaaatggtaaagagcccagt

SEQ ID NO: 686889 - DNA, 1226 bp, Homo sapiens
tttttcatgtgtaataacaaatttcattcgttcacatactgatatgctccatgcttacttgagtgtcactatgaaccaggttcagatctaggcatggagtatgatagtgaataagaaagacgagggctttgcctctgtggatctcacattccagtggcgaatgtgttcaacactgtagcaggtagccacagtattatgaagagaaagaaagcaaggtaagggctagaaaatggtggggggttctctgatacacagccgaaggaggtctctccargggtctgatatgtgagcatgggcctgggtaaagtcagtgagaaagccatgtaaacatctggtgaagtgtgttgcagagtgtcatttataatgtgtatgcaataatttgggttttattttgaaatcagagttactcatatcgaaggtgtctattgagcatgtactgggtgcttggtgggtgggattggggtagataacagggaaatatgaaacatgaccttggccaccttgtttacaatcttgatgagaaaaaatatgcatgtaaaaatatagaatagtaaaacattatggaattatttgacactaaattatgtgacacagattcttggttttgagggacccctttgggtctttccccttttaaaagtaaaagtctaattttgttagattcaaaccttcttaaggacaaggcagtagaactaaaataagaaggtgagaaaaaggttctttaatggaactttagttctcactcctgtagggatgtcttcctcttaggacgctactgagggaggttgtgaagtatgattctgattggagataggaatctctactggaaaccagacagttgatttacggtagatggcatccgcagaagtggtaggtttccttggacccagactcttgtgtcactgaagtatggtgggaagagtagcaaatgtgttatttttcttgcttctcttccccatggctcccatgtgctatcaacaactgagatttcaatttagacttaaaatcaaattaagactatgcaccagacttagctcatttggtgatgtcaataaatgatttgtgactagaacatgaatatgctaacagtatttgtgctggtgggattatgacagtttctgtatttttcaagttttctgctttccacaaatcctgattgttcataacacagtttctaattatacttcagtttctgatattacctatgaaataaaaacaggtaaaaa

SEQ ID NO: 686890 - DNA, 1226 bp, Homo sapiens
tttttcatgtgtaataacaaatttcattcgttcacatactgatatgctccatgcttacttgagtgtcactatgaaccaggttcagatctaggcatggagtatgatagtgaataagaaagacgagggctttgcctctgtggatctcacattccagtggcgaatgtgttcaacactgtagcaggtagccacagtattatgaagagaaagaaagcaaggtaagggctagaaaatggtggggggttctctgatacacagccgaaggaggtctctccagggktctgatatgtgagcatgggcctgggtaaagtcagtgagaaagccatgtaaacatctggtgaagtgtgttgcagagtgtcatttataatgtgtatgcaataatttgggttttattttgaaatcagagttactcatatcgaaggtgtctattgagcatgtactgggtgcttggtgggtgggattggggtagataacagggaaatatgaaacatgaccttggccaccttgtttacaatcttgatgagaaaaaatatgcatgtaaaaatatagaatagtaaaacattatggaattatttgacactaaattatgtgacacagattcttggttttgagggacccctttgggtctttccccttttaaaagtaaaagtctaattttgttagattcaaaccttcttaaggacaaggcagtagaactaaaataagaaggtgagaaaaaggttctttaatggaactttagttctcactcctgtagggatgtcttcctcttaggacgctactgagggaggttgtgaagtatgattctgattggagataggaatctctactggaaaccagacagttgatttacggtagatggcatccgcagaagtggtaggtttccttggacccagactcttgtgtcactgaagtatggtgggaagagtagcaaatgtgttatttttcttgcttctcttccccatggctcccatgtgctatcaacaactgagatttcaatttagacttaaaatcaaattaagactatgcaccagacttagctcatttggtgatgtcaataaatgatttgtgactagaacatgaatatgctaacagtatttgtgctggtgggattatgacagtttctgtatttttcaagttttctgctttccacaaatcctgattgttcataacacagtttctaattatacttcagtttctgatattacctatgaaataaaaacaggtaaaaa

SEQ ID NO: 686891 - DNA, 1109 bp, Homo sapiens
tttcaataagggaatattattgagtactgtatttccctaatttgatcagaaattttcttccaagatgattttacaggattaacattcctcgggttttttatttggaaaatgctggcataaagacattgtgatgacttaacagtaaatacagtcgatgtggtaagaactttggactcttttttcatgaactattaaaatttatgactaggctgagtgtggtggcttgcacctgtaattccaacactttggaaggctgaggtgggaggattgcttgagcccaggagttcaaggccagcctgggcaacatggggacaccctgtctctacaaaaaaacaacaatatgacttacgattagacaatataatcttcatctaaattcaagcattggagcaaattgcaaattttagaaagactttaaaaatgtgttcactaaattagtaactgattgctctccagtgaatgttttgcatgggatcttttttctttttttaattaatagacttcttttttttttctttcagcagttttaggcttacagaagaaatgagtagaaaagtaaaaagaattcttttatctcctttaccccttccccgatttcctctatttattaacaccttgcattttgtagtacatttgttataattgatgaaccaatatagatacattattattaactaaagctcacagactacattagagttcactctgtgttatacattctacagstttggacaaatatataatgacatgtggccaggtgctcatgtttgtaataccaacaatttgcgaggttgaaatgggaggatcctttgagctcaggagttcaagactagcctgggcaacatagcaagggccatgtctttacaaaaaaataagaaaaataaaaaattagccaggcatgggggtgtgcaactgtagtccttgctgctcagggggctgaaacagtaggatcatctgagcccaggagtttgaggctgcagtgaaccatgatggcaccattgcactccagcctgggcaacagagtgagaccctgtctctaaaaactcaaaacaaacaaaattacatatgtctaccattacaatgtcatgcagaatagcttcattgcccca

SEQ ID NO: 686892 - DNA, 1109 bp, Homo sapiens
tttcaataagggaatattattgagtactgtatttccctaatttgatcagaaattttcttccaagatgattttacaggattaacattcctcgggttttttatttggaaaatgctggcataaagacattgtgatgacttaacagtaaatacagtcgatgtggtaagaactttggactcttttttcatgaactattaaaatttatgactaggctgagtgtggtggcttgcacctgtaattccaacactttggaaggctgaggtgggaggattgcttgagcccaggagttcaaggccagcctgggcaacatggggacaccctgtctctacaaaaaaacaacaatatgacttacgattagacaatataatcttcatctaaattcaagcattggagcaaattgcaaattttagaaagactttaaaaatgtgttcactaaattagtaactgattgctctccagtgaatgttttgcatgggatcttttttctttttttaattaatagacttcttttttttttctttcagcagttttaggcttacagaagaaatgagtagaaaagtaaaaagaattcttttatctcctttaccccttccccgatttcctctatttattaacaccttgcattttgtagtacatttgttataattgatgaaccaatatagatacattattattaactaaagctcacagactacattagagttcactctgtgttatacattctacagctttggacaaatatataatgacatgtggccaggtgctcatgtttgtaatmccaacaatttgcgaggttgaaatgggaggatcctttgagctcaggagttcaagactagcctgggcaacatagcaagggccatgtctttacaaaaaaataagaaaaataaaaaattagccaggcatgggggtgtgcaactgtagtccttgctgctcagggggctgaaacagtaggatcatctgagcccaggagtttgaggctgcagtgaaccatgatggcaccattgcactccagcctgggcaacagagtgagaccctgtctctaaaaactcaaaacaaacaaaattacatatgtctaccattacaatgtcatgcagaatagcttcattgcccca

SEQ ID NO: 686893 - DNA, 1109 bp, Homo sapiens
tttcaataagggaatattattgagtactgtatttccctaatttgatcagaaattttcttccaagatgattttacaggattaacattcctcgggttttttatttggaaaatgctggcataaagacattgtgatgacttaacagtaaatacagtcgatgtggtaagaactttggactcttttttcatgaactattaaaatttatgactaggctgagtgtggtggcttgcacctgtaattccaacactttggaaggctgaggtgggaggattgcttgagcccaggagttcaaggccagcctgggcaacatggggacaccctgtctctacaaaaaaacaacaatatgacttacgattagacaatataatcttcatctaaattcaagcattggagcaaattgcaaattttagaaagactttaaaaatgtgttcactaaattagtaactgattgctctccagtgaatgttttgcatgggatcttttttctttttttaattaatagacttcttttttttttctttcagcagttttaggcttacagaagaaatgagtagaaaagtaaaaagaattcttttatctcctttaccccttccccgatttcctctatttattaacaccttgcattttgtagtacatttgttataattgatgaaccaatatagatacattattattaactaaagctcacagactacattagagttcactctgtgttatacattctacagctttggacaaatatataatgacatgtggccaggtgctcatgtttgtaataccaacaatttgsgaggttgaaatgggaggatcctttgagctcaggagttcaagactagcctgggcaacatagcaagggccatgtctttacaaaaaaataagaaaaataaaaaattagccaggcatgggggtgtgcaactgtagtccttgctgctcagggggctgaaacagtaggatcatctgagcccaggagtttgaggctgcagtgaaccatgatggcaccattgcactccagcctgggcaacagagtgagaccctgtctctaaaaactcaaaacaaacaaaattacatatgtctaccattacaatgtcatgcagaatagcttcattgcccca

SEQ ID NO: 686894 - DNA, 580 bp, Homo sapiens
gcagcaccataacacatccacagtttcagaagctttcaaactgagacaatggcagggctacgtggtttacaggagagatttttctcttacactttgactcagaaggtggatcttctcgtcttctcacatccgtacagtctgctctcaatatcctgggtttccacatctgtggattcaacaaagtgaggatcaactaaaaactaaacctagacttcaagaaaaaaaattttcgtcccttatcctaaatattcaagaaatcatatttggataattaaagaaatgagaaggttgtgggaaaatgctgatacctggattttcattttattaatacagtccagtacctgttggctatattttacatgtgttgcttgaattacacaatagcactaaaatttcttatttattttatttyattattattttttgagacagggtcttgctctgccatccaggctggagtgcagtggcacgatcacagctcaatgcagcctcgacttcctggactcaagttatcctctcccctcagcctccagagtagctaggactacaggcacacaataccatgcccagctaatctttt

SEQ ID NO: 686895 - DNA, 860 bp, Homo sapiens
cttccttcagtcacactgttcaactaagaccattctgcagatgaccacacagggcagtgtttctaaagcatgtgttgaagaaccctgtctctgagagatccttcttgagaagaggattctgagttcaaataacattgagaacatacttgcatacatgtcttctctagcagttcacaatggacatgaacattgtgaatgctctaagaaatgctagagtggagaaaactgtttaactttgtgttacctggcttcatccaaaggtacttaaccataaagctcctgtgtagaataataccagtttcagtctcatttcctcattcatgcaaagggcaaacacattatgttacctggggcttttacacagagtgaatgagataaacatgtgtaaagtataaagcaccatccttggtatacactacacatatgataggtgttaattccttttcttagatttatttattatttattgaaaaccattgttttattattgaaaaagttatatatatttatttataataatagaaagaatacacaaggctaaaacttcaaactataaamgggatataaaattttaaaactctctcctacctcagattcctcagattcccaagaggaactttttcatgtacctttccagacattttctgtgcatgtgtatgcagacatatcagaaacagatttttaaagatctattcccagtaaatgaggtaatgggtttgcattcatttgtgttgtacttctgcagcagtacttctaagttcttccattttgtgctacctcaatttgtttttctgaaattcttgggaggggtaaagttagggccttatgtttatagcaaaacatttataaagtgaatgtca

SEQ ID NO: 686896 - DNA, 574 bp, Homo sapiens
aaattaatcttgaagaataagaaattttgccagggagaatcatggaggcctatgcctcaaatattatgttttgcatttaataaaacacctccacacccagggaaagaatcagttattacttccttcaattcatacaccgaatatttactgagcactctctatgtgccaggctctgtactaggcactgaggatgtcttagagcatagaacaggcaaaaaacaaacaaacaaaacygaaaaaaacctcacaatcatggggcttatattccatggcaagaggaaataaatgtgtaaataaaatatatattttgtctgaaggcagtaggtgctatgaaccaaaaggggtggaaagctaaatgttaggagcagtggttatgaaaggccttacttagaagtgaaaattgagcaaagacctgaagatgataagcaagcaagccttatctggggaaaacatttaaggcggtcagaaaagcaagtgcaaatgtgaaatcatgcatggtaggctggaggttaggaagggggtaaatgaaggttgaggggagtgagctagggtggagcgctcaatgaagacagag

SEQ ID NO: 686897 - DNA, 1311 bp, Homo sapiens
tggtctggatagatttacttgaatggcctatggcatgacaaaatcaacatatccaacagaggaattttcccttaaaatcaatctttctccacactattttaatgaaaggcattaccatccatccagctgcccaagctaaaactctggatactgccctggggacttccatcctctcatccccaatcctatctattctgcctcctgagtatgtataaaatctacttacttccattcccttgtcattacctggatggctaccatccaccataatctctcacctgaattgccagagcagtttcctgatacagctgcccattatctttccttcctttctctattcttcatatgtagcacagagatgtttctaaagaacaatcttatcacattgctcccattcttaaaacttttcattggcctcccaagtgctgttggacttaagtccaaacaccttaatataacttatgatctgcatgatctggcctctgtttctctctctagattcactgcatactactcttcactgttagtattataccctactgataatcaacttttttcaatggcccaaacatagctaagtgcaactcctctggacctcctcaaatactacttcttagggcagagacattctacacaccaacctaccttgtggctaatgcctcagcatcagcatcacttcctccaggaagcctttcctgatccctccaagtctgcattaggtggcacttctacatgctcctgtattttccccatcttagcgcttatcacaggataytgtaatttctcagttactcatccatctctcctgatctaggtctggtcattgctgtacccttagttcctaaaatgatagctgttgctttataggctctcagaaacatttgttgactacatgaagttacacacacacacacagacacacacacacacacacacacacacagagcgagcgagagagagaaataaaaatgattttaaaataaattatttatctacagagtttcaaattaaaacaaaggtgcagactctcagaagacccagttttatctattactagaatttgaaaaatacaggtttttaaggctataaactacaaccaacaatgacatattcagttccaataaaaacgaccacagactttttgaaactaaagtctatatatttgtacagactaaccaatataaaaagaaattacataatgaggcagacatgtttaaaataatgctgaaaagttaattcaattttttcaatgccactgtaggaaataaaaaaatttccttgaatatacataaaaacagatggttaaaatca

SEQ ID NO: 686898 - DNA, 664 bp, Homo sapiens
gcctgactgcttggaatggttattaacttgattattaacttggtcattaaccaagacctgacctaacagtgtcaattcttgggggctggaaggtggcacaaggctcaggaatgccagccagactcaccatcagtgagattgcttttgttatttatcattgtatcacaaaccactccaaagctcagtggctttaaaaccaccacaattttattggctctctcatggttccatgggttgtctgggatcagcgggtggatcttctgctggtcttgcttagragtctctcatgcaggtgcattcagataaagcttgaggctggagtcagctggaagctcaactaaaatgctggatcagtggacctctcctcctctccatgtggcctccccatgtggcctcttcagcagggtggccagaaatctttcatggtgactcagggctctccaagtgaaagaaagaagaagtattaatagaaactcccatttcacttttttgtttgtttttggtttttagagacagggtctcactctgtcatccaggctggagtgtagtggcatgattatggctcgttgccaccttgaactcgtgggctcaagtgatcctcccacctcagccttcagagtagctaggaccacaggtatgtaccactacacctggctaattttta

SEQ ID NO: 686899 - DNA, 674 bp, Homo sapiens
gtctcaaaaaaaaaaaaaaaaaaaaaagatattagatgatctcctggaccttttttccagctcaaacaccctgagtttaaccaattcagccaaacttggcacaagatcatcagactgcttcataagctctcactccttccagcagctttctgtcactatttaactagaactccagattcctcactcttcatycaagtcttggagacctttagcaactatttttaaaggcaatgtggtacttcagttaaaacaaaggtttttggcttactgttaagaggaaaaacttcaagggttccaaaactaaggacacaacataggaacaagttcaactcagtaacaaccagggaaatctattaagtcaaaccagtgcagttcaggccccatccacacaggcagtgcccagaactataaatttctcagttttattcaaaaagaataaaatatttaggaaaaacattttaacaaaataaattcaagaccaatacactgaaaacctataaacatttttcgagaaattgaagaagttctaaatgaataaaaagataattcttatttgtagataggaagattcaacattgtgagatagcagttctctccaaattgatctatagattctatccgattccagcaatatcccttgactgttttttttttttttttgtagaaattgacaa

SEQ ID NO: 686900 - DNA, 674 bp, Homo sapiens
gtctcaaaaaaaaaaaaaaaaaaaaaagatattagatgatctcctggaccttttttccagctcaaacaccctgagtttaaccaattcagccaaacttggcacaagatcatcagactgcttcataagctctcactccttccagcagctttctgtcactatttaactagaactccagattcctcactcttcatccaagtcttggagacctttagcaactatttttaaaggcaatgtggtacttcagytaaaacaaaggtttttggcttactgttaagaggaaaaacttcaagggttccaaaactaaggacacaacataggaacaagttcaactcagtaacaaccagggaaatctattaagtcaaaccagtgcagttcaggccccatccacacaggcagtgcccagaactataaatttctcagttttattcaaaaagaataaaatatttaggaaaaacattttaacaaaataaattcaagaccaatacactgaaaacctataaacatttttcgagaaattgaagaagttctaaatgaataaaaagataattcttatttgtagataggaagattcaacattgtgagatagcagttctctccaaattgatctatagattctatccgattccagcaatatcccttgactgttttttttttttttttgtagaaattgacaa

SEQ ID NO: 686901 - DNA, 2518 bp, Homo sapiens
tatgcacgatggttattgtctttgagggcttttaatttatttcttttacttacaggacagattacagtatctgcaggaagagggttccggtgtgatgcatcaggaatgtcagatccagtcctgtgagctctcggtggctcagaagcccaggccctcttctcctgcagtgacatccttggcatcaccaccactctgctttggcagtttcctaagctgtgtctgccagaccttctcaaggtctaggaagcagaagcctcccagaagaaagggtaacaaccaggctgaggcaggaggtgatgctgaggtcctgagacctggcccggcaaaaccagagttgagcctcagcaaaacgtgtagccacttgaaatcgatagagctttcctttgtgtttagttttatagttctctctgtatgtcattgttcctcttagttgagtttttgcctgtcaaagagatagagagctgcttttatgctgagatcctcaagccaaaacccacagtaaacgcaaagtaaaactttgaggctttgaacttttactcagtggtggaattacttcctacttccttcccattaggttgaaggtgggattctctctggaataakttgttcccaaaattcatgtgtatttcactcaggattgaagtgatacaatttcatcattttcggtagtgtttcctgatatcgacgaccaaatggagacctttcatgtccaactcctttcattttcttttacctttgactacagattcattttgtattcttcatcttcaatattttgttgaaattctgccactctgccactttcttttttctttctttctttcttttttttttttttaagactgagtctcgctctgtcgccaggctggagtgcagtggcacgatctcggctcgctgcaacctctgcctcccgggttcaagcaattctcctgcctcagcctccggagtagctgggattacaggcaagcgccaccacgcccagctaatttttgtacttttagtagagacagggtttcaccatgttggccagaatggtctcaatctcttggcctcatgatgccccacctcggcctcccaaagtgctgggattacaggcgtgagccaccacacccggccaattccgccactttctaacttgaataagcctcaggatgtcctggctgctacacagctatcacttcctccatccctaaccaatatttggtttcttttttgtcacttgttagtagggttcctagctctcccttctgaaaggtacctttggtgttctctagccatctgtattgaaaacatagtcacacaaagtaatgtttcttccttgtcattctgtagtcagattttcacagaatcctgagttcttctgagaatcctaaagaagataagtgctttactttaagaaaagttcaagatcattccatttccctcttgttctggtatgctaggttaatccttttcccaggatgtaagagtttaaattaatcttacaccttcttttgagggagtatgttcaagaagagtttaggagtttccctgtagctttattacttgttatttcctaattgtcccagtttcccaattcatgtaagaataataaataaaaatacaaatataaataaatgtgcagagtatctgcataagaaagaaataatataacttattttcttttgtccttagcactgactctgatgattactggaatcactggaaatgtgaccagtatgttagttcttttcatgcctggaacaaggctttgtactgttggaagaatacaggtttcagataaggaaagatctacacaagcacttagttttgaaacttttctgctcccatgtgtcttgaccccttactcataaccaagagaaagggagtttatatctcctctgatgcatttgtaaatgagaaagaatatatttccaggtttcaaagtttatattgctgtagttaggaagagaatagaatgagttgcaagagtggtggcaaatatcctcaaggatgctttggaggtaacaggtacaaccacattgaaggaaatttcatggtttggtgaggatttcaaattagaattagcaattttgcaaaatgtcatagtacttagagtaaaataggacacctttctttaagaatgttgaatattggcccccactctcttctggcttgtagggtttctgccgagagatctgctgttagtctgatgggcttccctttgagggtaacccaacctttctttctggctgcccttaacatttttttccttcatttcaactttggtgaatctgacaattatgtgtcttggagttgctcttcttgagaagtatctttgtggcgttctctgtatttcctgaatctgaacgttggcctgccttgctagattggggaagttctcctggataatatcctgcagagtgttttccaacttggttccattctccccatcactttcaggtacaccaatcagacgtagatttggtcttttcacatagtcccatatttcttggaggctttgctcatttctttttat

SEQ ID NO: 686902 - DNA, 1154 bp, Homo sapiens
ttgtatatgtgctaaagctaaaatctaaattttggcaaataagagaaattatttattcttaatattacagttagacttgtaacaggcattttatattataatactgagaggtacaatgtaataagtattggcttcagagactaacagacctaggtttggattctgcatcaggacttgccagtcctgggacctttctgaacttaaactatcgtaccaaccctatgcagattgcctgaagattactgatgtgtgaataagtataatatttaatctaatggtagctattatttgtttyagctttgtcactaaccagctatgtcactttgagagagctattcaatttctctgttcagattcctctgataaataagaggaaaggactagatactttctactatttctgtcaaaattcaggtaataagtaaaccctttttattggtttatttggggggtataattttacattagccagggttttttcatgttaaaattttcccagggagtagtaaaggcattagttggaatttggacactaatatgagaataagttgacaaaaacaaaatggtcctaggaaatgtttcgatattgaatgttgggacaagaacccagagcaaaaaaatcacatttacaagacaaaaccacaaaactaatagtccaataatttggtttaaaaacttgtattataattctttatcagactaaacgagtgatcttagaaaaattgctggaaaatatttattgacctgtttaatcttagcttaatcaacctgtagcaataagtacagcaacatctgatacctacctagttctctaggttcccatggggataaaaaagagaactaaatacattaaatatgatcacctctatactgtcaattatgtctgtctataatacatgtgcaaaactgtctatctgctttgcaggggaaacaatttttttaaatgactcataaagctctatctctcatcaatagtagcaagttttatttttaaatttgtttttactttgaaacagctatactatttttctaagtatatttttcaaaagcagctttattaagtcataaatcatgtttaacaattcaaaccataaagatagcaacacaaaatttgaaacatagaaatatgcactttcccatttacaaattgcatc

SEQ ID NO: 686903 - DNA, 565 bp, Homo sapiens
ggagggtagcagaagtcactgggtctgggtagggaataggcagggaagcagcaggagcagggagtgtgcagaagtggtggctccaagccccctgtgcagttctattgtcctattgaacttctcttacagaacgaaggttcaaagataaactgtaagaatttcaatacagcaaatgcagagaatcaaacctcaagcatgtcgtacccacttttgagtacagggccctgggtggctgcactggtcatacacccatgaagttagctctggttctgccagctagacgagccctttagcaaagagatgaagatgttggtagttggagactagcgtggactacartggttatagtccaagggagtatggatgggacacaaacagtacatgctagagagtcaaagatttaaactgtaaacacccattcctgtaattaattttacttttcaaatgagatcacaggaagttctttaattgaccctgaataaagttactccaacacttctggatgatctttccttttggctcattcccatacattagggattcaagtcatatatcttgcattagc

SEQ ID NO: 686904 - DNA, 595 bp, Homo sapiens
taaatggcatggccacctttaacaaatctctattttatagtcctaatagcaacaacaggtagcagatttgataagctgagtatgaaccaggctggtgttctgtacctttatagatatgtaaatactgctagccattgtcagaacataattttgatgttttgcatccagaacttccaattgcatcataatggatatagttcacactgctttgcattatagttatttmttttagtcttttttccctaggagggaaagaagaaagtccacacaacagcactaactgcttagtaattaaaagaatggataaaagtagtaataacttccttctttgtacttagcacccacccccctttttttttgagatggagccttgctctgtcacccaggctggagtacagtggcgccatcttcatctcagctcactgcaacctctgcctcccaggttgaagccattctcctgcctcagcctcctgaggagctgggtctacaggcacacgccatcatgcccggctaatttttgtatttttagtagagatggggtttcattatgttgtcagtgctggtcttgaactcccgacctcaggtggtccactcg

SEQ ID NO: 686905 - DNA, 595 bp, Homo sapiens
taaatggcatggccacctttaacaaatctctattttatagtcctaatagcaacaacaggtagcagatttgataagctgagtatgaaccaggctggtgttctgtacctttatagatatgtaaatactgctagccattgtcagaacataattttgatgttttgcatccagaacttccaattgcatcataatggatatagttcacactgctttgcattatagttatttattttagtcttttttccctaggagggaaagaagaaagtccacacaacagcactaactgcttagtaattaaaagaatrgataaaagtagtaataacttccttctttgtacttagcacccacccccctttttttttgagatggagccttgctctgtcacccaggctggagtacagtggcgccatcttcatctcagctcactgcaacctctgcctcccaggttgaagccattctcctgcctcagcctcctgaggagctgggtctacaggcacacgccatcatgcccggctaatttttgtatttttagtagagatggggtttcattatgttgtcagtgctggtcttgaactcccgacctcaggtggtccactcg

SEQ ID NO: 686906 - DNA, 595 bp, Homo sapiens
taaatggcatggccacctttaacaaatctctattttatagtcctaatagcaacaacaggtagcagatttgataagctgagtatgaaccaggctggtgttctgtacctttatagatatgtaaatactgctagccattgtcagaacataattttgatgttttgcatccagaacttccaattgcatcataatggatatagttcacactgctttgcattatagttatttattttagtcttttttccctaggagggaaagaagaaagtccacacaacagcactaactgcttagtaattaaaagaatggataaaagtagtaataacttccttctttgtacttagcacccacccccctttttttttgagatggagccttgctctgtcacccaggctggagtacagtggcgccatcttcatctcagctcactgcaacctctgcctcccaggttgaagccattctcctgcctcagcctcctraggagctgggtctacaggcacacgccatcatgcccggctaatttttgtatttttagtagagatggggtttcattatgttgtcagtgctggtcttgaactcccgacctcaggtggtccactcg

SEQ ID NO: 686907 - DNA, 1312 bp, Homo sapiens
gtaggtggggctgaggtgcctaggcatgccctgcttctctcttgagaggcaattagaaatgatccaactttccttcaagcctgttagggcagcatagatttgagttttgaatctggttatattgctgtgtctactgttctctaggaagacttgagaatttagagtagatctgcaacagaagaaaatgaccagtgcatgattctgcttgaaaactaaacctgtctagtcagtgctggatcatttaaagattgaccatctaggtttgaatttctcttcctatatgctgactgcctttgggctgattcacctggggatattagcatctttcccagattgtgtttggtatggggaggtggggagttagggaactcccatctactttgggaagaggaataagttctattcctttcaaacattatgtacagcacttaggagtttgctgttcatgcatcatggctgaaacatttggacaattgataaaaatttgtcattgctgcccagcactttctctgagatggatgaacttataggtaggctctctttttattgtacttcatttcatcttgtattgacacagccccagttatagactttcccccaacagaaggaacaacaacaacaaaaaactacctaactactggttacaggttaaagctggaaatgtgctggcaacagatttaggtttttccaatattattttgcctgttcatcttcttttttctctattatcttttttttttctttttttgagacagagtctcactctgttgcccaggctagagtgcagtggcrtgatctcggctcactgcaacctccgccccccaagttcaaacgattctcctgcctcagtttcccaagtagctgggattacaggtgcacaccaccaagcctgactaatttttgtaatttttagtagagattggttttcgctatgttggccaggctggtctcaaactcctgacctcagggtgatctgctcacctcagattcccaaagtgctggaattacaggcatgagccaccgcgcttggccctattatctttaataaaaacaaagatagggaaattatccaaaaaattagctaaaagctatataactttaaaatatgtgaaattaataatttcaataaagtacttaatataccacaaaacaaatgttttcacttatcagcttttcagattaagtatcaaaattctattcaagtaacatgagaaggtacagcaatatgtgaagacccattatagaattaagagaggagaagaggaagaacaagggtaaagaagggcccagaaagataaaaagacagagggta

SEQ ID NO: 686908 - DNA, 636 bp, Homo sapiens
aatgagtagtgtgattgtaattgaaaaagcgaaacaattataaccatcaaaattacaactttataaaatatctgcatatggacaagcactctgagaaaatactccccccaaaaaagttgttttattaattttttagttttctgaattttttcttacattaatttttttcctattatcggttctacaatataatttgagtatcaaaatttcttaattagatgcattcaaatagaatcacagcttggggcaagtctccgttcaccaccaggcttcaaacatgtcatggcatatctggcaaattggtagtttcaggctgccaagaggtgatttacataagggytttggtggaaagactgccaagaagtgtggatgacagagaggtgggggttggccagactgcttttcagtcaatttgcacagctacagtgcaccagccagtgttccagttggtcagtgcccatgccatgccagctgttaatccttggattgagggaatgacaccttacctatcttgaagattcatattccaatacagcctcgtggagtccactaggaaagtaccaagagcagaaataggagtgcactaaaatcattactacatcacacaacataatcaaaagatgaggggttacagct

SEQ ID NO: 686909 - DNA, 636 bp, Homo sapiens
aatgagtagtgtgattgtaattgaaaaagcgaaacaattataaccatcaaaattacaactttataaaatatctgcatatggacaagcactctgagaaaatactccccccaaaaaagttgttttattaattttttagttttctgaattttttcttacattaatttttttcctattatcggttctacaatataatttgagtatcaaaatttcttaattagatgcattcaaatagaatcacagcttggggcaagtctccgttcaccaccaggcttcaaacatgtcatggcatatctggcaaattggtagtttcaggctgccaagaggtgatttacataagggttttggtggaaagastgccaagaagtgtggatgacagagaggtgggggttggccagactgcttttcagtcaatttgcacagctacagtgcaccagccagtgttccagttggtcagtgcccatgccatgccagctgttaatccttggattgagggaatgacaccttacctatcttgaagattcatattccaatacagcctcgtggagtccactaggaaagtaccaagagcagaaataggagtgcactaaaatcattactacatcacacaacataatcaaaagatgaggggttacagct

SEQ ID NO: 686910 - DNA, 627 bp, Homo sapiens
tttttctaacacaaccttttttctgattggaaagtaactcatgtttattatagaaactacagaaaggtgaccgggtgtggtggctcacgcctgtaatcccagcactttgggaggctgaggtgggcagatcacctgaagtcgggagttcgagaccagcctgaccaacatggagaaaccccgtctctactaaaaatacaaaattagccaggtgtggtggtgcatgcctgtaatcctagctacttgrgaggctgaggcaggagaatggcttgaaggcaaattgctcttttgcactccagcctgggcaacaagagtgaaactccgtcaaagaaaggaaggaaggaaggaaagaaggaaggaaggaaggaagggagagagggagggaaactatagaaagataaaataagcaaagagaagaaaataaaattcacccggaatcctactacccagagataatcaccactagcattttggtgtacatccttccagtcatttttctgagtgtgtgtgtgtgtgtgtgtgtggtctgtgtgtttgatataattgtttaatagggttggaatagctaggctgttttgcaaccttgacagattaattctattatatgtactgaaatttatttaatcaacc

SEQ ID NO: 686911 - DNA, 627 bp, Homo sapiens
tttttctaacacaaccttttttctgattggaaagtaactcatgtttattatagaaactacagaaaggtgaccgggtgtggtggctcacgcctgtaatcccagcactttgggaggctgaggtgggcagatcacctgaagtcgggagttcgagaccagcctgaccaacatggagaaaccccgtctctactaaaaatacaaaattagccaggtgtggtggtgcatgcctgtaatcctagctacttgggaggctgargcaggagaatggcttgaaggcaaattgctcttttgcactccagcctgggcaacaagagtgaaactccgtcaaagaaaggaaggaaggaaggaaagaaggaaggaaggaaggaagggagagagggagggaaactatagaaagataaaataagcaaagagaagaaaataaaattcacccggaatcctactacccagagataatcaccactagcattttggtgtacatccttccagtcatttttctgagtgtgtgtgtgtgtgtgtgtgtggtctgtgtgtttgatataattgtttaatagggttggaatagctaggctgttttgcaaccttgacagattaattctattatatgtactgaaatttatttaatcaacc

SEQ ID NO: 686912 - DNA, 627 bp, Homo sapiens
tttttctaacacaaccttttttctgattggaaagtaactcatgtttattatagaaactacagaaaggtgaccgggtgtggtggctcacgcctgtaatcccagcactttgggaggctgaggtgggcagatcacctgaagtcgggagttcgagaccagcctgaccaacatggagaaaccccgtctctactaaaaatacaaaattagccaggtgtggtggtgcatgcctgtaatcctagctacttgggaggctgaggcaggagaatggcttgaaggcaaattgctcttttgcactccagcctgggcaacaagagtgaaactccgtcaaagaaaggaaggaaggaaggaaagaaggaaggaaggaaggaagggagagagggagggaaactatagaaagataaaataagcaaagagaagaaaataaaattcacccggaatcctactacccagagataatcaccactagcattttggtgyacatccttccagtcatttttctgagtgtgtgtgtgtgtgtgtgtgtggtctgtgtgtttgatataattgtttaatagggttggaatagctaggctgttttgcaaccttgacagattaattctattatatgtactgaaatttatttaatcaacc

SEQ ID NO: 686913 - DNA, 1277 bp, Homo sapiens
tgtaggctaaagtttcttaaaagaataatttgagatcaggtatcctgctaggctgaacaatataaaatcactgctactaaaccattagttttcacttagctccaactaaaacttaaatgtgcatgaaatcaggatgctaatcatttacaatagaatgtatcattagttcctgtgtagaaaataacttaaaacaagaaaataaatatttttgttgtttaggattgcaaacatcattctcttgttttccctttcttgttttcttatatctaatggtaaagagttccaaggacaaacaatagtttgaactgtgtcatactgaagacgcataattaagctctatttgtagttatacacagagatatatcctgctgagtgataggggaaagaaatacagtggttttctttcacaaatctaatgaaatgaagggytgggccaggttacagtaaacacttaattacatagagattttatgcaattcaccaatcgcagcaaaggggatagtaattgctttctttctaaggtgaaattatcttgaaataattactctctattttcaatcccaacctgatgaaaactgaacatgctttacttgtttccgattttcttttccttgtcaagatattgatcacccactccttttcaaggaagtgtagaatcagaaattctagcataatgatgctggttttgtggcttctaaattcaattagctttagctatagccaactcttttcccataacaaaagcccctcttgagttccttgtttttacaaatgatctattattgtgtcgtaacacaaatctgctaaattaaatttgctgaagtataatagcaatccctaaagccttgattatctttggcattttttttattttttaaaaaattggtatacaaggtcttagataaataaagaaaaaggaaaagttagtatatcactgtgggaaaaaattccagttcatcaaaggaaaacaatagtgagtcacaaagaaaaaaaaaattggccataaaattaggtgacagattgtgtgggcaaagagtaatctcagggatgtgaccaaaacaaaaatgaacagaataaactatcaaaaaggctctacaacagatagcaaatggaaagttccacagataagcaatttattttagaaacaataaaatactatgtgggaagacaattgagcataatagacaaaccaaagcatatttaacctttgcatataatagattctgggatttttaaaacaacttatattaagaaaaaatgaaaaagttttttttttt

SEQ ID NO: 686914 - DNA, 1586 bp, Homo sapiens
gattagtagaaatagtcaatagcaattattatcatgattaatattattattaataaccaaatttattagagagataatttaaccaactttaaaatattattaatatgtaccacttattaagcacttctatttgccgaaggagtagacacataacattcaatttattccctaaagccactttgtgaaataagcatcaatatctctattttagaaatgatgaaactgaggcaatttgtactcatccagctaataaatatcagctcccaaattccaaatccagatctttccaactataatcacttttgtttattaatcaggttattttgctacctagctttccatatatatatgtgtatatatatatggaaatatacattccatatatatataatggaaatatgtatgtatatatgtatttagagagagagagagagatgtatacctcaacctacctctctctttcattaaaatccaaaattctagcgttctgtgcacttactcttttcctcatttctatttaatttattccactctattctggctttttatccttaacattctattacagtatctctttacaaatcacaagtggcttctatttggtcttcatctttgtcctttctcttctcatgccactcactcttcctggctaccctggatgtcatttcatgatgccttataagcttaatttatattaatactaatttagtcattaatgatataaaaagaatttgaatagctagttaaatccataaaccttgagatagctacctggctacttgtcagataatcaaaagaggaattcgatatacttttagaaacaaaattatctgaactgatacttacactctatggttctaccttaccaattgaaaccatatcatttattgcctgcaaggtttggtttagggtttgctataatatgttctatgcttctttcacttagaatagcacagtatgatattatacaagttaaattataccagtcttcaattcacacatggagagaatggctttatttccttgcctgcatctttttttcttgccataaggcaaagattggttgatattattatttaaggacagaaaaccagaaagcctgctaaacttgtcagagaatcctattctcctatgttgtggctaaaattatagctatatagtgagaactatgtactgagtattattaaacctgctgagactcagagatagtccctccatttgctggcctgcagcagcttctcagagagtaggtgaaagcagggtagaaaaatcttctctccctttatactatgattagcagtggctatcccatggcaaagaagagttaggcttctaaaataacatttcaatttcaaggactttctaagtgtaagtattcacgtgccactttcctgyaagcaacctgcggagtgacagcacagctaggtcagaaggacaacctggtctcaactgcacagtgttcgaagaattggttttgagcccaggtctccagtccatatttttcccacattttcagtgactttcccttcaagaggagccgctgcccatgtttgtcagctgacctcagtcaacccttcttattaaga

SEQ ID NO: 686915 - DNA, 613 bp, Homo sapiens
gtggtggcaggcacctgtagtcccagctactccggaggctgagaaaggagaatggcgtgaatccgggaggccgagctcgcagtgagccgagatggcgccactgcactccagcctgggcgacagagcgagactctgtctcaaaaaaaaaaaaaaaaaaaaaaaagatagtcctccctcactttccagtgtgggctgctcaatgctcaatgaatgatagcttcttttttgttcattaatcatatagaagtaaggtgaacaaaggtgtacttagaaaacaataatttgcttggggaagcaatcgcctccctcaatccttacttagctaatgaaagcaaagggaccatgggtcataggcagatgaaagccctgctcatttgaagaaaactaaaattgctgggcaggatggtttaaaatggcacctggagtagaagtatggaaaatgttaaaattttccttctcatctggtaagaaacaggaaaatttggctaaatgagagcttccatattttctcaagtaccatcgtattagtttctaaggctgccataacaractatgataaattagatggcttaaatcaatagaaagtttttctctcacatctctagcagctaga

SEQ ID NO: 686916 - DNA, 1418 bp, Homo sapiens
gagaaggaatagaaagggaaagaggaagaaataaaggaaaaagggaagggaggaagaaagaagggagggaggwtggaagagaggaaggaaggagggagggagagagggaaagccaaaacaggcgaggaatgatgagaaggatgggtagctgttctgtggattgtgtgagttaaggggaaggaagtggtgggacttaacatcagctccatatgctacagagtcaagtatcctcacatattcttacattttccctgaagttatatattgagagccagtggaagacatcgtagaaattccctggtctattttgtgaatgtgtcttgtagtacatagataattacatgtgagccattcctataaaaaggtttagattggtcaaggatgaaagaaaaagagacttgcaggtggaaaacaaaaagggcaataaattaaatctttcaaaataataattgctgaaaaatagtcatcttaagaacctcatataactactagtttaaaatattgccatccagttattgaaaaaagcaatttttcacatcaagaatttttatttatcttaaaatatttcagaggcaattggtgttatgctttagacacttgactgacagtaaaagtttactataataattcaaatgcctcttcaaagtggatgaacagaaacaaaacgttcagagaggtgagtgttaaattattattatttagtgggaaaatgacctgaactattttctttggttgctgttacataatccataatctgatatcagttccattttgttgtttgtatttgtgcttgaactttcaatacaatagaggtcactaatggaagcctaaaaaagaatttttatttgacttttggttcattagaagtttctttgttctagttattttccttagcagagtgaatttctctcactttctcactatttgtccaatttactacctaagcctggatgtttgtcttttcatactctggaaacatggacaaagacaaaacatagggagtttcgaggcattattcaataactacctagagaataatggctctattttatatgatctaacttggtcacttgaatgggtcatatttctccaatattcacagaaccacctaagttgtttttggttgtgtggacatagatcagattgcctttgaatcatgatttgtagatgtaaacactatttattagttgtaaaaactttatattatctttaacagcctggccaaaaggtcattattgtttaggccttctgccttccagaaagagtatgactaaaacagatgtattgggcagaatttccagaaataccccaccacccccaatttcacagggctaatatccagaatctgtgaatgtgatgtcttttcattcccatgattgtcttatgtgatatgacgtagttgaccctgaaagggtagg

SEQ ID NO: 686917 - DNA, 595 bp, Homo sapiens
ctggctaacacggtgaaacctgtctctactaaaaatacaaaaaattagccaggcatagtggcgggtgcctgtagtcccagctactcaggtggctgaggcaggagaatggcgtgaacccgggaggcagagcttgcagtgagctgagatcacgccactgcactccagcctaggcgacagagcgagacttggtctcaaaaaaaaaaaaaaagaagtaattggatgaggtgatttatgtaattcctacaacctctcagtgctaacaaagcaacattcaatgacatttacaatgatcatggtggcaagttgggagagagaaagggcatttctgaagtaataataaaatgagtaaaataagatggtagtgccgtgtgttgatattgtgaactttacatttttactttctctcatccaaatcacagtaaaggagctgaaataagattttagttmattggtagccacacatgcccacaggctggtatgccaggctttgtttttctcacactgctgtaccatatccaaggccagagtgaatttcaggtgtcatgggctctacaagggcaagactggagtaggagctaaagtcaagttcccattg

SEQ ID NO: 686918 - DNA, 2826 bp, Homo sapiens
gtaaaattttgttaattagtaattatatagaatsaatacagttggatcctactgtgctaatcacaggactttagtagaagaagaaaaaattggtgagattcttttgcctaggttgggcatgctaataaaggaagcaagtagttattttaatattttgcttctatttgagaaataaatgatgattaaaagcatactttttaatgcaatcagtctatgttacaaagcatattattttaaaaactgtagtaattttttttacttttcaacaaagttataccataaaaaatagatactgcctttgaacatgaataaacaattttaaagggaaatatactgccatctagtgtctaactttcagaatatctgaattactgtatttagaaatatttacaacaccggtagtaccacatggtggcactatagacatgtacattaaagggacaacgccaaatttatgggctatctgttttatcttggtccataagtgtttgttaaatgtggcaaatacattattttcctttttaggttagcactttatattttctaagaaaaccttacatatttttggtactgctcttttttttttttttttttttttttgaggcggaatctctctcgcccaggctggagtgcagtggcgcgatctcagctcactgcaagctccgcctcccgggttcacgccattctcccgcctcagcctccctcagcgtccggagtagctaggactacaggcgcccgctaccacgcccggctaatttttttgtagttttagtagagacggggtttcaccgtgttagccaggatggtctccatctcctgacctcgtgatccgcccgcctcggcctcccaaagcgttgggattacaggagtgagccaccgcgcccggccggtactgctctttaaattttcataagtcagaaaaaactcgaatacctttatatttaattcctggtttgtgaagttttagggctttaaatactttaaactatattgtcctttcacctctttcccccccttattcggataactataaccgaaaccagcttcaacacggagaaaaaggtttaaaacatttgcacaaatactaaatgcaaatatgcaacacatttcccacataatctaaaagaaaaaagaaaaacaactcagatgagactatcttataacagggctctttgtatttagaaagtgtggtggtggtggggacaacttctgttttaagtgctaaatccagtgggaaaaatttgcctcctcacaagaacatttgcctgagatgctgattcattacaaagggacacagagctttgggttcagaaaataaagaatgcttcatatggaaaattttgtaatttattatgtgagcatgcttcaggtttcactttgcttttggtatcatcaaatgttgtagtagtaactgtacgaaatgaaattcattctatttactctaataagcagattcttgaagaaactgctctcataagctaaggttccttatgattctgcaaggaagagaagactaaagcaaatcactgtctgaaaacataacagctggctaaagtaagcattgaacaacactaagcacttcaaaacatcaagtaaaattttggcatttagtatcacataatgtatatgatctatataatataatataatatatacatacataatatctagtatagtgtttgcagttttgtaagtctaatgtattacaagaagcttaagatgtaattataatgatttttatctaaacacaattgctagtgaaataggaagactaattgccaaaatacttatttggtgtattctctcatcagtggttatcaagattttaaaaacttatgagaaatgagttccaagagcttaatccagagtaatacaagtttacttgttttgcttagctttctttatcatcctctttggcttctattccaaatcttcatcatttcctcaacatttaactgccaatgttctcagtaaaccaccttgttaatctgcttttttttcttttttttttttttttttgagatggagtctcgctgtgtcgccaggctgcagtgcagtgacgcgatcttggctaactgcaacctccgccttccgggttcaagcgattctcctgcctcaggctcccaaaaaccaccttgtttcttacttgagaaagttacagtcatccatcaattgtccaccctgcccagcacttactaatatatagacactttcttaactcctttccacatatttggaggatgatgtgtccttctagcacaaagccaagccctctcctggagcccttgattccatttctttcctccccatctccattcctggaatgttgcttcatcagtcattcccactctgttcttatcttccaccttagcccttctgttggctccaatcctgagtccatacaccccaaatctttctcatccttaaaaaatgaacaaacgaaataccccaaaacaacaaaaaataaattctcatgaccacaaaacaaaacaaacacagcaaacagaaagtcagccctttcttgaccacaaattctcttttgtctttcattccatcttttttcttcctttttgtccatgagttgccactgcttttccactcccttttcactccttaactgactgatctctaattttctctcccatcactagactaatacaattcgtgaatgttgccaatgatcattttaactcatcttattggccctacttgccaaatttgggaaaattggtcacagcctcttcttgaaactgtttgatgtttgccgctttctgataatctcttcttggtcttctcctaatctgctcatttcataatttttttttt

SEQ ID NO: 686919 - DNA, 2826 bp, Homo sapiens
gtaaaattttgttaattagtaattatatagaatcaatacagttggatcctactgtgctaatcacaggactttagtagaagaagaaaaaattggtgagattcttttgcctaggttgggcatgctaataaaggaagcaagtagttattttaatattttgcttctatttgagaaataaatgatgattaaaagcatactttttaatgcaatcagtctatgttacaaagcatattattttaaaaactgtagtaattttttttacttttcaacaaagttataccataaaaaatagatactgcctttgaacatgaataaacaattttaaagggaaatatactgccatctagtgtctaactttcagaatatctgaattactgtatttagaaatatttacaacaccggtagtaccacatggtggcactatagacatgtacattaaagggacaacgccaaatttatgggctatctgttttatcttggtccataagtgtttgttaaatgtggcaaatacattattttcctttttaggttagcactttatattttctaagaaaaccttacatatttttggtactgctcttttttttttttttttttttttttgaggcggaatctctctcgcccaggctggagtgcagtggcgcgatctcagctcactgcaagctccgcctcccgggttcacgccattctcccgcctcagcctccctcagcgtccggagtagctaggactacaggcgcccgctaccacgcccggctaatttttttgtagttttagtagagacggggtttcaccgtgttagccaggatggtctccatctcctgacctcgtgatccgcccgcctcggcctcccaaagcgttgggattacaggagtgagccaccgcgcccggccggtactgctctttaaattttcataagtcagaaaaaactcgaatacctttatatttaattcctggtttgtgaagttttagggctttaaatactttaaactatattgtcctttcacctctttcccccccttattcggataactataaccgaaaccagcttcaacacggagaaaaaggtttaaaacatttgcacaaatactaaatgcaaatatgcaacacatttcccacataatctaaaagaaaaaagaaaaacaactcagatgagactatcttataacagggctctttgtatttagaaagtgtggtggtggtggggacaacttctgttttaagtgctaaatccagtgggaaaaatttgcctcctcacaagaacatttgcctgagatgctgattcattacaaagggacacagagctttgggttcagaaaataaagaatgcttcatatggaaaattttgtaatttattatgtgagcatgcttcaggtttcactttgcttttggtatcatcaaatgttgtagtagtaactgtacgaaatgaaattcattctatttactctaataagcagattcttgaagaaactgctctcataagctaaggttccttatgattctgcaaggaagagaagactaaagcaaatcactgtctgaaaacataacagctggctaaagtaagcattgaacaacactaagcacttcaaaacatcaagtaaaattttggcatttagtatcacataatgtatatgatctatataatataatataatatatacatacataatatctagtatagtgtttgcagttttgtaagtctaatgtattacaagawgcttaagatgtaattataatgatttttatctaaacacaattgctagtgaaataggaagactaattgccaaaatacttatttggtgtattctctcatcagtggttatcaagattttaaaaacttatgagaaatgagttccaagagcttaatccagagtaatacaagtttacttgttttgcttagctttctttatcatcctctttggcttctattccaaatcttcatcatttcctcaacatttaactgccaatgttctcagtaaaccaccttgttaatctgcttttttttcttttttttttttttttttgagatggagtctcgctgtgtcgccaggctgcagtgcagtgacgcgatcttggctaactgcaacctccgccttccgggttcaagcgattctcctgcctcaggctcccaaaaaccaccttgtttcttacttgagaaagttacagtcatccatcaattgtccaccctgcccagcacttactaatatatagacactttcttaactcctttccacatatttggaggatgatgtgtccttctagcacaaagccaagccctctcctggagcccttgattccatttctttcctccccatctccattcctggaatgttgcttcatcagtcattcccactctgttcttatcttccaccttagcccttctgttggctccaatcctgagtccatacaccccaaatctttctcatccttaaaaaatgaacaaacgaaataccccaaaacaacaaaaaataaattctcatgaccacaaaacaaaacaaacacagcaaacagaaagtcagccctttcttgaccacaaattctcttttgtctttcattccatcttttttcttcctttttgtccatgagttgccactgcttttccactcccttttcactccttaactgactgatctctaattttctctcccatcactagactaatacaattcgtgaatgttgccaatgatcattttaactcatcttattggccctacttgccaaatttgggaaaattggtcacagcctcttcttgaaactgtttgatgtttgccgctttctgataatctcttcttggtcttctcctaatctgctcatttcataatttttttttt

SEQ ID NO: 686920 - DNA, 681 bp, Homo sapiens
ttacacggtatatgcttttttaatagcttttgagtttttttgttgttgttgttgccatatccatgtattacctatttagaagattattttaaaagacacaagaatataatgaaatattgcattgtgaccagcaaagtgggaagagtgaatccaaaaaaagataaatgtttttccagaagccagtgtctccaactgttatataatttactaatattgtttttttgagaaaaaggaaaaagaaccctttgaagtcaaatattgctttaaaagaaaatatgttttaatgcttactagctcatccttatccttgaygtgatatcgaatgaagaacaccagaaattatttctgtggacattggctgaacaattaacacattttagcactgaagaaggaacttcaacctagtctttttacgcacaaaaggagacaacattttcaccatatttcagaaagactcattctattaaaggaaagccaagaaacacacttgtaagcgagtagggaggatttttctgcaacataagctatttaaggaggtattagtaaaagatgattaattgaatttaattaaagctttaaatctaacatcagtgacttaggcctttcttggcttggttcacaggctcttaaaaacatgggtgaaattctgaaagctgcaggctgtgacttcactaacggtga

SEQ ID NO: 686921 - DNA, 2044 bp, Homo sapiens
tttatttactgtggctgtatggtgcagccaccatctttatcctggctctctcagactcattagttagttacttaatatttctatgccttggttttctcatatgcaaaatggagataatatactcctaacttatagggttgttggaatgattaaatgagtcagtacaacatgtaaagcacttagatgctggtgtgttataagcactgagtaaatgttagctattattaacattgatgttatagtagggaaaattggtgtccccaacacctaatgggatgaggcaaaggtataacttggaaaaagcatcgttacttattctctcctgaagaaattattagaaaagaccaaagttggcagaggaagtacttgccaaaatttctggagatgggcacttgttccctatttagataaatagtttataaatatcactttaaaaacaaaactccattcacatcaaacaagatcaaaatgttagggtatgtatttctttttttttttttttttttttttgccagaaagctaagagattttaaaaagtattaactatcataggaatcatatggcaaaatattttatcaaacaaatctgatagtgagcctcttttttaaaatgttgcttaaggccaggagcagtggctcacacctataatcccagcactttgagaggctgaggtgggtggatcacttgacattaggagtttgagaccagtctggccaacatggtgaagccccgactctactaaaaatacaaaaatgagccaggcatggtggtgcacacctgtaatcccagctactcgggaggctgaggcaggagaatctcttgaacatgggagacagaggttgcagtaagctgagatcgcatcacttcactccagccttgggcgatagagcaagactctgtttcaaaaaaataaaaataaatgttgcttatatctaagaactgactagtatatgaaatatttgccagattattaattgtagatattgaataacaatagaatatctgaaaactaaaataaaaattttcacttgatctttattttttcaactcttctctattaaaaaaatgaaattcttttaaattcagatttcaagagtaattttcctgctagagctgcttaccaagttgctgctttacccaaagtaagtacactttaaatgactaatgtacacagttttcagtttctacattgttttccttctataagtaaactaagcactgtgaaaggaaacttaaaagaagtagcctgggcagggtggcttacccctgtaatcccagtgctttgagaggccaacacaggaggatcgcttgaggccaggagttctagaccagcctgggcaacatagcaagacagccatccctacaaaaacaatttaaaattagccatgcatggtggtggtgcacacctatagtcccagctacttggtaggctgaggtgggaggaacacttgaacccaggagttcaaggctgcagtgagctataatcgaaccactgtgctgcagcctgggtaacagtgtgaccttgtctcttaaaaaaaaaaaaaaaaagaaaagaaatagaccctgcttccccagggacttaaagtctgaaaggaaatatcccatattacatgcatgaaaaaaaaattaagaaaccttttaagacagcacatgaacakagaatcagaatcaaaatacttaaattgtgagaaaaggccaggcgcggtggctcacgcctgtaatcccagcgctttcggaggctgaggcgggcggatcacaaggtcagaagatcgagaccatcctggctcacatggtgaaacccgtctctactaaaaatacaaaaaaaaattagccgggtgtggtggcggacgcctgtagtcccagctactcgggaggctgaggcaggagaatggcatgaacccaggaggcagagcttgcagtgagccgaaatcgcgccactgcactccagcctgggcgacagagcgagactccatcacaaaaaaaaaaaaattgtgagaaaaaataaaatagcagctgtactgttgtagtgttacttaggggacta

SEQ ID NO: 686922 - DNA, 2044 bp, Homo sapiens
tttatttactgtggctgtatggtgcagccaccatctttatcctggctctctcagactcattagttagttacttaatatttctatgccttggttttctcatatgcaaaatggagataatatactcctaacttatagggttgttggaatgattaaatgagtcagtacaacatgtaaagcacttagatgctggtgtgttataagcactgagtaaatgttagctattattaacattgatgttatagtagggaaaattggtgtccccaacacctaatgggatgaggcaaaggtataacttggaaaaagcatcgttacttattctctcctgaagaaattattagaaaagaccaaagttggcagaggaagtacttgccaaaatttctggagatgggcacttgttccctatttagataaatagtttataaatatcactttaaaaacaaaactccattcacatcaaacaagatcaaaatgttagggtatgtatttctttttttttttttttttttttttgccagaaagctaagagattttaaaaagtattaactatcataggaatcatatggcaaaatattttatcaaacaaatctgatagtgagcctcttttttaaaatgttgcttaaggccaggagcagtggctcacacctataatcccagcactttgagaggctgaggtgggtggatcacttgacattaggagtttgagaccagtctggccaacatggtgaagccccgactctactaaaaatacaaaaatgagccaggcatggtggtgcacacctgtaatcccagctactcgggaggctgaggcaggagaatctcttgaacatgggagacagaggttgcagtaagctgagatcgcatcacttcactccagccttgggcgatagagcaagactctgtttcaaaaaaataaaaataaatgttgcttatatctaagaactgactagtatatgaaatatttgccagattattaattgtagatattgaataacaatagaatatctgaaaactaaaataaaaattttcacttgatctttattttttcaactcttctctattaaaaaaatgaaattcttttaaattcagatttcaagagtaattttcctgctagagctgcttaccaagttgctgctttacccaaagtaagtacactttaaatgactaatgtacacagttttcagtttctacattgttttccttctataagtaaactaagcactgtgaaaggaaacttaaaagaagtagcctgggcagggtggcttacccctgtaatcccagtgctttgagaggccaacacaggaggatcgcttgaggccaggagttctagaccagcctgggcaacatagcaagacagccatccctacaaaaacaatttaaaattagccatgcatggtggtggtgcacacctatagtcccagctacttggtaggctgaggtgggaggaacacttgaacccaggagttcaaggctgcagtgagctataatcgaaccactgtgctgcagcctgggtaacagtgtgaccttgtctcttaaaaaaaaaaaaaaaaagaaaagaaatagaccctgcttccccagggacttaaagtctgaaaggaaatatcccatattacatgcatgaaaaaaaaattaagaaaccttttaagacagcacatgaacagagaatcagaatcaaaatacttaaattgtgagaaaaggccaggcgcggtggctcacgcctgtaatcccagcrctttcggaggctgaggcgggcggatcacaaggtcagaagatcgagaccatcctggctcacatggtgaaacccgtctctactaaaaatacaaaaaaaaattagccgggtgtggtggcggacgcctgtagtcccagctactcgggaggctgaggcaggagaatggcatgaacccaggaggcagagcttgcagtgagccgaaatcgcgccactgcactccagcctgggcgacagagcgagactccatcacaaaaaaaaaaaaattgtgagaaaaaataaaatagcagctgtactgttgtagtgttacttaggggacta

SEQ ID NO: 686923 - DNA, 2044 bp, Homo sapiens
tttatttactgtggctgtatggtgcagccaccatctttatcctggctctctcagactcattagttagttacttaatatttctatgccttggttttctcatatgcaaaatggagataatatactcctaacttatagggttgttggaatgattaaatgagtcagtacaacatgtaaagcacttagatgctggtgtgttataagcactgagtaaatgttagctattattaacattgatgttatagtagggaaaattggtgtccccaacacctaatgggatgaggcaaaggtataacttggaaaaagcatcgttacttattctctcctgaagaaattattagaaaagaccaaagttggcagaggaagtacttgccaaaatttctggagatgggcacttgttccctatttagataaatagtttataaatatcactttaaaaacaaaactccattcacatcaaacaagatcaaaatgttagggtatgtatttctttttttttttttttttttttttgccagaaagctaagagattttaaaaagtattaactatcataggaatcatatggcaaaatattttatcaaacaaatctgatagtgagcctcttttttaaaatgttgcttaaggccaggagcagtggctcacacctataatcccagcactttgagaggctgaggtgggtggatcacttgacattaggagtttgagaccagtctggccaacatggtgaagccccgactctactaaaaatacaaaaatgagccaggcatggtggtgcacacctgtaatcccagctactcgggaggctgaggcaggagaatctcttgaacatgggagacagaggttgcagtaagctgagatcgcatcacttcactccagccttgggcgatagagcaagactctgtttcaaaaaaataaaaataaatgttgcttatatctaagaactgactagtatatgaaatatttgccagattattaattgtagatattgaataacaatagaatatctgaaaactaaaataaaaattttcacttgatctttattttttcaactcttctctattaaaaaaatgaaattcttttaaattcagatttcaagagtaattttcctgctagagctgcttaccaagttgctgctttacccaaagtaagtacactttaaatgactaatgtacacagttttcagtttctacattgttttccttctataagtaaactaagcactgtgaaaggaaacttaaaagaagtagcctgggcagggtggcttacccctgtaatcccagtgctttgagaggccaacacaggaggatcgcttgaggccaggagttctagaccagcctgggcaacatagcaagacagccatccctacaaaaacaatttaaaattagccatgcatggtggtggtgcacacctatagtcccagctacttggtaggctgaggtgggaggaacacttgaacccaggagttcaaggctgcagtgagctataatcgaaccactgtgctgcagcctgggtaacagtgtgaccttgtctcttaaaaaaaaaaaaaaaaagaaaagaaatagaccctgcttccccagggacttaaagtctgaaaggaaatatcccatattacatgcatgaaaaaaaaattaagaaaccttttaagacagcacatgaacagagaatcagaatcaaaatacttaaattgtgagaaaaggccaggcgcggtggctcacgcctgtaatcccagcgctttcggaggcygaggcgggcggatcacaaggtcagaagatcgagaccatcctggctcacatggtgaaacccgtctctactaaaaatacaaaaaaaaattagccgggtgtggtggcggacgcctgtagtcccagctactcgggaggctgaggcaggagaatggcatgaacccaggaggcagagcttgcagtgagccgaaatcgcgccactgcactccagcctgggcgacagagcgagactccatcacaaaaaaaaaaaaattgtgagaaaaaataaaatagcagctgtactgttgtagtgttacttaggggacta

SEQ ID NO: 686924 - DNA, 617 bp, Homo sapiens
atgagagcttcaagtttctttctgtcaagttcactccaccagaaaaatgactctatcactttacacttgacaatgttagaaattatttaaaagccaacccaactgtttttaagttaacattttcattgggaatgattagtgtctcacacacttttctatatgtttgaattccaaaatgcttacagtagacacttctttatgaaatgaataaatatacatagactaaaatagaactcagctttaaaacaagtttacctgtgtctatgttacacattccagaaagcgcctttagtatttcttcctctttgcctttcaactccaaacaacagtaataggataaatcctgcacaaagcgggagacacaattaagtacttaggaatttacacaggcaaaactgctaagaagccaaaagccgtatcacaaaacctttagaggcctaagacacaaaacaaattgctaaagctatgttytcataagtcaaaatctaaaccttctcctgcccgatggtttagtggaaaaaatatctaaacctgtccattcctgtcaccttaacaaatatttttaaaccaacccgaaccaaaataaaaatgaatctccatttaaaatgtaagttacg

SEQ ID NO: 686925 - DNA, 608 bp, Homo sapiens
agttgataaagcagcagctgtgttcgagaagattaagtagagattttgaaagaatttctactgcaagtcaaatgctgtcaaacagtatggcatgctacaaagaaatctttcatgaaagagttaatcgatgtggcaaacttcattattgtcttatcttaagaagttgccacagccaccccaaccttcagcaaccaccaccctgatcaatcaacaaccatcaacactgaggaaagtccctacaactagcaaaaagataggactcactgcaagctcagatgatcattagcatttttagcaataaagtattttaattaagrtatgtactttttttagacataatgctattgcacatttgataaactacagtacagtgtaaacataacttttatgtacactgggaaaccaaaaatttagtgtgacttgctttattgagagattagctttattgtgatgtggtctggaaccaaacccacatatctccaagatacacctgtacgaagaagtacattgctgctttactgaagaaaaaaattgaaaaaaaaaaaagagaaaaaagatgtagaaccaacttgaaatgcccttaaagaaatgaatattatggtatatcg

SEQ ID NO: 686926 - DNA, 662 bp, Homo sapiens
cctgtctcaaaaaaaaaaaaaaaaaaaaggaaaaaaaaaaagaggaaaatgtggtccctggtatcctagggtttactgtcttcggggaaattcaaatagctactcccttcattaagcacaacttggtggctacacattacctcttacccaagtatttctatacactctgtccgtatgmttttgtgaatcctcaccatacctcctcaaagtagaaaaaggtactacatcatttcttctagcaggctaacttgaaaagcaatgagatatatttttgtccacaaacaggagacattctatgcctaatctacgttattatatactaaatattgtagacagatgcgttgttttcacatctgaatttgtttaaagatgtgtctgttttctgaactccacatttcatcaaatcatacactgctctgagcctaatcctttggtgctcattatctcccttgattctgttgtaaattgatccatgcacaaattcattgtgacagctgaactaacagaacccttgttataagcaccgttgtgataagcacacaaagaaactaaatactaggcaacattacagaagggattagaactaaagctaacatacctgaaattcacattatgatggaagcttttcaactcagttcattaccctaatcggaaatgaaaag

SEQ ID NO: 686927 - DNA, 662 bp, Homo sapiens
cctgtctcaaaaaaaaaaaaaaaaaaaaggaaaaaaaaaaagaggaaaatgtggtccctggtatcctagggtttactgtcttcggggaaattcaaatagctactcccttcattaagcacaacttggtggctacacattacctcttacccaagtatttctatacactctgtccgtatgattttgtgaatcctcaccatacctcctcaaagtagaaaaaggtactacatcatttcttctagcaggctaacttgaaaagcaatgagatatatttttgtccacaaacaggagacattctatgcctaatctacgttattatatamtaaatattgtagacagatgcgttgttttcacatctgaatttgtttaaagatgtgtctgttttctgaactccacatttcatcaaatcatacactgctctgagcctaatcctttggtgctcattatctcccttgattctgttgtaaattgatccatgcacaaattcattgtgacagctgaactaacagaacccttgttataagcaccgttgtgataagcacacaaagaaactaaatactaggcaacattacagaagggattagaactaaagctaacatacctgaaattcacattatgatggaagcttttcaactcagttcattaccctaatcggaaatgaaaag

SEQ ID NO: 686928 - DNA, 630 bp, Homo sapiens
aacagggcactcattttgaagaaaggtgaacttaggctatattccatgtaactgacatataaaattatcaaccaaaaaaattatttgagggtaaataaaaatcagtcagaccacttttcttttttaataaaagcacctgaatttacatatctagaattcgttttgatcatcacaaagtaaatgcgatgaagttggatgataaacttaatgttgaaatttaaatatagagaaacaagaataggctaggcatggtgactcacgcctgtaatcccaatactttggcaggctgaggtgggaagaytgcttgagcccaggagtttgagatgagcctgggcaacatagtgagacctcatctctacagaaagaaaaagagacagagagagagaaagagaaacaagaacataattagtaattagaaaggtactcttggaacaattgttgaactcacatggagatgtggacgcctgcctaggggagaggctgaactttaagagctacagaggcaagtctgtcatcaaaccatgacaaagagttgtttccttcagatatacttttccaattttattttctttaatttcttttagattcctataagataaactcttatttcaaaaacatgatagcacaaaa

SEQ ID NO: 686929 - DNA, 658 bp, Homo sapiens
ttacatataacaacatatatgtccccacaagggccttgggtttacaaattgcagagaagtttggaatgaggcttgtaatatcagattatttagggttgactcttacttattgtttacctgccccactgaaacataaacttcaaaaggacagaaacctcctatcttagtatatagtaagcactcacaagttgttgatcrtttgaattgttcatctcttttctcctgatcccttctaattctaaaattccgtaatttttgtaatgtacaaatgttaaatttgtatcttacaaatgaatcttaataatttttatgaaaatacagacccacagaaaaccagaaaaagccaatttagctcttttagggcatccaatgaaatgaagacttacagttaatccattttttttaagtctcacatgaagaagtctcacattatttaaacccagaagtgcgtaagtattttttgttctcactgacatagttgatctagacatgaaacaaaggggagagatgggaaagcggataacgagaaggaaaaaaagactaaaaattattgatttcctgcaatgtgaaaagccattttgttggacatattttatatctttctaaatgtatccccaaaattctgaaaggtatgtttttattaactctgtttttctca

SEQ ID NO: 686930 - DNA, 660 bp, Homo sapiens
ggaatatataattttgtacctgacacatagaaggtatttaataattgctttgggggttttgtagttactgttgttgccattgttgttttgttttgtttgtgtggttgatacagggtcttgctctgttgcccaggttggctttgagtggtgtaatctcagcttactgcaacctctgcctcctgggctcaagcaataatagttgtttttgctcttttcattcctataaattctagaattctctaaaattccacatttgcatataatgtttaaaatattctttaacttttctttttctctggtgtccctactatgtcatttactttctttttaaggcacttaaaaaaaaaaaaacttttgctcacagcctggcacatagaatattgaattagtggtggatcatcagaatttaaaaagggttttaataacatatcgaatgttatttcctttcagggatctattattgaacacttaaatattaaaagaatgttggatgttgattctggcagaaagaaatagagtgaagtaaaagaccagggggaaaaaaaaaaggaaaaatcgtttgagaaagagagargagagggcataactcatgtacatgcaaaatacgaaatatttctgtcagtggtggtttttgctactggaccacaaaaatggatcaca

SEQ ID NO: 686931 - DNA, 634 bp, Homo sapiens
ccaacatggagaaaccccatctctactaaaaatacaaaattagccgggcgtggtggtgcatgcctgtaatctcagctactcgggaggctgaggcaagagaatcgcttgaacctgggaagtggaggttgctgtgagccaagatcatgccattgcactccagtgggcaacaagagtgaaactctgtctcaaaaaaaaaaaaaaaaaaaaaagatttatctgtgaagttcttttaagaaagacctgtaattgcaaaagtttcactttgtattaacataggcttgcttttgcctttcagcaacccaaattcttggtttcgataaatattgactagaaaaraaatggaaaggcaatacaaagattcctaagtctggcaagaggttttgcataaacccagttcccaaggtatgtatccagtgagatagaatacttacacatgtcaggaaaagcaaatgtattactcacaaataggcaacaagaatcaacagaagcctaggatctatggcaagcccattccccaaggctccagaaagttgcatagggttggatggagtcttgtctgcgcatgacttatagctaaggattccctcaagcactctgctctgggttttacaccctgggcagcacagggatgatg

SEQ ID NO: 686932 - DNA, 634 bp, Homo sapiens
ccaacatggagaaaccccatctctactaaaaatacaaaattagccgggcgtggtggtgcatgcctgtaatctcagctactcgggaggctgaggcaagagaatcgcttgaacctgggaagtggaggttgctgtgagccaagatcatgccattgcactccagtgggcaacaagagtgaaactctgtctcaaaaaaaaaaaaaaaaaaaaaagatttatctgtgaagttcttttaagaaagacctgtaattgcaaaagtttcactttgtattaacataggcttgcttttgcctttcagcaacccaaattcttggtttcgataaatattgactagaaaaaaaatggaaaggcaatacaaagattcctaagtctggcaagaggttttgcataaacccagttcccaaggtatgtatccagtgagatagaatacttacrcatgtcaggaaaagcaaatgtattactcacaaataggcaacaagaatcaacagaagcctaggatctatggcaagcccattccccaaggctccagaaagttgcatagggttggatggagtcttgtctgcgcatgacttatagctaaggattccctcaagcactctgctctgggttttacaccctgggcagcacagggatgatg

SEQ ID NO: 686933 - DNA, 634 bp, Homo sapiens
ccaacatggagaaaccccatctctactaaaaatacaaaattagccgggcgtggtggtgcatgcctgtaatctcagctactcgggaggctgaggcaagagaatcgcttgaacctgggaagtggaggttgctgtgagccaagatcatgccattgcactccagtgggcaacaagagtgaaactctgtctcaaaaaaaaaaaaaaaaaaaaaagatttatctgtgaagttcttttaagaaagacctgtaattgcaaaagtttcactttgtattaacataggcttgcttttgcctttcagcaacccaaattcttggtttcgataaatattgactagaaaaaaaatggaaaggcaatacaaagattcctaagtctggcaagaggttttgcataaacccagttcccaaggtatgtatccagtgagatagaatacttacacatgtcaggaaaagcaaatgtattactcacaaataggcaacaagaatcaacagaagcctaggatctatggcaagcccattccccaaggctccrgaaagttgcatagggttggatggagtcttgtctgcgcatgacttatagctaaggattccctcaagcactctgctctgggttttacaccctgggcagcacagggatgatg

SEQ ID NO: 686934 - DNA, 2681 bp, Homo sapiens
tgattaggttacaaaagacactgacttttatcttactgagatttcctctctggctcttcatacttgcttgtcctgatgaagaggactactgggtaagaattgagagtggcctctggccattagccaacaaggagctaaggccctcagcccaacaacccttgaagaactgaaccctgctgactactgaatgaggttggtggcaaattctgccccagttgaaccttggcatttctgaggccccagtcaacaccttgattacaaatttgtgaagacccttaagcagatgacccagcaaagccatgctcaatttctgacccacaaaaatggatgttgtgttaagttgctgaatactgatgcaatttgttacatagtaatagttaactaatgtatctcgctaaagtctaacgttaaatgcagccaaaaggactgtaaaagtcagatcaagctgctcctctacctaaaatcaagcaatagctttcaatctcacttggggcaaaagccaaaatcctgtgctaggcattgaggtcatatttgatcaggccgccattagttctctgacttgatctcctgtgattctcactcttgtgtttttgtttcacgtggaccttttggatgttcttgaacctgtaagcatgctcccttatttagagtctttgtacttgctttttcatctgcttgaaaacttttctctttatatccacatggtttgttccttcactctttgatctctgctcaaatgtctccttatcagtaagaccttccctaatcaccttataaagtataaacaattttcctccctggcccttttaccttccctaatatattcttctctctatttattatatctacttatgcctttacctatatacatatatattataagtaattatgtgtattattttccccctaacaaaataaaagctcaaggaaggaaaagactgatgtgtttgctgctgtatccccagtgctagaacagagcttaacgtgtaaatgttcaataaacatttgttgaataaataaatgaactactgtttctttagcagtgaaattggtacatttgacagttgtaaacatttaaggagagaaaaatgaggatgggacagggttctactcaggaactgycttagcaaacagcacataaatagtcataagaatataacttgctattaacaacccatcattggctagaatatggagcaaaattataatttaatggtattataaactagtaatttttcacataaagaaaaaaatctgtttcataatcacagactgtacccctaatcttggctaatcatcttgcaaatgcctgcgattagtcacaatggctaatgtgaaagggagtgccagtggctcaggcagcacaatccatcaccaacacaggggaaataactcaaattttgtatcctactaatggcgggtcagtagcttcaattttgtatttgaagagcaatccaaaccaaattccctaaaacacaccaaattttttataactggtctttgctaaaactagcattatctagcaatacaacagattccacattttaaaaaaattttagcaattgggaaagcaagagaattaaaagcatataaaaaaaaaccttgtaaggtaatcttgttggttgttttaatagaacttctaaatgtatggctatcgaaaaggacataattttatcgaaatatcagaatatcttactcattttttaaatggaacctaacaatttgattcaaattgcctttcaatacccatgctatgtattgagaacagattgaaaggtatgctatatggccctataggggattactgttgcatccatcctatgatgtaatgtcttaacactggaagctgaatataagagagtaataggaacctctaacaatacccagaaaggcaaaaagctaagtgaattaggtatctaaagacattaaagatgataaggatttttcaactgtttggagcaagaaaataaatcatggaataggcctgcttttcaaggataacaatggacccagcatggtggctcacgcctgtaatcccagcactttgggagggcgaggcaggcagatcacctgaggtcaggagttcgacaccagcctggccaacatggtgaaacctcgtctctaataaaaatacaaaaattagccgggtgtggtggcagatgcctgtaatcccagctactcaggaggctgaggcaggagaatcacttgaacccaggaggcagaggttgcagtgagctgaggttacgccattgcactccagcctgggtgacacagtgagactccatctcaaaaaaaaaaaaaatgttaacaggtgagagaatactaaaatatttctatttggtctccttcaagttagaaaggtccaatttaaggaaaaaaaaaaaaaaaaaaggaatcctagcccaagatagctgaaaagatagtaaaaagggaacttagccactctgaatttaagtctctaagaccaagcaaattacatcctcagaagctgaaggaatttgtagatggaatctcagcactgctatttggtatgaagattagtgtagaagtcagaaaattaaaggtagctctatgttgctctgttttttaaaaaaataaaatacagattttttttaaaagcaacagccatagatctcagacaaaatccaagagaggatgtattaagcaaatacattgtaaac

SEQ ID NO: 686935 - DNA, 2681 bp, Homo sapiens
tgattaggttacaaaagacactgacttttatcttactgagatttcctctctggctcttcatacttgcttgtcctgatgaagaggactactgggtaagaattgagagtggcctctggccattagccaacaaggagctaaggccctcagcccaacaacccttgaagaactgaaccctgctgactactgaatgaggttggtggcaaattctgccccagttgaaccttggcatttctgaggccccagtcaacaccttgattacaaatttgtgaagacccttaagcagatgacccagcaaagccatgctcaatttctgacccacaaaaatggatgttgtgttaagttgctgaatactgatgcaatttgttacatagtaatagttaactaatgtatctcgctaaagtctaacgttaaatgcagccaaaaggactgtaaaagtcagatcaagctgctcctctacctaaaatcaagcaatagctttcaatctcacttggggcaaaagccaaaatcctgtgctaggcattgaggtcatatttgatcaggccgccattagttctctgacttgatctcctgtgattctcactcttgtgtttttgtttcacgtggaccttttggatgttcttgaacctgtaagcatgctcccttatttagagtctttgtacttgctttttcatctgcttgaaaacttttctctttatatccacatggtttgttccttcactctttgatctctgctcaaatgtctccttatcagtaagaccttccctaatcaccttataaagtataaacaattttcctccctggcccttttaccttccctaatatattcttctctctatttattatatctacttatgcctttacctatatacatatatattataagtaattatgtgtattattttccccctaacaaaataaaagctcaaggaaggaaaagactgatgtgtttgctgctgtatccccagtgctagaacagagcttaacgtgtaaatgttcaataaacatttgttgaataaataaatgaactactgtttctttagcagtgaaattggtacatttgacagttgtaaacatttaaggagagaaaaatgaggatgggacagggttctactcaggaactgtcttagcaaacagcacataaatagtcataagaatataamttgctattaacaacccatcattggctagaatatggagcaaaattataatttaatggtattataaactagtaatttttcacataaagaaaaaaatctgtttcataatcacagactgtacccctaatcttggctaatcatcttgcaaatgcctgcgattagtcacaatggctaatgtgaaagggagtgccagtggctcaggcagcacaatccatcaccaacacaggggaaataactcaaattttgtatcctactaatggcgggtcagtagcttcaattttgtatttgaagagcaatccaaaccaaattccctaaaacacaccaaattttttataactggtctttgctaaaactagcattatctagcaatacaacagattccacattttaaaaaaattttagcaattgggaaagcaagagaattaaaagcatataaaaaaaaaccttgtaaggtaatcttgttggttgttttaatagaacttctaaatgtatggctatcgaaaaggacataattttatcgaaatatcagaatatcttactcattttttaaatggaacctaacaatttgattcaaattgcctttcaatacccatgctatgtattgagaacagattgaaaggtatgctatatggccctataggggattactgttgcatccatcctatgatgtaatgtcttaacactggaagctgaatataagagagtaataggaacctctaacaatacccagaaaggcaaaaagctaagtgaattaggtatctaaagacattaaagatgataaggatttttcaactgtttggagcaagaaaataaatcatggaataggcctgcttttcaaggataacaatggacccagcatggtggctcacgcctgtaatcccagcactttgggagggcgaggcaggcagatcacctgaggtcaggagttcgacaccagcctggccaacatggtgaaacctcgtctctaataaaaatacaaaaattagccgggtgtggtggcagatgcctgtaatcccagctactcaggaggctgaggcaggagaatcacttgaacccaggaggcagaggttgcagtgagctgaggttacgccattgcactccagcctgggtgacacagtgagactccatctcaaaaaaaaaaaaaatgttaacaggtgagagaatactaaaatatttctatttggtctccttcaagttagaaaggtccaatttaaggaaaaaaaaaaaaaaaaaaggaatcctagcccaagatagctgaaaagatagtaaaaagggaacttagccactctgaatttaagtctctaagaccaagcaaattacatcctcagaagctgaaggaatttgtagatggaatctcagcactgctatttggtatgaagattagtgtagaagtcagaaaattaaaggtagctctatgttgctctgttttttaaaaaaataaaatacagattttttttaaaagcaacagccatagatctcagacaaaatccaagagaggatgtattaagcaaatacattgtaaac

SEQ ID NO: 686936 - DNA, 2681 bp, Homo sapiens
tgattaggttacaaaagacactgacttttatcttactgagatttcctctctggctcttcatacttgcttgtcctgatgaagaggactactgggtaagaattgagagtggcctctggccattagccaacaaggagctaaggccctcagcccaacaacccttgaagaactgaaccctgctgactactgaatgaggttggtggcaaattctgccccagttgaaccttggcatttctgaggccccagtcaacaccttgattacaaatttgtgaagacccttaagcagatgacccagcaaagccatgctcaatttctgacccacaaaaatggatgttgtgttaagttgctgaatactgatgcaatttgttacatagtaatagttaactaatgtatctcgctaaagtctaacgttaaatgcagccaaaaggactgtaaaagtcagatcaagctgctcctctacctaaaatcaagcaatagctttcaatctcacttggggcaaaagccaaaatcctgtgctaggcattgaggtcatatttgatcaggccgccattagttctctgacttgatctcctgtgattctcactcttgtgtttttgtttcacgtggaccttttggatgttcttgaacctgtaagcatgctcccttatttagagtctttgtacttgctttttcatctgcttgaaaacttttctctttatatccacatggtttgttccttcactctttgatctctgctcaaatgtctccttatcagtaagaccttccctaatcaccttataaagtataaacaattttcctccctggcccttttaccttccctaatatattcttctctctatttattatatctacttatgcctttacctatatacatatatattataagtaattatgtgtattattttccccctaacaaaataaaagctcaaggaaggaaaagactgatgtgtttgctgctgtatccccagtgctagaacagagcttaacgtgtaaatgttcaataaacatttgttgaataaataaatgaactactgtttctttagcagtgaaattggtacatttgacagttgtaaacatttaaggagagaaaaatgaggatgggacagggttctactcaggaactgtcttagcaaacagcacataaatagtcataagaatataacttgctattaacaacccatcattggctagaatayggagcaaaattataatttaatggtattataaactagtaatttttcacataaagaaaaaaatctgtttcataatcacagactgtacccctaatcttggctaatcatcttgcaaatgcctgcgattagtcacaatggctaatgtgaaagggagtgccagtggctcaggcagcacaatccatcaccaacacaggggaaataactcaaattttgtatcctactaatggcgggtcagtagcttcaattttgtatttgaagagcaatccaaaccaaattccctaaaacacaccaaattttttataactggtctttgctaaaactagcattatctagcaatacaacagattccacattttaaaaaaattttagcaattgggaaagcaagagaattaaaagcatataaaaaaaaaccttgtaaggtaatcttgttggttgttttaatagaacttctaaatgtatggctatcgaaaaggacataattttatcgaaatatcagaatatcttactcattttttaaatggaacctaacaatttgattcaaattgcctttcaatacccatgctatgtattgagaacagattgaaaggtatgctatatggccctataggggattactgttgcatccatcctatgatgtaatgtcttaacactggaagctgaatataagagagtaataggaacctctaacaatacccagaaaggcaaaaagctaagtgaattaggtatctaaagacattaaagatgataaggatttttcaactgtttggagcaagaaaataaatcatggaataggcctgcttttcaaggataacaatggacccagcatggtggctcacgcctgtaatcccagcactttgggagggcgaggcaggcagatcacctgaggtcaggagttcgacaccagcctggccaacatggtgaaacctcgtctctaataaaaatacaaaaattagccgggtgtggtggcagatgcctgtaatcccagctactcaggaggctgaggcaggagaatcacttgaacccaggaggcagaggttgcagtgagctgaggttacgccattgcactccagcctgggtgacacagtgagactccatctcaaaaaaaaaaaaaatgttaacaggtgagagaatactaaaatatttctatttggtctccttcaagttagaaaggtccaatttaaggaaaaaaaaaaaaaaaaaaggaatcctagcccaagatagctgaaaagatagtaaaaagggaacttagccactctgaatttaagtctctaagaccaagcaaattacatcctcagaagctgaaggaatttgtagatggaatctcagcactgctatttggtatgaagattagtgtagaagtcagaaaattaaaggtagctctatgttgctctgttttttaaaaaaataaaatacagattttttttaaaagcaacagccatagatctcagacaaaatccaagagaggatgtattaagcaaatacattgtaaac

SEQ ID NO: 686937 - DNA, 701 bp, Homo sapiens
aaataaaatgttacrtattttctattcatagattgaagaatttccatttttatatttatgctgcaagaagactattcactaagcctacatatgtaataatttattggaaacaaagagtaagatatttttaaattcttcatatttatctaacctagtgtcatttttatatctttatgattaactctttttctaatttttgttttcatcaacacataaaataatttttaaaattctactatcagaaaatgtcacttctctttcagccaaagtcagaatttcatacattttaaaaataagtaacaggcattgtaataatagccataacgtgtaacactaaattcccaatgataaagggatgagctgtttaagttatatattcagttgcaaaatggtaatttaaaacaggaagtaaactggcagattgtttaagtgacagacaataaatttaactttaatcagttaaagaaaaggtattaaagaatgattttttctttttatagttaatgaaattatcttctaataccagtaattttttccatttcggtttttcactctgacttactgcttggcagatgctggcattcctagtctgggttattcctcccacaaagaccacacaggttaggaaaatatgaaagcacaagttcacaagcatgtgccagctcttgaggctgattctaatcaaactgtttaaaaaagag

SEQ ID NO: 686938 - DNA, 701 bp, Homo sapiens
aaataaaatgttacgtattttctattcatagattgaagaatttccatttttatatttatgctgcaagaagactrttcactaagcctacatatgtaataatttattggaaacaaagagtaagatatttttaaattcttcatatttatctaacctagtgtcatttttatatctttatgattaactctttttctaatttttgttttcatcaacacataaaataatttttaaaattctactatcagaaaatgtcacttctctttcagccaaagtcagaatttcatacattttaaaaataagtaacaggcattgtaataatagccataacgtgtaacactaaattcccaatgataaagggatgagctgtttaagttatatattcagttgcaaaatggtaatttaaaacaggaagtaaactggcagattgtttaagtgacagacaataaatttaactttaatcagttaaagaaaaggtattaaagaatgattttttctttttatagttaatgaaattatcttctaataccagtaattttttccatttcggtttttcactctgacttactgcttggcagatgctggcattcctagtctgggttattcctcccacaaagaccacacaggttaggaaaatatgaaagcacaagttcacaagcatgtgccagctcttgaggctgattctaatcaaactgtttaaaaaagag

SEQ ID NO: 686939 - DNA, 701 bp, Homo sapiens
aaataaaatgttacgtattttctattcatagattgaagaatttccatttttatatttatgctgcaagaagactattcactaagcctacatatgtaataatttattggaaacaaagagtaagatatttttaaattcttcatatttatctaacctagtgtcatttttatatctttatgattaactctttttctaatttttgttttcatcaacacataaaataatttttaaaattctactatcagaaaatgtcacttctctttcagccaaagtcagaatttcatacattttaaaaataagtaacaggcattgtaataatagccataacgtgtaacactaaattcccaatgataaagggatgagctgtttaagttatatattcagttgcaaaatggtaatttaaaacaggaagtaaaytggcagattgtttaagtgacagacaataaatttaactttaatcagttaaagaaaaggtattaaagaatgattttttctttttatagttaatgaaattatcttctaataccagtaattttttccatttcggtttttcactctgacttactgcttggcagatgctggcattcctagtctgggttattcctcccacaaagaccacacaggttaggaaaatatgaaagcacaagttcacaagcatgtgccagctcttgaggctgattctaatcaaactgtttaaaaaagag

SEQ ID NO: 686940 - DNA, 899 bp, Homo sapiens
aaaacaaaaaccaaaaaacaacaaaaaagcaaacccacagtgagtaatgcacgtagatgaaggcccagtgtgggcattgtggggaacttgtcgttggcaaatccagcctgcatgcatgccatttgattacctttggggggcacgcttgcatgggggaatttaggcatgccctgaaaagatatatagcagcagaaaagggctgggaggggcttttttcccttggggatgctagtaaactgcatagtgtgtctgcattttgatggtgacccatcacatgtgaccaggtgtggaattttgcacttgaggtattactwgtcggaactcaaaaagttttggattttggagcatttcaggttttggatttttggattagggatgctcaatgctcaatctgtagtaaggttttatcttaatcaaaaaacagatcattattttgttagggaataataattcttcagataaattcaagagaaatgtgatccatttcacccaccttaacacagaggcaccagtgtgcctgctaaggttatttatagatccgaagtcacttaatggtgcagataatctcccactttttcttcccatcatagtgtctgggcttatgttgttcaacaccaacagggtagccactgggcatttaaattcaaatgtaaattaattaaaatgaaatgaaaaatttaattcttattgcacactatctacattccacacactatgtagccacagttggccaccatattagacagcaaagaactagaacagctatacaatcacagaatgtattattagacagcactggacatggttgggttggtcaaatgaactgctattcaaatttaatacaacactgataaatgataaatggagaccatttatttacttcccattgagaaagctct

SEQ ID NO: 686941 - DNA, 646 bp, Homo sapiens
atagaaaaccatgaaaggctatgtttttatgcttatatatataatcccacaaaaagttaaaagttgatgaagacaatctaaggttccactcgatttcaygaaattttagacaagcttttatctcacctaggaccctgaccttccttttcttagaacatttactctagaaaacacataattgtacatcctttctctggccctttgagacgtaaattttttgaaagcttctaactcgttatagaactgaagaatggctttttgaaggatctgagagccattctatcgaagtgtaattgtcaagaaagataaaccacccctcctcatccccccacttcagtttctgtgggagagtgggggcctaacgttgcctttgttccaagctgtaaaattgcctccagtcatgaagatacaagaaaagtgatttttcctttgagtaaggccaattagcaaactcagatggcccctatcccaacttttaaaaactctccagctctttggcgtaagggtgggtggtgggtgactgggtattcaggcatcctattgctgacaatagtatagaaatgaaatcaacttctctctgcttattttgtctggtgcaatgtttttctctttgataatgttgaaaactgattacaaatctcagtcc

SEQ ID NO: 686942 - DNA, 600 bp, Homo sapiens
acactcctgtatcattcacaagttttttttaaaaaggcctatactatgttgagagttcatttaggttcacaattaatataattcatgctaatgatgggataataacttttgctaatgataggaaataactttgcttttagtattattagtgattttaattttttaacacaatggatagataactgaatttgatatattgtgacaaccttattagtataatatgattacacttttcattataaatwctgtttattaatttacatcaaataagaaacactccatgtaagattgatttttaatgggaattcaaaaatttttttgataattctttcaaaaaagtgcatatacatagagctatgtttttcaaaggctgattacttctaattatctcattaaaatgccttgagactatgtaaaaacttaaaaataaattagtgcatttactcaccggttgaccaggatctccatcttcacccttgtcaccaccaacaccatcttgaccctataagaggcaataaaatatgaagcaagatatatctcagtatcaataaatcacactacttatcaggaaaaaagtatgttaggccatctcttgagaaa

SEQ ID NO: 686943 - DNA, 916 bp, Homo sapiens
aaatatagctagccgtgctgattcttagaaacaaaacatattgtaacttcatttgaaagtaagtaataatttgttgaraattccttaatagataataattcagaaaattatttccgttattagacagcttttacttcacttggtatacaggatcaaatcaaaatcagttatgatccagaagcaaagaaaataagcaaaacaaacaatagtatattggagcagataatgggcattcagtctactttttacttggttattcttaaatacatctgctttgattaaattagaaatggccacattttttaatgactcatatcgtaatgattttttccagtttgtgataatgtttctttctcttctctagggaggtgatggtgaaccaggtcctagaggacagcaggggatgtttgggcaaaaaggtgatgagggtgccagaggcttccctggacctcctggtccaataggtcttcaggtaagatgatcctgtcattgtttactccatcatttctacctacttctcaccaggttttctggtggatgtaaaacaaagtatttttttctttttttctacgtaagaacttgggtacaatgtttatccataaagatcattttatttttaaatgagcagctgaacttgaaatcattttatcatgtatgattaattctcctgaacatgtatcagccctcgctcctgattctggagtatttttagacccaccttaattattacacttcctttcttcactcccattttgtttggaaaatgaattacaaccttgcctaagtctgatacttaaaagtaagataggaggagccaagatggccgaataggaacagctccagtctacagctcccagcgtgagcgacgcagaatacaggtgatttctgcattttcatctgaggtaccgggttcatc

SEQ ID NO: 686944 - DNA, 916 bp, Homo sapiens
aaatatagctagccgtgctgattcttagaaacaaaacatattgtaacttcatttgaaagtaagtaataatttgttgagaattccttaatagataataattcagaaaattatttccgttattagacagcttttacttcacttggtatacaggatcaaatcaaartcagttatgatccagaagcaaagaaaataagcaaaacaaacaatagtatattggagcagataatgggcattcagtctactttttacttggttattcttaaatacatctgctttgattaaattagaaatggccacattttttaatgactcatatcgtaatgattttttccagtttgtgataatgtttctttctcttctctagggaggtgatggtgaaccaggtcctagaggacagcaggggatgtttgggcaaaaaggtgatgagggtgccagaggcttccctggacctcctggtccaataggtcttcaggtaagatgatcctgtcattgtttactccatcatttctacctacttctcaccaggttttctggtggatgtaaaacaaagtatttttttctttttttctacgtaagaacttgggtacaatgtttatccataaagatcattttatttttaaatgagcagctgaacttgaaatcattttatcatgtatgattaattctcctgaacatgtatcagccctcgctcctgattctggagtatttttagacccaccttaattattacacttcctttcttcactcccattttgtttggaaaatgaattacaaccttgcctaagtctgatacttaaaagtaagataggaggagccaagatggccgaataggaacagctccagtctacagctcccagcgtgagcgacgcagaatacaggtgatttctgcattttcatctgaggtaccgggttcatc

SEQ ID NO: 686945 - DNA, 633 bp, Homo sapiens
ttacttgtactgagaatctgttagcttggatgttttctagtaaaaagtactgtgttcagtggtggggagggagtagtgagggaggtaggaaggcaaagataacattgcccagaacctccctaaactggtcagaaatgattctacccgccagctgatttacatagaaaccacgtggcaccatgacagaggctctagccaaagcaggaaaggtgcaacctttcaaggggacatacgtgcacatttatctccattgtcaagggtgtggctctgcagsagaggactcatgttggctgcacccatcctcttcctcactagaagatcaaggactagtgaggatattagttagttagcattttaattcttttagccatgtctttttgtgtgtttgacctcttttgagtggttaacacacatagtaggacagtattgtaggggtggtttgaactgttttatttgagtagtgtttttttgttgttgttgtttttgttttgagacagagtctcaccctgtcatgcaggctggagtgcagtggcatgatctcggctcactgcaacctccacctcttgggtttaagcgattctcctgcctcagcctcctgagtagctggggttacaggtgtgggctaccacacct

SEQ ID NO: 686946 - DNA, 1124 bp, Homo sapiens
tgttagccaggatggttttgatctcctgacctcgggattgcccgccttggcctcccaaaatgctaggattataggcgtgagctactgtgtctggccccataatttaatttttaaaacaaaagacccaaaagtcgcctgttttttttaagtatttaagaaaaacgttaatgaaaaccatattgtttttacttaagaatctgtgccctttgattataaaagaggaaagcttgttagtgaataatgaaaaatgaaatctaataaattgattttattcatgaccaaatatttcattactttcagaggtaaatgtggcacagttcctgttctcgtggatctgaacagcaaccaggagaccatgcttctgcagcctgagaagggttggcytgggaaaccaggcttccggagggctgcaggccctttggagggatatgaggagtcaaggcaggcttcttgagtagaacaaacaactcttcctgttaagcaatacaaacaaatagtttttctgggaccagattgatgtgttttagatactgttttctgcaaaatgtttattgcttgcctctgtgctgtggaattctaaagatgtgaataacatggtttgtcatcagcagtgttgaggtttattgagcatcttgtatctgctagcattgtgtggattggtaagtttgcatggattattttgcttattcctcacaactccatgagatacgtcatattattatcttcattttgtcagtgaagaaactgaagtctagacagagaaattgactagctcatgtttacaaaactagcaaggacaagggtatgttctgtcagtggagccctacagagaagggtgaggggagatggtacatgaaacatatgaattagtgaataataaggtttttacgttattcttatgttagaacgctaacctgtgaaatactgaccgtgtgattacaaaaggaattaaggaatggcatggcatgggttggaagcatcaacaatttctttttttttttttttcttttctttctttctttttttttttttttgagacggagactcactctgtcgcccaggctggagtgcagtggcgtgatctcggctcactgcaacctctgcctcccgggtttaagcagttc

SEQ ID NO: 686947 - DNA, 657 bp, Homo sapiens
caatctaaatcccttcatccacaaacgtgattgtttcatgtaataataataataacccctatatgtgcagagtccttacttccaaagtgttttcccagagaccacttcattcctttttggattatgaaatagaaagagtaggtgttattattcctcttttaccaaggtgaaattgaggctcagagacaaggtagatgatgagcycaaggtcagtgacagagccagcgttcaaatgaaggcaggtccccgggctctgcattccaggcttttgcatccaccaaacagactcccctgagttcatctcagctctgcagcctctttacaattgtgcccccaccttccccagtgccatcagcacaagattgggcattgggtcatgccttaaccccaacatgtggtcaataaaaatgtgcttttggttttctgttcatagcagagttcataatttttaagtcaggtgtcctggcctgttctctgactctgcaggtgggaacaactgtttctgcctcaaaagagaatggcatgatgataatggtgatgtcattttaaatatattaatctatctatctctttctcctgctatttccccctgtctctttcccctactctggcagacactatgcctgtgtttattactcagagaatggtgtgggagaa

SEQ ID NO: 686948 - DNA, 657 bp, Homo sapiens
caatctaaatcccttcatccacaaacgtgattgtttcatgtaataataataataacccctatatgtgcagagtccttacttccaaagtgttttcccagagaccacttcattcctttttggattatgaaatagaaagagtaggtgttattattcctcttttaccaaggtgaaattgaggctcagagacaaggtagatgatgagctcaaggtcagtgacagagccagcgttcaaatgaaggcaggtccccgggctctgcattccaggcttttgcatccaccaaacagactcccctgagttcatctcagctctgcagcctctttacaattgtgcccccaccttccccagtgccatcagcacaagattgggcattgggtcatgccttaaccccaacatgtggtcaataaaaatgtgcttttggttttctgttcatagcagagktcataatttttaagtcaggtgtcctggcctgttctctgactctgcaggtgggaacaactgtttctgcctcaaaagagaatggcatgatgataatggtgatgtcattttaaatatattaatctatctatctctttctcctgctatttccccctgtctctttcccctactctggcagacactatgcctgtgtttattactcagagaatggtgtgggagaa

SEQ ID NO: 686949 - DNA, 1361 bp, Homo sapiens
aaaacatgccaggcactatggctcattcttgtaataccagcactttaagaggctgaggcgggtgaatcatctgaggtcaggagtttgagaccagcctggccaacatggtcaaaccccatctctactaaaaaaaaaaatccaaaaaaaaaaaaaaaaaaatgcgtaagcataattttctagttaaatgcatgtaagcatattttttctagttaaatgccagttgtttgacgtgaaattagtagtgtgcttagtatgatgattaaatagagtggtacctgaatgaatcagttatgcagtagctacacattttatcatacaggctgagttattgtactagttttcaaacaaatcaatctttattacacaaatacctaccttttcaaatcttaaagaaaattctcaaaagtatgaaagagtaataggtttgttgaccactgtgatgatttatcaaataaggtagatcattttcttcagaatcaagaaagaaaaagtataaactgggcattctctatggattgaatgaaaacatatttcattgcatcacatacattatttaattctacagatggccatgtgggcccatgccaagtttaaacagccgtattcgtcaatttggttaaattaaacaaatcactttcattgagcaccaactttttgtctggaactgagtgaaatgccagggattccattaatgattaaaataggtctcttgacttagataagagcttataccctgtgtagtgccaaaacctgtagcaaaggctgaagaaaatatgtgtttacctaattgtttctgactttatatagactacattctcaagtagtaaatatacaattcatgtgttttaaagcaaccctcagtattcattacaatatttgcagaaacatatagctatctttaaatggacgcctatcaatagataaggcaatgttataatataaatcatataaagaatatttgttacaatctttagggtctgctagtaactaatcaatacttataagtagatgtggttgtgacatgctgaaaacaaagataccttgggctgagaaaagattgctactatttaattgcattttcctsattatttaatacaagctgtgcccatagtttccagtagttaaatgctgaataataatcttctttaattctttcacaaatcagctctaataagatacaaatttcagatgaattttttcttcttttctaaactgtgtttttttaaaattgtgtagaatgttacatcggtataaatgattctttggaaaatgccatctttattttttcacatacaattcatatgttccaacttcatggaacctagtaggatatgtatgttataaagactatggcaatatca

SEQ ID NO: 686950 - DNA, 648 bp, Homo sapiens
taatagctatttcttcagtttagattccaaaatgagaaaactcttggggaagagatttcacagctcactcacaactgctagcaagttatgcaaaagaaaagaaacgtttgctctggtaagcaactgagatttttcctgttttaaaaactgcaacaaactaatacacttaacatatataaagcactggttatagttcttagcatatcacttaactttgaattagataaacaacatggcatataaaaagtaacatgcattttgaaagaagaaagatttgcattctaaataaagctttattatatattaatgttaatgtaataatacatcataaagagagcagataacgcagaaaaaaagagagagagcagataaccatggaaggatagcaggctagataataacacaatcagattattgtagaaaaattactcaagttcagcaaactttttctstgaatagtcaaatagtaaatattttaggctttgtaggacatatggtgtctgttgcaatgactaaactttgtctcagcagtgctaaaagaaccacagacaatatggaatgaataagggtggctgtgttccaataattattttttttcaaaaacaggagatgggctaaccacaggtcatagtttgccagctacttttc

SEQ ID NO: 686951 - DNA, 616 bp, Homo sapiens
tttgaaccagctctggtttcctgccttgagtgtagtgtgaagatgagatgtagagctgcttcaatcaytttcaatcataagggaaaggccaagaaaattacagacatgccactggaggctccaatcgtgttgagtcaatgaaccttcacctgaaactattgacctccattttttttttaagatgaagaaaaaagaaagaaatccgtatttctaaagctctgtcaggttttatgttacttggagtcaaaccccatgatgattaatggatgatgtgtggatatctagtcattataccgtttctctacagtctcccatgacttttgatattttttcattttagaatttttcaggttgagatttcctgaagtgcaatgatcataaatttgtcaaattcaactcaacaaatgtttactatctcattcttctattaaactgtgggctgatgaaggacaatgttttatttatctttgcatatctagtattttgatgaaacatataatagatattcaataaatttgtcttgaataaattaatttacatttttctaactgtaccaggaattgtgttggatgccagagaagcaaatataaatgtaacatgctaatttcacacaatg

SEQ ID NO: 686952 - DNA, 616 bp, Homo sapiens
tttgaaccagctctggtttcctgccttgagtgtagtgtgaagatgagatgtagagctgcttcaatcattttcaatcataagggaaaggccaagaaaattacagacatgccactggaggctccaaycgtgttgagtcaatgaaccttcacctgaaactattgacctccattttttttttaagatgaagaaaaaagaaagaaatccgtatttctaaagctctgtcaggttttatgttacttggagtcaaaccccatgatgattaatggatgatgtgtggatatctagtcattataccgtttctctacagtctcccatgacttttgatattttttcattttagaatttttcaggttgagatttcctgaagtgcaatgatcataaatttgtcaaattcaactcaacaaatgtttactatctcattcttctattaaactgtgggctgatgaaggacaatgttttatttatctttgcatatctagtattttgatgaaacatataatagatattcaataaatttgtcttgaataaattaatttacatttttctaactgtaccaggaattgtgttggatgccagagaagcaaatataaatgtaacatgctaatttcacacaatg

SEQ ID NO: 686953 - DNA, 616 bp, Homo sapiens
tttgaaccagctctggtttcctgccttgagtgtagtgtgaagatgagatgtagagctgcttcaatcattttcaatcataagggaaaggccaagaaaattacagacatgccactggaggctccaatcgtgttgagtcaatgaaccttcacctgaaactattgacctccatttkttttttaagatgaagaaaaaagaaagaaatccgtatttctaaagctctgtcaggttttatgttacttggagtcaaaccccatgatgattaatggatgatgtgtggatatctagtcattataccgtttctctacagtctcccatgacttttgatattttttcattttagaatttttcaggttgagatttcctgaagtgcaatgatcataaatttgtcaaattcaactcaacaaatgtttactatctcattcttctattaaactgtgggctgatgaaggacaatgttttatttatctttgcatatctagtattttgatgaaacatataatagatattcaataaatttgtcttgaataaattaatttacatttttctaactgtaccaggaattgtgttggatgccagagaagcaaatataaatgtaacatgctaatttcacacaatg

SEQ ID NO: 686954 - DNA, 616 bp, Homo sapiens
tttgaaccagctctggtttcctgccttgagtgtagtgtgaagatgagatgtagagctgcttcaatcattttcaatcataagggaaaggccaagaaaattacagacatgccactggaggctccaatcgtgttgagtcaatgaaccttcacctgaaactattgacctccattttttttttaagatgaagaaaaaagaaagaaatccgtatttctaaagctctgtcaggttttatgttacttggagtcaaaccccatgatgattaatggatgatgtgtggatatctagtcattataccrtttctctacagtctcccatgacttttgatattttttcattttagaatttttcaggttgagatttcctgaagtgcaatgatcataaatttgtcaaattcaactcaacaaatgtttactatctcattcttctattaaactgtgggctgatgaaggacaatgttttatttatctttgcatatctagtattttgatgaaacatataatagatattcaataaatttgtcttgaataaattaatttacatttttctaactgtaccaggaattgtgttggatgccagagaagcaaatataaatgtaacatgctaatttcacacaatg

SEQ ID NO: 686955 - DNA, 628 bp, Homo sapiens
tattgtatatactagccttttgggtttttgttgttgttgttgttgtttgtagagacaggttttcatcatgttgcccaggctgatctcgaactcctaggctcaagcaatctgcccacctcagcctcccaaagtgcggggttacaggagtgagccactgtgcccagcctatacactagccttttgttagatattccatttgccaatattttctctgaggttatagtttttcttttcgtcctgttactggagtttttcagaaagcagaggttatttatttatttctttatgagacagagtttccgtcttgttgcccaggctggagtgcaatggctcaatctcagctcaccgcaacctcctcttcccgggttcaaatggttctcctgcctcagtctcctgagtagctrggattacaggttcccaccaccacacccagctaatttttgtatttttaatagagacgggggttttgccgtgttggccaggctggtctctaactcgtgacctcatgatccacccgcctaggcctcccaaagtgctgggattacaggcatgagccaccgtgctctgccataaatgcttttcttttatgggtcatgcttttggtagaaagtctttttgcctagaccta

SEQ ID NO: 686956 - DNA, 628 bp, Homo sapiens
tattgtatatactagccttttgggtttttgttgttgttgttgttgtttgtagagacaggttttcatcatgttgcccaggctgatctcgaactcctaggctcaagcaatctgcccacctcagcctcccaaagtgcggggttacaggagtgagccactgtgcccagcctatacactagccttttgttagatattccatttgccaatattttctctgaggttatagtttttcttttcgtcctgttactggagtttttcagaaagcagaggttatttatttatttctttatgagacagagtttccgtcttgttgcccaggctggagtgcaatggctcaatctcagctcaccgcaacctcctcttcccgggttcaaatggttctcctgcctcagtctcctgagtagctgggattacaggttcccaccaccacacccagctaatttttgtatttttaatagagacgggggttttgccgtgttggccaggctggtytctaactcgtgacctcatgatccacccgcctaggcctcccaaagtgctgggattacaggcatgagccaccgtgctctgccataaatgcttttcttttatgggtcatgcttttggtagaaagtctttttgcctagaccta

SEQ ID NO: 686957 - DNA, 628 bp, Homo sapiens
tattgtatatactagccttttgggtttttgttgttgttgttgttgtttgtagagacaggttttcatcatgttgcccaggctgatctcgaactcctaggctcaagcaatctgcccacctcagcctcccaaagtgcggggttacaggagtgagccactgtgcccagcctatacactagccttttgttagatattccatttgccaatattttctctgaggttatagtttttcttttcgtcctgttactggagtttttcagaaagcagaggttatttatttatttctttatgagacagagtttccgtcttgttgcccaggctggagtgcaatggctcaatctcagctcaccgcaacctcctcttcccgggttcaaatggttctcctgcctcagtctcctgagtagctgggattacaggttcccaccaccacacccagctaatttttgtatttttaatagagacgggggttttgccgtgttggccaggctggtctctaactcstgacctcatgatccacccgcctaggcctcccaaagtgctgggattacaggcatgagccaccgtgctctgccataaatgcttttcttttatgggtcatgcttttggtagaaagtctttttgcctagaccta

SEQ ID NO: 686958 - DNA, 645 bp, Homo sapiens
agtgagacccaaacgagcaattctcaaagtgtggtcccaaaacagcagcatcagactcacctttaaaacacgcaattattttattttattttattttttttgtggcatggtctcgctctgttgcccaggctggagtgcagtggcatgatctcagctcactgtaacctccacctcctgaggttcagccaattctcaagcctcagccyccctagtagccaggattacaggtgtgcactaccatgcccaactaagttttgtatttttggtagagacagtgtttcaccacgttagccaggctggtctcgaactcctggcctcaagtgatccgcccgcctcagccttccaacatgctgggattacaggcctgagccaccgcacctggccataaatgcacattcttgagcagctgcatagatctactgaatgtgaaacctgaggagggcaccctgcaatctgtgttttaacaagccctccaagtgattctgatgcacgctagtgtgagaaccactgccaaaagttgttcaagtatctaagaaatcccttcattataacaaaataagacctccctagggtcacatcaaaatattaatagtcatccagacagaaagacacagcactggcccttaggagaacattagtttttaa

SEQ ID NO: 686959 - DNA, 581 bp, Homo sapiens
tggatgttttccttctagtggaagtgtttctagagtacatattgtaatttactaaaatgtttgacatcaaattcctttttctgtcattataatttctggcacatgcatttcacataaatgttggtcaaaggatgtttctagcacccctcccaccccaaaagttgctgcttctcaatgtttgtgaaacaaaattatatgcctttctttttcagagctgggtcatatgggctagtgagtttactcattggcatgtgatttggactttcatcaaaccagctaaccaagatgaaaatgtcaacttatttgaatgaacacgtctgtgttacttaaaaaaaaaaaaaagcatgttggcataacatacacaaacacgatattrgatttatttttattctttggacttaaaaatgtagtcgattcttatcattacaaaagaaaagatgaatatttttaaaaagagtgaaattatagaaacattcaaaagaaaaaaagtatccagaatattactatcagacataaccattgttattttggaatattatctttaaatcttttaactagacatatattttaatattcctttt

SEQ ID NO: 686960 - DNA, 625 bp, Homo sapiens
catgtagaagtgtcaggaaacttgttggtaaaaatcttgaatgaattcaaaattgtatttgaagatttgtgaaaatttgagaattccttagggagtagtcaaatatgaatagggccctgattcttgttaggacaaggaagaacggagtgtaagccattctattgccaaagggagatgaaagtcaatgagctaaatataatatgaccattctgcaactctaatgaattaatagatctagacaactgtcatcaatgcctcttaaactcacaaaagagagacagccagacatcatgtacctcttgatgaatctatacaaaaccacctacgaaatagtcatgcacaaaaygtcttatctaaatttgaccttttgacagtattactaagacgcaatcagaaaaatctgacaaatgacccatttcttcaacaaactgcaaaaccagaaagaagagagagagaacctatagattaaaagagatttacagaggaattatcttagcccagttaacccttgaacaacatggggattaagtgtggcaactcccagttcagccaaatacccatgcataccttttaactgccccaaaatgtaactactaatagcctattattgactggaaaccttgtc

SEQ ID NO: 686961 - DNA, 625 bp, Homo sapiens
catgtagaagtgtcaggaaacttgttggtaaaaatcttgaatgaattcaaaattgtatttgaagatttgtgaaaatttgagaattccttagggagtagtcaaatatgaatagggccctgattcttgttaggacaaggaagaacggagtgtaagccattctattgccaaagggagatgaaagtcaatgagctaaatataatatgaccattctgcaactctaatgaattaatagatctagacaactgtcatcaatgcctcttaaactcacaaaagagagacagccagacatcatgtacctcttgatgaatctatacaaaaccacctacgaaatagtcatgcacaaaatgtcttmtctaaatttgaccttttgacagtattactaagacgcaatcagaaaaatctgacaaatgacccatttcttcaacaaactgcaaaaccagaaagaagagagagagaacctatagattaaaagagatttacagaggaattatcttagcccagttaacccttgaacaacatggggattaagtgtggcaactcccagttcagccaaatacccatgcataccttttaactgccccaaaatgtaactactaatagcctattattgactggaaaccttgtc

SEQ ID NO: 686962 - DNA, 1007 bp, Homo sapiens
tgggataaacccaaagaaattcataaatattgtattgtgagatatatcatatgtcatgtctgtatgatatttcatacacatatacaaatacacayatcacacacatatacatttaaataatctttctatattaataagtatatatacataaattataaatctcaagatccataaagcagttttataaatatataaaatatttttatgtctatgatgtgtttatatatatgtatatatatgtttgtgtgtagacacacacatgtatatagttctggaaaaagaataaggaatactccatgtcacacctacacatactttaataaaccaaatgataaagagaagaaagtacaaaaaacataaatattttcattagagaaaaatcaaaatcagcatttcatagaagtttcatttcatttaatacttacgaacgtcttatgagataatcattatcacatttatttcaccagtgaggaaactgagatttagaaaaagtaagggatttacctaaggtcatgaagtcagcagatatcggagatgaaattagatctcaggtcttcttcccatctccaagcatctgctatttttatcacactaaaccatgttatccaggcaaataatacaattttaaatgtggaaaagtatttgaaattttccaatggcttctgcacatgttcattcttcaaagtgatcctgcacatttggaagggtagacattattcattctactttacacttaatggaactgaaacagcaaaacataaatgacttgcccaaggtcaactgatacatcagggccaaaagccaaatctccaatttcctgagctggagttatttttcacatcacattcctcctagtgaagctataaaacaacaatgtcattgcatccctaggagttgtcagaggaaaatctcaccagctcgggaagtggcattgggcaggaaaggggtgggggtgacatggctgtgacacagaactaactggagtcctggaggggagggaaaccctt

SEQ ID NO: 686963 - DNA, 1007 bp, Homo sapiens
tgggataaacccaaagaaattcataaatattgtattgtgagatatatcatatgtcatgtctgtatgatatttcatacacatatacaaatacacacatcacacacatatacatttaaataatctttctatattaataagtatatatacataaattataaatctcaagatccataaagcagttttataaatatataaaatatttttatgtctatgatgtgtttatatatatgtatatatatgtttgtgtgtagacacacacaygtatatagttctggaaaaagaataaggaatactccatgtcacacctacacatactttaataaaccaaatgataaagagaagaaagtacaaaaaacataaatattttcattagagaaaaatcaaaatcagcatttcatagaagtttcatttcatttaatacttacgaacgtcttatgagataatcattatcacatttatttcaccagtgaggaaactgagatttagaaaaagtaagggatttacctaaggtcatgaagtcagcagatatcggagatgaaattagatctcaggtcttcttcccatctccaagcatctgctatttttatcacactaaaccatgttatccaggcaaataatacaattttaaatgtggaaaagtatttgaaattttccaatggcttctgcacatgttcattcttcaaagtgatcctgcacatttggaagggtagacattattcattctactttacacttaatggaactgaaacagcaaaacataaatgacttgcccaaggtcaactgatacatcagggccaaaagccaaatctccaatttcctgagctggagttatttttcacatcacattcctcctagtgaagctataaaacaacaatgtcattgcatccctaggagttgtcagaggaaaatctcaccagctcgggaagtggcattgggcaggaaaggggtgggggtgacatggctgtgacacagaactaactggagtcctggaggggagggaaaccctt

SEQ ID NO: 686964 - DNA, 1180 bp, Homo sapiens
gtctatttaaattagtagcatctacctaattcagttattttaaaaagaaccaagcaaacagaaagcatctagcacttaacactcttaacaaaggaggttctcaataaacatgtgctgaattatgagatctgacaacattgtcttttaaggaacaccaaaaacagattttttgagaaaaccaagaggcagccgcagcatttcaaatcagctgatactaatgagtgatactcaaagactcaaattataacatggyaaaataatctttgactattttcctgtaaacttaaagaatttgacatgaatgttttaaagctaaccagctagatttagtaaatagataaaaatgcaaagagacaagaactcttctgtatttcttgcaacaccccaatactgtgggatcctacttgtgattttctcttcatcagcgaggctagaggtgggacgtagtacctccaagcttaacccaaatcaagctcctacttccttgtgtgtcttttcttccctctgactcacccagttgaatattcaggatgtgaccaaattatcttgtgaaaatgctgagtgttagttattttctgcaatgcagacacagtgctaattagataatgtctgagcagcatcctaacttatcagaataacctttttggttggagaaccatggaaacaaatagtcatcccattgccaatcatacttatatataggtcctgagtgagtgggtgactgctagggtaaccaggctgatgaggatgaccagggaagcagagggcctcatggagggcagtggaagttggggaaatgtgttcccttctccgcacacactctgtgcaacaagggtgtgcagtacagtactgtggaggctgtactgctcacaacacacatttgcgagaccccatgcacagacctcactcaatcaaggcctagaggctcaggtgcctctcccacctctcacggtggaaaaatgagtcttgctgacctagctcaagttggccagctgaagattttattttgagcaacatgttccaagaagcagctggagtggggctttctcatcattttccagtaaatgtgctatgtcaacattgattcagtgaccactgatcagaagaggatgccagctttcctgcccagaggcagacaatgccatctccattacagggccacattcaagcctaagacatc

SEQ ID NO: 686965 - DNA, 1180 bp, Homo sapiens
gtctatttaaattagtagcatctacctaattcagttattttaaaaagaaccaagcaaacagaaagcatctagcacttaacactcttaacaaaggaggttctcaataaacatgtgctgaattatgagatctgacaacattgtcttttaaggaacaccaaaaacagattttttgagaaaaccaagaggcagccgcagcatttcaaatcagctgatactaatgagtgatactcaaagactcaaattataacatggtaaaataatctttgactattttcctgtaaacttaaagaatttgacatgaatgttttaaagctaaccagctagatttagtaaatagataaaaatgcaaagagacaagaactcttctgtatttcttgcaacaccccaatactgtgggatcctacttgtgattttctcttcatcagcgaggctagaggtgggacgtagtacctccaagcttaacccaaatcaagctcctacttccttgtgtgtcttttcttccctctgactcacccagttgaatattcaggatgtgaccaaattatcttgtgaaaatgctgagtgttagttattttctgcaatgcagacacagtgctaattagataatgtctgagcagcatcctaacttatcagaataacctttttggttggagaaccatggaaacaaatagtcatcccattgycaatcatacttatatataggtcctgagtgagtgggtgactgctagggtaaccaggctgatgaggatgaccagggaagcagagggcctcatggagggcagtggaagttggggaaatgtgttcccttctccgcacacactctgtgcaacaagggtgtgcagtacagtactgtggaggctgtactgctcacaacacacatttgcgagaccccatgcacagacctcactcaatcaaggcctagaggctcaggtgcctctcccacctctcacggtggaaaaatgagtcttgctgacctagctcaagttggccagctgaagattttattttgagcaacatgttccaagaagcagctggagtggggctttctcatcattttccagtaaatgtgctatgtcaacattgattcagtgaccactgatcagaagaggatgccagctttcctgcccagaggcagacaatgccatctccattacagggccacattcaagcctaagacatc

SEQ ID NO: 686966 - DNA, 1180 bp, Homo sapiens
gtctatttaaattagtagcatctacctaattcagttattttaaaaagaaccaagcaaacagaaagcatctagcacttaacactcttaacaaaggaggttctcaataaacatgtgctgaattatgagatctgacaacattgtcttttaaggaacaccaaaaacagattttttgagaaaaccaagaggcagccgcagcatttcaaatcagctgatactaatgagtgatactcaaagactcaaattataacatggtaaaataatctttgactattttcctgtaaacttaaagaatttgacatgaatgttttaaagctaaccagctagatttagtaaatagataaaaatgcaaagagacaagaactcttctgtatttcttgcaacaccccaatactgtgggatcctacttgtgattttctcttcatcagcgaggctagaggtgggacgtagtacctccaagcttaacccaaatcaagctcctacttccttgtgtgtcttttcttccctctgactcacccagttgaatattcaggatgtgaccaaattatcttgtgaaaatgctgagtgttagttattttctgcaatgcagacacagtgctaattagataatgtctgagcagcatcctaacttatcagaataacctttttggttggagaaccatggaaacaaatagtcatcccattgccaatcatacttatatataggtcctgagtgagtgggtgactgctagggtaaccaggctgatgaggatgaccagggaagcagagggcctcatggagggcagtggaagttggggaaatgtgttcccttctccgcacacactctgtgcaacaagggtgtgcagtacagtactgtggaggctgtactgctcacaacacacatttgcgagaccccatgcacagacctcactcaatcaaggcctagaggctcaggtgcctctcccacctctcacggtggaaaaatgagtcttgctgacctagctcaagtyggccagctgaagattttattttgagcaacatgttccaagaagcagctggagtggggctttctcatcattttccagtaaatgtgctatgtcaacattgattcagtgaccactgatcagaagaggatgccagctttcctgcccagaggcagacaatgccatctccattacagggccacattcaagcctaagacatc

SEQ ID NO: 686967 - DNA, 1180 bp, Homo sapiens
gtctatttaaattagtagcatctacctaattcagttattttaaaaagaaccaagcaaacagaaagcatctagcacttaacactcttaacaaaggaggttctcaataaacatgtgctgaattatgagatctgacaacattgtcttttaaggaacaccaaaaacagattttttgagaaaaccaagaggcagccgcagcatttcaaatcagctgatactaatgagtgatactcaaagactcaaattataacatggtaaaataatctttgactattttcctgtaaacttaaagaatttgacatgaatgttttaaagctaaccagctagatttagtaaatagataaaaatgcaaagagacaagaactcttctgtatttcttgcaacaccccaatactgtgggatcctacttgtgattttctcttcatcagcgaggctagaggtgggacgtagtacctccaagcttaacccaaatcaagctcctacttccttgtgtgtcttttcttccctctgactcacccagttgaatattcaggatgtgaccaaattatcttgtgaaaatgctgagtgttagttattttctgcaatgcagacacagtgctaattagataatgtctgagcagcatcctaacttatcagaataacctttttggttggagaaccatggaaacaaatagtcatcccattgccaatcatacttatatataggtcctgagtgagtgggtgactgctagggtaaccaggctgatgaggatgaccagggaagcagagggcctcatggagggcagtggaagttggggaaatgtgttcccttctccgcacacactctgtgcaacaagggtgtgcagtacagtactgtggaggctgtactgctcacaacacacatttgcgagaccccatgcacagacctcactcaatcaaggcctagaggctcaggtgcctctcccacctctcacggtggaaaaatgagtcttgctgacctagctcaagttggccagctgaagattttattttgagcaacrtgttccaagaagcagctggagtggggctttctcatcattttccagtaaatgtgctatgtcaacattgattcagtgaccactgatcagaagaggatgccagctttcctgcccagaggcagacaatgccatctccattacagggccacattcaagcctaagacatc

SEQ ID NO: 686968 - DNA, 668 bp, Homo sapiens
ttataaagtgaatgacaattgacaaatcagccaacattaaatctagctataaattacatagtaatatcaagtgtaacttaaatggaaagcggagtaatgaagaggcagcaatggaatattatagcttagcaagaatgtgtttcagaaaattgcaatcgttctttctttaaattttgaaacaaatggctatattgtgctaaccaaacgccctctttcttcaaatataaattttattttaggaaatgaatgaagcaattttttcctcccactagtgccatggaagaactttgtcaagttctgaattttcttgtgtctttcttatgattaggcagagtaaggtgtttagtttctttcttatgattaggcacaataaggcatttactttctccattaggtccatctttttctgccaccttctttgctcgcacctgttaccctagctatcaccgatactgtgcttataacttctccatggtcccctgaactggatagyggcccccatgcaagccaatgcctcatttgatccactctgctgccttcattgaagtcttttagattttgttgttgtcaaataacctattcttttgtgactttcctctctagccttgaacagtatctactaccaattttaaaacacccaaattcatgaaaaacttctgtttctcatg

SEQ ID NO: 686969 - DNA, 590 bp, Homo sapiens
ttcgtctttctgtgactggcttatttcacttagtatactgtcctcaaggttcatccattttattgcatattgcaatatgcatattccatgcaatatgcatggattctactgaatccatgctgcaacagtggtttgttatgcaatatgcatattgcatattgcagaatttccttcctttttaaggctaagtagtattcccttgtaggtatataatgcattttctttatccgtagatctctgaaatggacattcagtttttttcccacattttagctattgtaactagtgctgcaataaacatgagagtgttaatatctcttcgagatcctgatttcagttcctttgaataaatacccagaagtgaaattgctgaatcatatagtagttctayttgtaatttttttaggaatctataaactatttttcatagtagctgtaccattttgtattcctaccaacagtgtgcaagcattccaatttctctgtattcttgccaatacttgtcttttttttgcttttaaaaattatatccattataatatgtgagagataatatctctgtgagactgtgattttgatttgcatttctc

SEQ ID NO: 686970 - DNA, 633 bp, Homo sapiens
ttttgatctgatgaaaatcaattcagtcaaaactcactagccaaatcagtaaggaaataaaatcactatattttatttgattgatttaaccatttgagtcttttgtgatgcttaatctagagccagcacaagtagaaaaaaaagaaactccctatgctttcaaaataaattttcctgaatcatatatttaggtcaacttaattattttttgaacttatgagaattctttcagtttccaatcttcagctttgaagttttctttcattgctaaccttcattataaagtatgcctgcctttattgtctttcaraagatgaataatgaatatatttttgaaggtagataagaaatctgttcctataataacattcagaaatatgtttcctcagtataatgaatatttttatttggtcagtagatctttatttttttcttgatattggtaaattgtagtgttttgggctgtatatatttatcctttatataaaatggctttggaaaattagactttccttgtctttctcatagtagcacatgactttgaaaggacatttattttctctttcttgaaaattattggaaaacaggccttttcctctagacttctattgcatcaataaatgtggcctaaca

SEQ ID NO: 686971 - DNA, 605 bp, Homo sapiens
ggctcactgcaaattcacctcccagattcaagtgtttctcctgcctcagcctcctaagtatctgggattacaggcagccaccaccacacccggctcatttttgtatttttagtatagatgaggtttcaccatcttggccagctggtcttgaactcttgacctcaagtgatctgcctgccttgacctcccaaagtgctgggattacaggcatgagccactgcgcccgagcaaacttatgttttttgttttcatttttttttttaccatagttyaattatttttggtctcatgttgccttgtacaggctctatcaggatgttaagtgagaagagtcagttttgctagattaaagcatgtatcttaaacagtaactattctgtactttaacttatttatttccctttttctaaatgttgctgcctaagctcaccatgcctgcctagatggggtttctgaatggtagcataataccaacaatcatgctgagcatttagtgaaacacagactgtggaatcacaggaagcaggtgcaattcctattgtcaagattgatgatgtgtaatgttgctcaagacaggaagagcctagcactgttctctcatgcca

SEQ ID NO: 686972 - DNA, 669 bp, Homo sapiens
tttgcagggacatgggtgaagctggaaaccatcattctcagcaaactaacacaggaacagaaaacaaaacaccagatgttctcactcataagtgggacttgaacaatgagaacacatggacacagggagggcaacatcagacaccagggcctgtctggggattggggacctaggggagggatagcattagcagaaatacctaatgtagatgataggttgatgggtgcaccaaaccaccatggcacatgtatacctatgtaacaaacctgcacattctgcacatgtatcccagaacatatatatatataaacataaacccacacttttaatcctgactactttgactatatctkcagttttctttaaaattttttggctaaaatttcaaagatcaaataaattaattgttttaaaaaaacatatatttactgaagtggatggaaaattcagaaaaagcacactttttgacatgagtttcaaaaataattatcacatgctgaaaatttacgtgctgagatgcaggtgattactataagcaatatttttaagagtttcatctttgattcaagaggaataagtgggactcatggtttagatatgtcatttatgtgaccttgaagaatgagtgaccttgagtcattcttgagttccgggtatgccatgttacca

SEQ ID NO: 686973 - DNA, 1543 bp, Homo sapiens
tgaaattcaataataataaaaacaatgcaagtatttaaaagtatcaaatgaactacaacagaaactataatcatgtacaaattctgttaaatccaaattaatcagccaatttctcattccaaggaatataggtgtagcatttttgctttctttttctacttccttatttgtcagtccaactccaacaacaatgattgttctttttcttttccagtatctcttaaatctttgtttttcattcactgccactagccaccagattttacaataataacaataatggctccttaatttgcatatctgcatctcatttttaccagttttccacattattctatttattgcaaacagcctggtcagaggtgtttgggttgtggggtggattcctcatggcttggtgctatccttgcaatagtgagcaaaggtaagttctcacgagatctggttaagtgtgtggcacccccacctggctcccactctaccatgtgacatgcctgctcttgtttccacttccaccatgaataaaggctccttgaggcctccacagaagctgaggagatgccagcacaatgcttcctgtccagcctgcagaactgtgagcaaattaaatctcttttccttataaattacccagtttccaggatttcttatagcaatgcaagcatggcctaatacaattcttctcaccaaagtattttgtgacctctctactttaatttttgttctctagcaaaattggtcattgttcagtcgcttaaacccttcaatagcatacctgttacttgcatttggatgtattatttccactaacttgagctctcttctggaggctcttcacaaaactggcttattaccttcctggagctctctgcttgtatatcatccccacagtgtgctctttcctgagtaaatacatctcactattcacatcagtgttatattctccattagagcagcactgtgcttgtttgtttccttaagaacctttgtttttttataatcatgtactttttcacagcatcacacagacataaactatgaaactatgtttcattccaagtagtcccctgtatgtggcattgtacacagactcgtcactcaaatgcattactcaggtgaattattctttcagagttgaatgtaatttgctttccgataatccttttagtaaaataaaagagtattttattgtttgtggaaaataagatttaagttygaaacaaacttatttataagctgtttgcccttggctagtttagtaaagacctcagggactcaatttttctttataaagcgtagctaattatttacatatttttattattagaataaattatacaaaatgttattcatgctcaagtatttacataaaattttattattgatattgaattatgcactgagattattatggacaaggactgctcccaggggtggaagttaaaaagaagatgaatgaagagtgtcagtttaaaattttaataaataaatgtggtacaaattgagctctgaacttatgtagataagatctgcaaaatgccaa

SEQ ID NO: 686974 - DNA, 671 bp, Homo sapiens
gatattacttcagcaattgtttcttattattcagtaagcagaaatgcacttcatcttttccccaaagtaggctacccaaaatcacatccaggaactgtattgtaaaatactctcattgaaccacttgtccatgggccagaatctctggtcacactcacacctactctttttattaataatattttcaatacaaacatgtaacaatatatttaaccataagaaagcaaaagtacatttggcaagtaaaattgttggctcatctctcttaagttttccaagaaaaaatctgctctcaggtagagctgtttccaggggcttgaccacgataatcagaggcctctgtccatctgtcagctctgtgtggtttggcatgacttcagtctgcaagtataaactctccataagataggtaagagagctctaacagaggcaaaaatgcagaatatcacatctctttgtcatttgtcactcatatatatcctacagcccatatgttaaacattaagtrtatggtactcactgtatgctatgctatgtagaatagaaaaaataccttgtcaaatccacaagagaattaaactaagttattcccaagatatcttattctaaagtgatatcatgataacaagatgaatttaagatatatctttaattttgtggtgatctccttt

SEQ ID NO: 686975 - DNA, 1204 bp, Homo sapiens
tatgtttcaaatcagaaatatttagggctactagaaaagtttcacgctggggcaagtttcccctaagatgatccattagggtctgacactatctggtacatctccttcaaattcctgcttggaagcagctgcatgtgtatgtggtgggagcagggtagactcaactgcaataatctgggattttaggaatgctcttcttgttagctcatacagaacagtattaatatatttgcattttattatatattgtaggtcaaattatacttactatctcaatattatatttgtgaatatgactttcacttctttttcaataataggttatatctttacataacagcagaaaactcccaataaataggattaacatctctttttccattgtcagataaccataaacagaaatttaagagctagcttacataatactaaatatggctacaattgtcaaatatcagccaggtgtgtggattcatgcctgtaatgccagcatttgggaagccgaggtgggtggatcacttgaggtcagaagtccaaaatcagcctggccaacatggtgaaaccccatctctactaaaagtaaaataataataataattagctgggcgtggtggcacacatctgtaatcccagctacttgggattgcccactatgtaaattagaatcacttaaacccgggagatacaggttgcagtgagccagtattgcgccactgtactccagtgtcggcaacaaaggaagattttgtttcaaaaaaaagaaaaaattatcaaatatcttctaacattaatatgctagcaatctaaccaaataaataatattattactgaaactgtaataatatactcttacattaacactataattttaagatatacatcttaaatatatatgatatatatataaatatatcaaattttattctcacaaaaattacatgaagtagttgaaataggtagtactaactgatttaatgmgtacgaatgcaataataataagaattctgttttaaattcatatgtttagtttccaaactaggttgcttatctgcctttgaaactcgtaagttataacaataatgtgataagattgacttcacaaaatatgcatgatgtctcaaaatattttagactaatttaggttgcatttgggtaattctacagtatttgtggaaagtaaaacttacatactcatgcaatttta

SEQ ID NO: 686976 - DNA, 705 bp, Homo sapiens
aaaaaaaaaattagccaagtgtggtggtgcacacctgtggtcgcaactactagggagactgaggtaggaggatcacttgagcccaggagtttgaggctacwgtgagctgtgacacttgagcccaggagtttgaggctacagtgagctgtgatcatgtcaccggactctagcctgtgggaagagtgagaccttgtctaaaaaaaaaaaaaagaaagaaagagaaaaagaattttaagatagtagcagcaaagaattaaacccaaagccagcaaagaattaaaccctgagcaaggtacttctaagcatggggccgccatgtgactacccagctcaggtccccaccgatggagccagcgctggcacaggcctgcagatgtttgccaccacttcagttccttcatggttactggtttatttagattttcttctactttctgtgtcagtgtaagtaatttacatttttttctagaaaattctcaatctcacttagacttataaacctattggcacatagttgctaactgtattcacttacgattttttaaaacatctataattgtagaagtttttgctttattcttaggattttttttttgctgtctgtatctcaacaaaagcctgtttttagttttttcaaagaacaaaggtttggcttttctttttccatatcattagttgatgctttgatttctatttttttttact

SEQ ID NO: 686977 - DNA, 3103 bp, Homo sapiens
ggttttaacttagcatctttttaagtgatatcattttatctaatttgtggacttattgtttatattatttttaatatttttgtggccactctaggatttgcaacatgctttttaaaatcacctgatgttaccttcaaagaatattatactacttcacgtgcagtgtaattacatatagcmaattcctccctcccatccctgtgccatcattgttatgcattttatgctgcacacacccaatatatagtatggtttgtttttcctcggttatcttttagaaaaactaaaaacattttcttattagcacaaattcagtttttagtagtttttaaaacatttctagcttgatcctcttaccaatctatatgacattctggagcatctgttgcaggtaagcaagtacttggatcctttttctcctttcagaggaaagaacctcttctcgactttttcgatatttgagacaggattttgtcctgcaacctcagttttctattgggctcaagaaaggctgttaatttgcattttgtctaaatttttcttattgtaagtgtgtgggtgatgctcttcttagtgctctccatttcccaactgaaagaagtctaatttaaaataaagataaatgaacaaaatgagacaataattaagagaggcttttctaatgcaatataattcttaggagaaagggtcttgatgaatatttttttctttacttcttattaacaaagccaatgctggtaacacacacacagacacacacacacacacacacacacacacacacacacacacacacaaaggctttgcatttccatgacaccccttagcttactgggaagtgaaaatgactgctggagagaggagaagtactgatggttaatgattgagatttagtccctgtattagtctgttctcacactgctataaagaaataccagagactggataatctatgatggaaagaggtttaattgactcatagttccacatggctagggaggcctcaggaaacttacattcatgacagaaggtgaagaggaagcaatgaccttcacatggcagcaggagggagaagtgtgtgtgagagggcagaaaaaactaccatttataaaaccatcagatctcatgagaattcagtcactatcacaagaactgcatgggggaaagcacccccataatccaatgacttccctccctcctcacatgagaattacaggtttttctctcagtacatggggcttacagtttgagatcagattttggtagggacacagaaccaaaccatatcagtctctgatcaagttttaacagaaacctctacctatgatggggagtgaactatgtacaaactctttgacattacatgaagaaacctaggcactatatctatgaatagccattgagttgtcattgttcttttgtatcaataaggatgtgtttagtaagaatttctaccagagatgtattatcacacctaacatataactgacacccaacaaaacaggtagtatataacagaagtcctgtaatagagaatcctagactggttcagatcttcagagatacaatttggaaatgaggcttagacatccttaaatatcagcctgatttataggcttactttctattatttgaaatcctggacatctcacacctaggtaaggatagatttattttcattatttttttaagtcagggagtaagacctttaccagaaattatccccccagcagactttttctgggtctattcctactgtgaatcaagatttttcaatatgtctatttgcttactgtgattgaaagtggaaaagctagtgtctgacgttagcagtttttatagtagaagataaactcagccagataggaaaatgtgtgggtcattgggcttttgggtatgcaattattggcactatgaaacacacatctccttaaaaatatcttgctatgaaagatggataaaatcaacaatatttatatctcaagacaaaacttcaagggaaagacaaatatcttgggttacatggaaataaaatctcgccatttcagtaacatcctggttcaagccaccaacaatagttacaacatcccaatatgttactgtgaaaaattattttattattaatgtgataagctgaattatatatgatagctaaaggtaattccaacctggcatttgtcatttcaatatttagaacaaagtcatcatggtatgttacctggttataattaagctaaagtttaatatagggcttaattttcctggttaaaatggaatagaaaagaaggtctcattttaggcatgctaagcacggctttctcatgatatctttgttcttggagcaacattccaataagagggcctaaaaagaaaacattgaaaaatatatcagcaatctcaggaattggacaatgccattaaacaaaataataggacagtaattttattcatcatcaacatattattaaacaagtatactccgtattttagtttttgttttaatactgagaaatgtagatcacggcaaaaataaatacatttgtttaaaatcataaaacacattatgaaccaatttaagattaaatctttcctgctataaattcaaaattacataccattatacatcctaattctaaagcattatgctttatgaaatcacgctccaagaatatttttgtagtgcaattagtggcatcattaatgaataattcaaatttcttaattcaaagaaactgaaaatggcagaagtatttggtggatccctgaagccaatacagtttatgtgcagttattctatagttgttatgaaaaatttataaaatactataattagttgataaattaacaaataagaatcaatacttatgagccttatcaatatctatacacttaacataaaacaaatatatataaatttttaggaatatttgatagactatttagaatattacaaagtatttacaatatatatttaaaatccaaggacaactgataatgtcaaaaattatagagagagttactaaaaatatatgtattagagggctcacaaaatgatttgaagagtgaaatggaaacatgtataatatatataaatcaaaatgtc

SEQ ID NO: 686978 - DNA, 1413 bp, Homo sapiens
tcctgtaccaacacctattctgatttttttggccaccccgaagtttatattcttatcctaccaggctttggaataatttcccacattgtaacttactacyccggaaaaaaggaaccattcgggtatataggcatggtctgggctatgatatcaattggtttcttaggatttattgtatgagcccaccatatatttacagtaggaatagacgtagacacacaagcctacttcacctctgctaccataattatcactattcccactggcgtcaaagtatttagttggctcgctacactccacggaagcaataccaaatgatctgctgcagtactctgagccctagggttcatttttctcttcactgtaggtggcctaaccggcattgtattagcaaactcatcattagatatcatactacacgatacatactacgtcgtagctcacttccattacgttctatcaataggagctgtattcgccatcatagggggttttatccactgattccctctgttctcaggttacactctagaccaaacctatgccaaaattcattttgctatcatgttcattggtgtaaatctaactttcttcccacaacactttcttggcctatctggaataccccaacgttactcggactaccccgatgcatacaccacatgaaatattctatcatctgtaggctcatttatttccctaacagcagtaatactaataatttttataatttgagaaggcttcgcttcaaaacgaaaagccctaataatcgaacaaccctccaccaacctggagtggctatatggatgccttccaccctatcatacgttcgaagaacccatatacataaaacctagacgaaaaaggaaggaatgaaacctcctaaagctggtttcaagccaaccccacagcctctatgactttttcaaaaagatattagaaaaaccatttcataactttgtcaaagttaagttacaggttaaaccccgtatatcttaatggcacatgcagcacaagtaggtctacaagacgctacttctcctatcatagaagaactaatcatctttcatgatcatgccctcataatcatttttctcatctgctttctagtcctgtacgcccttttcctaacactcacaacaaaactaactaatactagtatctcagacgtccaagagatagaaaccgtctgaacgatcctacccactattatcctagtcctaatcgccctcccatccctacgtatcctctacataacagatgagatcaacgacccctcctttactatcaaatcaattggacatcaatggtattgaacctatgaatacactgactatggtggactaatcttcaactcctatatactccccccattattcctagaaccaggtgacctacgactccttgacgttg

SEQ ID NO: 686979 - DNA, 1413 bp, Homo sapiens
tcctgtaccaacacctattctgatttttttggccaccccgaagtttatattcttatcctaccaggctttggaataatttcccacattgtaacttactaccccggaaaaaaggaaccattcgggtatataggcatggtctgggctatgatatcaattggtttcttaggatttattgtatgagcccaccatatatttacagtaggaatagacgtagacacacragcctacttcacctctgctaccataattatcactattcccactggcgtcaaagtatttagttggctcgctacactccacggaagcaataccaaatgatctgctgcagtactctgagccctagggttcatttttctcttcactgtaggtggcctaaccggcattgtattagcaaactcatcattagatatcatactacacgatacatactacgtcgtagctcacttccattacgttctatcaataggagctgtattcgccatcatagggggttttatccactgattccctctgttctcaggttacactctagaccaaacctatgccaaaattcattttgctatcatgttcattggtgtaaatctaactttcttcccacaacactttcttggcctatctggaataccccaacgttactcggactaccccgatgcatacaccacatgaaatattctatcatctgtaggctcatttatttccctaacagcagtaatactaataatttttataatttgagaaggcttcgcttcaaaacgaaaagccctaataatcgaacaaccctccaccaacctggagtggctatatggatgccttccaccctatcatacgttcgaagaacccatatacataaaacctagacgaaaaaggaaggaatgaaacctcctaaagctggtttcaagccaaccccacagcctctatgactttttcaaaaagatattagaaaaaccatttcataactttgtcaaagttaagttacaggttaaaccccgtatatcttaatggcacatgcagcacaagtaggtctacaagacgctacttctcctatcatagaagaactaatcatctttcatgatcatgccctcataatcatttttctcatctgctttctagtcctgtacgcccttttcctaacactcacaacaaaactaactaatactagtatctcagacgtccaagagatagaaaccgtctgaacgatcctacccactattatcctagtcctaatcgccctcccatccctacgtatcctctacataacagatgagatcaacgacccctcctttactatcaaatcaattggacatcaatggtattgaacctatgaatacactgactatggtggactaatcttcaactcctatatactccccccattattcctagaaccaggtgacctacgactccttgacgttg

SEQ ID NO: 686980 - DNA, 1413 bp, Homo sapiens
tcctgtaccaacacctattctgatttttttggccaccccgaagtttatattcttatcctaccaggctttggaataatttcccacattgtaacttactaccccggaaaaaaggaaccattcgggtatataggcatggtctgggctatgatatcaattggtttcttaggatttattgtatgagcccaccatatatttacagtaggaatagacgtagacacacaagcctacttcacctctgctaccataattatcactattcccactggcgtcaaagtatttagttggctcgctacactccacggaagcaataccaaatgatctgctgcagtactctgagccctagggttcatttttctcttcactgtaggtggcctaaccggcattgtattagcaaactcatcattagatatcatactacacgatacatactacgtcgtagctcacttccattacgttctatcaataggagctgtattcgccatcatagggggttttatccactgattccctctgttctcaggttacactctagaccaaacctatgccaaaattcattttgctatcatgttcattggtgtaaatctaactttcttcccacaacactttcttggcctatctggaataccccaacgttactcggactaccccgatgcatacaccacatgaaatattctatcatctgtaggctcatttatttccctaacagcagtaatactaataatttttataatttgagaaggcttcgcttcaaaacgaaaagccctaataatcgaacaaccctccaccaacctggagtggctatatggatgccttccaccctatcatacgttcgaagaacccatatacataaaacctagacgaaaaaggaaggaatgaaacctcctaaagctggtttcaagccaaccccacagcctctatgactttttcaaaaagatattagaaaaaccatttcataactttgtcaaagttaagttacaggttaaaccccgtatatcttaatggcacatgcagcacaagtaggtctacaagacgctacttctcctatcatagaagaactaatcatctttcatgatcatgccctcataatcatttttctcatctgctttctagtcctgtacgcccttttcctaacactcacaacaaaactaactaatactagtatctcagacgyccaagagatagaaaccgtctgaacgatcctacccactattatcctagtcctaatcgccctcccatccctacgtatcctctacataacagatgagatcaacgacccctcctttactatcaaatcaattggacatcaatggtattgaacctatgaatacactgactatggtggactaatcttcaactcctatatactccccccattattcctagaaccaggtgacctacgactccttgacgttg

SEQ ID NO: 686981 - DNA, 1413 bp, Homo sapiens
tcctgtaccaacacctattctgatttttttggccaccccgaagtttatattcttatcctaccaggctttggaataatttcccacattgtaacttactaccccggaaaaaaggaaccattcgggtatataggcatggtctgggctatgatatcaattggtttcttaggatttattgtatgagcccaccatatatttacagtaggaatagacgtagacacacaagcctacttcacctctgctaccataattatcactattcccactggcgtcaaagtatttagttggctcgctacactccacggaagcaataccaaatgatctgctgcagtactctgagccctagggttcatttttctcttcactgtaggtggcctaaccggcattgtattagcaaactcatcattagatatcatactacacgatacatactacgtcgtagctcacttccattacgttctatcaataggagctgtattcgccatcatagggggttttatccactgattccctctgttctcaggttacactctagaccaaacctatgccaaaattcattttgctatcatgttcattggtgtaaatctaactttcttcccacaacactttcttggcctatctggaataccccaacgttactcggactaccccgatgcatacaccacatgaaatattctatcatctgtaggctcatttatttccctaacagcagtaatactaataatttttataatttgagaaggcttcgcttcaaaacgaaaagccctaataatcgaacaaccctccaccaacctggagtggctatatggatgccttccaccctatcatacgttcgaagaacccatatacataaaacctagacgaaaaaggaaggaatgaaacctcctaaagctggtttcaagccaaccccacagcctctatgactttttcaaaaagatattagaaaaaccatttcataactttgtcaaagttaagttacaggttaaaccccgtatatcttaatggcacatgcagcacaagtaggtctacaagacgctacttctcctatcatagaagaactaatcatctttcatgatcatgccctcataatcatttttctcatctgctttctagtcctgtacgcccttttcctaacactcacaacaaaactaactaatactagtatctcagacgtccaagagatagaaaccgtctgaacgatcctacccactattatcctagtcctaatcgccctcccatccctacgtatcctctacataacagatgagatcaacgacccctcctttactatcaaatcaattggacatcaatggtattgaacctaygaatacactgactatggtggactaatcttcaactcctatatactccccccattattcctagaaccaggtgacctacgactccttgacgttg

SEQ ID NO: 686982 - DNA, 1133 bp, Homo sapiens
tcaaattccaagataattctccaactgttaaataagtgatttctatggatctctttgagataaaaaacacatttgttactattgcttattttctaaatccctttgctatcctaaagtatgaccatcatgagactaacatgttaaacaatcattaaaaatcaaagtttctgtttatcataatacataatgccatatctcagccttcaaaatgaaatggaatctatagtctcctttcagatatgacttaagtgtctaaagcaagggtctgtaagaaggccaaatgtgggtctgccacctgtttttgtaaataaaattttattggaacacagccacacccatacatttacattttgtctgtggttgatttttccaagacacaataacagagttgagtagtagcaacagagaccataagatccacaagtataaaatgtttatatctggccttttaagaaaagatttgctgacctctggtctaaaaagcctgctacttcagtagactgtcttaaaataagaaatgctaatcctggtatagtcatgttgctggataattacctaagtcacttaacctttaactgctttaattttttcatttatgatacactaattgtgatattcgttgggaacttatataccagggaatattttaagagctttgctcttagtaaataaacaacaaatctgttcatttaattctgacaaatatcctaggaaagaagtaaattatttccaccttctaaatgagataatcaaggcagaggggttaaataacttgtccaaggttaagtagtggagaaatcaggaccagaacccaggcagtccagctccwgagctcatttcttaatctttatgctacgttgataatactttccattttataaattatacaaaataaaatctcaaaaggtctgttagttatgttaggtcaatccagtaaaatatacctctgcataatttaggttaagataccaaaaataagactatacatggacttcctggacttttaagacccatctaagattagagctaatcttggggtactgggaatataaaagcttatcattctttattttttagcataagtaatcaaagaatcaagctaactgaccaatatctatcttttccttggtaag

SEQ ID NO: 686983 - DNA, 598 bp, Homo sapiens
ttctaaagtaaatttgatatctaacagaccgttcaaatgaacagaagtgacatcctctatcctgtcccattttccaattacatcatgttttattataataatagcacctattactacctgacatttgtttattatctgacagttcacgacctcccactataaagaaatttcataaatagggagcttgtatgaattgctcgctgcgatatccctagcatmtagaagggcacctggcatacaatgcactcaatatgtttgttgagtgaatgagtgattgggctttcatgcttttgaacatgccatttttgtttcttttcaatatgagtgtaagggtactccctcactcctccagtcccaagaccatgatcagcactttccccaagtgaatctcctttccagtcaggccccaaactgacagggaaggagaagcaaacataattatcttcttctccacctcaaaaagctacgaagtttttaatattaaaccttacgaatcaagatgtttacgtttacattgcaactgaattaaacgtcattaacattttaaattatatttcagtcaagaatgttagtgtgttgatcaaaatctaagattcag

SEQ ID NO: 686984 - DNA, 1149 bp, Homo sapiens
tgagtttcaaagaatattacatctattcaaagtttacatgctgtaattttctattaaaaatacaaaatttggtatatatagtcaatttcctcaatataacatagcactaaaatacaattgtttcttttatataaaaactgaaaaactgagtttgttcagttccaataacatctgttgaaaatgctgtgtttctgatatttttgacaaacatatgtgtaaatataaataaaaggataaatcataaaagatttggaaagaaatccttagaacaatatatgctctcttgcctctgataaaccacctaycactgatacttaatcataccaagttgagagtattttactagaggaaaaagctatttagcttactctagccattcaaattttgtggaaagttctaaaactaatttgtttgaaccataaatttagaagactatcaatctgaatattttcaatgaaaaggaatttaaaagttttacacaagcaaattctgcttagcatataatctttcaacaagtaaatgcttaattccttatgaaaatgctatagccaatgttaaaatacactttaacatttataattatatacccacattagaagaaagaaatatacatcattcttaagccaagattcacaatatactgcagatagttcactaaatgattttttaagaggttgttctcaaactccattaaaatagagtagcttgagtaggtttagtattttgagtatacacaatgttctgaataactgacaaagcaagccaatacataagacttatccatttaatttctttaaatcttttctatttaatttctccacagaattccagttttcaatctctctatgctctatattcagtggggttaaggtaaagtaaaatacttctaagccagtaacactttcttatttctaaattttcttttctgattctattctctccaaccacaaggaaaataatttttttaaactccaactttgacatctatatggctgtaagatacctgaaaaagaataaaaacttgatcacatctttcagggagaacagaataatatacccaacaaaacatgtattgagagcctgctatacataaagctctctacaatgtacacttggaccccacccaggatagggtaagacatgtgcaac

SEQ ID NO: 686985 - DNA, 691 bp, Homo sapiens
ctgaaatttagggttgttactgcagcaaaacatagcttatccggactaatatgattctgagagttgtttagtttggtaagtagtgtgtaaatggatctatataaatcattttcattgtattttggagctggttataactagtatatggttttactactaatgttcacagatttatcttatatccagccacaatgttaaaatatcatctctgattttagatacctttgaatactgtaagaataccatcaactctcctgcgcgcgcacacacacacaagmgacagagagagagagagagagagagagggagagacagagtgtgtgttttcactctatggccgatggcattggcaaaaacatcaaatgcaatattggaaaagtaaaatgagaatacttccttatttcctattatttttcctccattttttaatagtcaatgtatttagtgtttcttcatcataaagctgttcaatcatccttattcaaatatattccagggaatgcataacactgtatatggataaaaatgcccacttgattgggcataaaaatgccaacaggctgttacattatagaatatggccaatttaatatttcattggagattctcgatttcatcctgtaaagattatgaccagtattatttttatgtatctcctagttgatgataatattatgaaagtgaccttcac

SEQ ID NO: 686986 - DNA, 691 bp, Homo sapiens
ctgaaatttagggttgttactgcagcaaaacatagcttatccggactaatatgattctgagagttgtttagtttggtaagtagtgtgtaaatggatctatataaatcattttcattgtattttggagctggttataactagtatatggttttactactaatgttcacagatttatcttatatccagccacaatgttaaaatatcatctctgattttagatacctttgaatactgtaagaataccatcaactctcctgcgcgcgcacacacacacaagagacagagagagagagagagagagagagggagagacagagtgtgtgttttcactctatggccgatggcattggcaaaaacatcaaatgcaatattggaaaagtaaaatgagaatacttccttatttcctattatttttcctccattttttaatagtcaatgtatttagtgtttcttcatcataaagctgttcaatcatccttattcaaatatattccagggaatgcataacactgtatatggataaaaatgcccacttsattgggcataaaaatgccaacaggctgttacattatagaatatggccaatttaatatttcattggagattctcgatttcatcctgtaaagattatgaccagtattatttttatgtatctcctagttgatgataatattatgaaagtgaccttcac

SEQ ID NO: 686987 - DNA, 1093 bp, Homo sapiens
atgacttctcaaaaattttgaaagatatcatcttatatcaagaagcttaaccaaccacaggcaagacaaacacaaagaaaacacacatatgtatattatagtcaaactataatatctttaaagtgtagaaagaggctggkcgtggcagcttacacctgtaaccccagcactttgggaggccaaggcggatcacctgagttcaggagttcgagaccagcctgcccaacatggtgaaacctcatctctactacaaatacaaaaaattagcctggagtggtggcacaggcctgtagtcccagctgcttgggaggctgaggcaggagaaatgcttgaacctggtaagtggaggttgcagtgagccaagatcttggcactgcactccagcctgggtgacagagtgagactctgtctcaaaaataaataaataaataaataaatacataaaatgcagaaagaaaaaaagtcaaccgagaatacaccaaaatatctctaaaaagtaaaacaaggtcgggcatggtggctcacacctgtaatcccagcattttgggaggctgaggagggtagatcacttgatgccaggagttggagaccagcctggccaacatggtgaaaccccatctatactaaaatacaataattagtcaggcgtggtggtgcacatctgtgatcccagttactcggaaggctgaggcaggagaatcgcttaaactcgggaggcagtggttgcagtgagccaagattgcaccactgcactcaagcctgggcaacagagtgagatcctacctcaaaaaataaaataaaataaaataaaataataatataaaacaaaacaaaataaagacattttcaaataaaaagagagaatttgttggcagttgacttaaactacaagcaatgctaaaagaaattatttggtctagaggggaatcatatcagataaaagccagaccatctatttatatttcatatatgcttatatgttcatgtaatatacatagatagatagatagatagatagatagatagatagatgatagatagatagatagatagatagatgatagatagatagatagatagagagagagagaga

SEQ ID NO: 686988 - DNA, 1093 bp, Homo sapiens
atgacttctcaaaaattttgaaagatatcatcttatatcaagaagcttaaccaaccacaggcaagacaaacacaaagaaaacacacatatgtatattatagtcaaactataatatctttaaagtgtagaaagaggctgggcgtggcagcttacacctgtaaccccagcactttgggaggccaaggcggatcacctgagttcaggagttcgagaccagcctgcccaacatggtgaaacctcatctctactacaaatacaaaaaattagcctggagtggtggcacaggcctgtagtcccagctgcttgggaggctgaggcaggagaaatgcttgaacctggtaagtggaggttgcagtgagccaagatcttggcactgcactccagcctgggtgacagagtgagactctgtctcaaaaataaataaataaataaataaatacataaaatgcagaaagaaaaaaagtcaaccgagaatacaccaaaatatctctaaaaagtaaaacaaggtcgggcatggtggctcacacctgtaatcccagcattttgggaggctgaggagggtagatcacttgatgccaggagttggagaccagcctggccaacatggtgaaaccccatctatactaaaatacaataattagtcaggcgtggtggtgcacatctgtgatcccagttactcggaaggctgaggcaggagaatcgcttaaactcgggaggcagtggttgcagtgagccaagattgcaccactgcactcaagcctgggcaacagagtgagatcctacctcaaaaaataaaataaaataaaataaaataataatataaaacaaaacaaaataaagacattttcaaataaaaagagagaatttgttggcagttgacttaaactacaagcaatgctaaaagaaattatttggtctagaggggaatcatatcagataaaagccagaccatctatttatatttcatatatgcttatatgttcatgtaatatacatagatagatagatagatagatagatagatagatagatgatagatagatagatagatagatagatgatagatagatagatagatagakagagagagaga

SEQ ID NO: 686989 - DNA, 1093 bp, Homo sapiens
atgacttctcaaaaattttgaaagatatcatcttatatcaagaagcttaaccaaccacaggcaagacaaacacaaagaaaacacacatatgtatattatagtcaaactataatatctttaaagtgtagaaagaggctgggcgtggcagcttacacctgtaaccccagcactttgggaggccaaggcggatcacctgagttcaggagttcgagaccagcctgcccaacatggtgaaacctcatctctactacaaatacaaaaaattagcctggagtggtggcacaggcctgtagtcccagctgcttgggaggctgaggcaggagaaatgcttgaacctggtaagtggaggttgcagtgagccaagatcttggcactgcactccagcctgggtgacagagtgagactctgtctcaaaaataaataaataaataaataaatacataaaatgcagaaagaaaaaaagtcaaccgagaatacaccaaaatatctctaaaaagtaaaacaaggtcgggcatggtggctcacacctgtaatcccagcattttgggaggctgaggagggtagatcacttgatgccaggagttggagaccagcctggccaacatggtgaaaccccatctatactaaaatacaataattagtcaggcgtggtggtgcacatctgtgatcccagttactcggaaggctgaggcaggagaatcgcttaaactcgggaggcagtggttgcagtgagccaagattgcaccactgcactcaagcctgggcaacagagtgagatcctacctcaaaaaataaaataaaataaaataaaataataatataaaacaaaacaaaataaagacattttcaaataaaaagagagaatttgttggcagttgacttaaactacaagcaatgctaaaagaaattatttggtctagaggggaatcatatcagataaaagccagaccatctatttatatttcatatatgcttatatgttcatgtaatatacatagatagatagatagatagatagatagatagatagatgatagatagatagatagatagatagatgatagatagatagatagatagagagakagagaga

SEQ ID NO: 686990 - DNA, 392 bp, Homo sapiens
atttaatcttcttttaaaaatgttttgatcacttttcgatgaaccaggagcacctcccttatggactatgctgggccagggatggaaatgtaggaatctgtggtgactcctgatagtctttgactgtgaaagaatagagtcaggatgggtggtaatgggataaggtgtayaagtggcaggaggtgtgcctttgcatgtgtttgagggctaagcttttgtggaaatgtgtgtgtgactgcatcgcaaagccgtaagcaagcaaatctgcctttaagtacatttactttgcatctgtttatacctttgataaaccacagattagttctgtttgtatattttctttttcactttgaacatttaccagcacttattaaggacatatcttagagtta

SEQ ID NO: 686991 - DNA, 633 bp, Homo sapiens
aaaagagaaagggaataaagtaagagtcmattatgcagacgtctctgagtaggtggaagaagaagtcttgtctttggtctgtaacctgggaagataagcttgtaatggatattatcagggtggaatccagtagacttgagttttaggaactagtgtagattgtaaacctaaagctacaattggcatgtccttatgtatgggagacctgaaaagaatttacttaggaatgatctgcaaggcctcttacctttccaaggggatccagctggtgaatgatgttataatagctccctttgaaagaaagtgtggcagtgactcagtctctggacttaaccttccctttcacataagaagtttgggggtcctgatagttttactttcctttacaccaaggttttagctcacaggctttagttcttgacctttcctctgctgggaatatcctttcctcccttcaatatccagcttgctcctagacctttcccaagtcagcagaaaacctctgtctcaggaagccttgccccagccctcagccagatctctctcttttctctaggttcccgtggcatcttgtaagcaactccagctgacactcgccacagtgccaccttcctcacgagactgtgactttgc

SEQ ID NO: 686992 - DNA, 650 bp, Homo sapiens
tggaaacagcacaaacccccatcaatagataaataaataacaagttgatatatatacgtaaatggaatattattcagccataaaaagggatgaagtattgatatatgctacaatgtggatgaacctccaaaacattatgctaagtgtaagaagtcaggcacgtaagatcacatattgcatgattccattcatatgaaatatccagaagagataaactcatagagacaggacacaaattagtggattttggggaccatagggaggaaatcatggggagaaacaacttattgggtaagaggttttactttggagtgatggaaatgtttcaaactaggcaaaggtgstagttgcataatatcatgaataaactaactgccgctaaattgttcactttaaaatggttaattttatgctgtataaatttcacctcaataaattatcttaaaacagaaaaagcaagagctaaggatttgggattgttgaaccattgcctcctgtggtgtagtatataatacgtaacaattttttaatccacaaaacaatacctagtggcaggtcagagaacttccctgattttaaaatagtgatgagcataaacaatattttgggacagctgtaagaaccataatacaatgaaggacctgtaattt

SEQ ID NO: 686993 - DNA, 608 bp, Homo sapiens
tggcctttcctatgtttttaatacttttctataattttttaatggctgcatactggtgcactgtctagctgctctatagttatttgattgtttccagggatagttattgaaagcatktggccagtaaggggtttatcgttggaatctgttggttacatataattatatatacttgcatagggccttataatcttttttcctcctgaatatgtgcaccattaaagttttagtatgtgctttttaaaaagttgtattatcaaaatgacattttcttaatatctttcagattcaattagcagagcctcacagacaatggccaaatgtgtcaaagctgtcacagagggtgcccaggcagtagaggaaccatccatatgctgaagcttctactaggatcccagttttgccgcagataattaatggacaactgtagtgcagtgatcctttacaggtttatttctttgtaaaaaaaaataataataatttgaatcatgtaatatttaaggttatactatgcctatttgaaaatgatattagttatcaactttgcagtttgaaaaacatgtattgtgtgtaaaggttaaataacaaaactatgcagatgctcttaa

SEQ ID NO: 686994 - DNA, 1427 bp, Homo sapiens
tggcagttagtgaccagctagtgttcatctccactaaggaaaggagaggaagtagccttaggctgtggcagaggggttgagtcttggaaagggagacacagggactcagtggaactgccttttcttgagaacttgacaattagggtcacttttagtctgcctgggacagttggcgttactcttcaaataagtttcagaaagaaataacaaacccatggcaccaaaaacatttgaccaaacccattctcatcaaaagagggctttttgtttctgttttgccctggggaatccggtcattactgccctctttccaggaaccactcaaatatgagtaatactgtgaatcctgttcatatgaacgttacagttatttctatctccagtcaagagcagtgcccatcttagaagctggctaaggtttcagagcagctttggaagcaatatttatttgtagcacatgtatgtatctataaaatcctacctaagtaaaacaagtgtttctagaatcatgtgccatttggggaatggaaaactcaaaatgtaaattgttatgcaggtcctgtgatggattccccaacagacatgtcagttcgtggacaacatcccccataagtcaccgtgggtcctggggcatcctcctttccccaccagggggcagaagccctgcttctcacaccagctcagagtttctaaaactgtgactcgtgccactactggtgtttgaggcaattttagtgacatacatttcatctttttttcccttcttttcttatacgttaaacgaaaataaccaaagagtagatattccaaagagaagtgagaagaggctgagaataacatgagcagagaaatatgacatgcatttgctgtttgtaaacaagagggagaagactattgaaaaagtatggtgagaggaccaagttaagacagaaggtaaatcagtttgtttgtttgtttgtttgtttatttagagacagagtctcactctgtcacccaggctggagtgcagtggcaygatctcagctcacttcaacctccgcctcctgggttcaagcgattctcctgcctcagcctcccaagtagttgggactacaggtgcacaccaccaagcctgactaatttttgtatttttagtaaagacagggtttcaccatgttggccaggctgatctcggactcctgactttaggtgatccacccacctcagactcccaaagtgctgagattacaggcatgagctaccacacccggccctataaataagtttagacagaaaatgtggaatctgtcagaggggaccttggaagcagtaataaatgtaataaacagcatgttagtaatagaacatgggctttggagaaaatgagatagaatgctgaggttgagttgcttaactctctggccatggatgcaatgatgactggtttt

SEQ ID NO: 686995 - DNA, 666 bp, Homo sapiens
agcaaatggttaatgaaagtagtttgataatgtcatcagatgtttcaaaaagaaaagcagtttagcccaataatggccttttttttcatacaattaattcctggaatcaatatatggaggttcattctgccaaaggtgaaatatctgacatcattgctaattctattgtaaactcggcttttaaaaactggttaaaattaaaaactgattccaaattaaaaggatttctcttttgcagggataatagaaatacgatttttggaggagcaatgcactaygggaaaaataacgcgctcttaatactgttaagaaaccaaatggtcttggcaatgatttcttggatgtgacaccaaaagcacaggaaacaaaagtaaaaatagacaagtgggactacatcaaacaaaaaagcttctgcacagcaaagagaaccactgacagagtgaaaaggcaacctacagaatgtgagaaaatatttgcaaaccatatatctaaaagggttaatatccaaaaatatataaggaactcctacaactcaataacaaaaaattaaataacccaattcaaaaacaggcaaaggacttgaatagatacttctccaaaggagacatacaaatagtcaacagttatagaaaaagatgcccaacatcactaatcgtcagggaaaca

SEQ ID NO: 686996 - DNA, 630 bp, Homo sapiens
tcctatctccatggctgcatgttctacatctcctcttcttgcascacttttgcaataatgtatatatagatatattgctatgtcacaggcagaaacattgccgcatgtatcaatattgaaatgaacaaatatataaacaaaactagtcttcaatgcagaggagtgatacttgaactaatagctcaagttttaggaaatggaagagcaatgagcagaggcacctgtgtagcccttctgcttggaagtttgtgtgcaggaccagccctgcaaaggtgaaaacacaactacagataaacaactttaaggaacaggcactctacaattccttatcaaaaactaaattttggaataattttacaaacttcatgcttgatttctcttagtttccatgcagcttgaatcattgaatcattcttgaagttcttttgttgttttaacacattaaattagctaattacagctgaatatgtagtggaaaatagcatctgtttacggtgtaataatataaaaattacttaccagtaacagaataaggagcaatttgcaaaagctaatcatatttgtgcacttgtctacaaaaagtaaattgttaatatatgcccaaggggaaaaaaaatcacttgctggttt

SEQ ID NO: 686997 - DNA, 781 bp, Homo sapiens
tcccatgtgcagtttaaagccaatgtcagcccagtgttacatccaaaaaaaaaaaaaattaaagtcttagtccacaggtattgaaaagtattataggtcttaggaagctgattaagagattgtttttttcatacaacatayagcaaactccctaaaatcctctttacccatctgtcctcaaagcctatttatcagggaagttgttcatcctgtttttgctttcccatgttttagaaaggaagccaaagtagccaaaccacacacacacacacacacacacacacacacacacagagttatcatttggtgttgcaccctgtgattctgattcaccacccagatccccttcaacaaagtacctgctgtctcacttgctgggaattctgtcggtagacatcttcagctgagctcctgcagcaactatctaagctgcctctggtccaagattgtactctttttcagggtattccacttccaacaactgatgaactaaggaagtatgaaggcctggccatctctgccacacttgggacacctcttcagggccattccagctccagagctccccatggaattggccaaaacagtttttgggcttccatcacagctcaaattctccctgtgctccatcttttctctcccacagggctctaaataagggttttatctaatatctgcataaaattcatttatagtaaattttaatataatagtttattaaaattatattttaagtacataggagttatgaaattaaaactgttgcctattctacctctat

SEQ ID NO: 686998 - DNA, 607 bp, Homo sapiens
tgtacaggaaaccttgagccaaaagaataaatgtgcaaatattccttcaatttaaatgcaccagttcaaagtaaggccgagattggtttaatctaatgtttattgttaaatcatgaaaaaaaaagcaccaatgaatgcaaatactactgaacatataccagtcatggtgattraaaaaaacacaaaacctaaaattagaattacataacattcatttcaaatcttgcaaggtgttttcctcacgtgtatttgatgttaaagaacctaaggatttctgagatttatcaaagtagagttaccgaggataaatctaatgttcataggtagtgtcgtagttaccaaggataaatctaatgttcataggtagtgtcatagttaccgaggagaaatctaatgctcatagatagtgtcataggtttctgtcttcatagttgatttatgtggtgactgagattcgtattataagcagctcatgaattggacagttaccatctcctgtaccctcactattcagctactttcatatttcataatcttctccctggctgaacaacaatgtggaaatccatacttaccactgactggtcatcatgaatggggtaattcc

SEQ ID NO: 686999 - DNA, 607 bp, Homo sapiens
tgtacaggaaaccttgagccaaaagaataaatgtgcaaatattccttcaatttaaatgcaccagttcaaagtaaggccgagattggtttaatctaatgtttattgttaaatcatgaaaaaaaaagcaccaatgaatgcaaatactactgaacatataccagtcatggtgattaaaaaaaacacaaaacctaaaattagaattacataacattcatttcaaatcttgcaaggtgttttcctcacgtgtatttgatgttaaagaacctaaggatttctgagatttatcaaagtagagttaccgaggataaatctaatgttcataggtagtgtcgtagttaccaaggataaatctaatgttcataggtagtgtcatagttaccgaggagaaatctaatgytcatagatagtgtcataggtttctgtcttcatagttgatttatgtggtgactgagattcgtattataagcagctcatgaattggacagttaccatctcctgtaccctcactattcagctactttcatatttcataatcttctccctggctgaacaacaatgtggaaatccatacttaccactgactggtcatcatgaatggggtaattcc

SEQ ID NO: 687000 - DNA, 602 bp, Homo sapiens
tgttagctattatttttagtaagttggttttgttaatttttattattaatatttttatacctgacattttaatctagttaagcttttgttaatgtgaatttctcttttaaacagtgtattgaaaatgtgtcccgacagaattgtccaatatgtttggaggtaggcttaaaatattttttactttggaagtctcagctcttgaatttaaaatacttggatgtttatattgtcttcatacaagcactaacatttatttcatttacaggacattcacacatcccgtgttgttgctcatgtcttgccatgtggacatcttttacataggtaaagtaacatctttttctcaatgatgtttgaaaatagtggagacagtttttgttttactaaaataatcttatattttctttcagaacgtgttatgaagaaatgttgaaagagtgagtgtttgggattttaaaaataattgtaagatgtttgayttttttgtgtgtgtggtgtggggaggtggacaaacattgttacttatactatattgggcatggcaatatttatattgaaatgggtagggtagatgaatattgttaaaacaggacaaagtgtct

SEQ ID NO: 687001 - DNA, 1222 bp, Homo sapiens
ttagccaattctttaaaataaatctctttctctgtatgtacacatcctattggttcttttctctggagaaccctgactagtataacagtctcaggagaagaccagccttatgaggaatcagtcaagatgtggttttcctcttttcactccctccctcctcctaaatcctatcaatattacctcttctcctaaatcctatcagaggaggaaaatatatatgtatagaggttgagtatcccttatccaaaatgcatttcagtagtgtttcatgttttggatttttttagattttggaatatttgcatatatataataagaaatcctggggatggaacccaaatcacaaaattcactcatgtttcatatataccttatacatgtagactgaaagtagttttatacaagattttaaataattttgtgcatgaaacaaagtttgtgtacattgaaacatcagaaagcaaaggtgttactatctcatgccagtgttcaaaaggttttagattttggagcattgtgaatttcagatttttagattagggaagctcaatctgtgtgtgtgtgtgtgtgtgtgtgtgtgtgtgtgtgtgtgtgcatgcgtgcaacctagcaatcacctattagaatattagaaatgcccatctccctgcaagtattaacaactcagtctcctctccctctccttctctgtaatttcacttcctttgtattacaaaaacctaaaaattatctttgttcttgctcttctcgttctgtctccttttaatttatatatattaacttctattcctcaactttatgatagttaaacatttttcatcttctttcaagatttgctccacagttaatctcagaatgtgtttccatagcttcctgtgcttcttaataaagttaggcaatgctagatttcaacagaaaagaaggatgtaaatctctcagataatatcccacttcattccagacctgtggttttgttgttgttgttgctgtttgtcttgtyttgttttgttttgttttgttttttgcaggacagtttaaccttgtctttctacagtttggcgaggctcatcagatctcaattggttccacagtcttttcccctacttgagttctcaaatagctctatttaacatcaatatttctttctgtgttcatggcaggtggtaattcatttgtaagtgttcacttggccttgaatgtctttcacagtattctgtcacca

SEQ ID NO: 687002 - DNA, 674 bp, Homo sapiens
aaggtggacttgttacaatgatcatattcatgcaacctatagatacaatttaacctcatcaggtggccaaacaagtttccccaggaaattttgatttgggaaagaaagtagaataaaagtaaaagtgaataatgtgtttaagtgtttgcagtmacagggcagagggagtctgtagtgtgtgtctttgctgaactcctggttcttctttgcacagtggatatgacgttcgatgtggacacagccaacaactatctcatcatttctgaagacctgaggagtttccgaagtggggatttgagccagaataggaaggagcaagctgagaggttcgacactaccctgtgcgtcctgggcacccctcgcttcacttccggccgccattactgggaggtggacgtgggcaccagccaagtgtgggatgtgggcgtgtgcaaggaatctgtcaaccgacaggggaagattgagctttcttcagaacacggcttcttgactgtgggttgcagagaaggaaaggtctttgctgccagcactgtgcctatgactcctctctgggtgagtccccagttgcacagagtggggattttcctggatgtaggtatgaggtccattgccttttacaatgttagtgatgggtgccatatctacacattcatcgagattcctgtttgcgagcc

SEQ ID NO: 687003 - DNA, 674 bp, Homo sapiens
aaggtggacttgttacaatgatcatattcatgcaacctatagatacaatttaacctcatcaggtggccaaacaagtttccccaggaaattttgatttgggaaagaaagtagaataaaagtaaaagtgaataatgtgtttaagtgtttgcagtaamagggcagagggagtctgtagtgtgtgtctttgctgaactcctggttcttctttgcacagtggatatgacgttcgatgtggacacagccaacaactatctcatcatttctgaagacctgaggagtttccgaagtggggatttgagccagaataggaaggagcaagctgagaggttcgacactaccctgtgcgtcctgggcacccctcgcttcacttccggccgccattactgggaggtggacgtgggcaccagccaagtgtgggatgtgggcgtgtgcaaggaatctgtcaaccgacaggggaagattgagctttcttcagaacacggcttcttgactgtgggttgcagagaaggaaaggtctttgctgccagcactgtgcctatgactcctctctgggtgagtccccagttgcacagagtggggattttcctggatgtaggtatgaggtccattgccttttacaatgttagtgatgggtgccatatctacacattcatcgagattcctgtttgcgagcc

SEQ ID NO: 687004 - DNA, 1051 bp, Homo sapiens
tcaatggccactggttgcaatcgacctgctgaaggtttgaaagtggcttccaggagaccaaacaaaactaagtgataggaagtaaatgttaaacaaaaacaattttaggtataaaatggaaatgtgaagttacagacatggattctggcttattttttggaaataaagtaaaatctatgatgatcagaatttaagaggatctcaaattgtaatatttacttccactgacattttaagaggaaataaacagttgaattacttatttttcaaaaaacttctgtgtaagtaactttatggtacttgctatagaagaacatagcatgtaatcactttaatcatttagatgaaaagtcaatataatggaaaaggtaactaggacacgaagaggtgttaaccagaaaaatgatgttcataagaaatgcccaacagctactcacactaatagtataatttacgttgatataatatcaaatcaattactcaaagacctccaacaacaaaatgtggattagaattcagctaattcacttactgagaaagaaaagaaaagcatgtttcattattcatcaaatattgattgactgtcaactgtgtggacactgtgttaggctcagagaagacacagatctgtgctccctggagttccatgttagtgcagagggttggacaataaaaaataaacctactcaatacataaactgcatgctctgttgggagatgagtagtgttatggaagagaagaaaatgtagggcacagtaatgggaaagacaatgctagtcttatgggggcaaagtgtatcgtgtgtgtcaatgagaggtgatgtgaagcaaggattaaagggaatgaggsaaaaccccataagaacactgaggaaggactattccaggaagggaatatggctgtggaaaagccttaggttaggagccagactttcagggggcagtagaagaagccagtgagcctagtgaagaaaagcaggaggaaaagacatctgagaggcaaccttcagggtagagaaggtcagaccaggcatggttgtgcaaagttgcc

SEQ ID NO: 687005 - DNA, 1082 bp, Homo sapiens
attttcaggaagaaatctttttttataaatcatgaggttttgggggaaagcaatgtaaggtcatgaatcaattcaccaattgctttggtgaaaattagttgcatgcctatacctgatctccagaaatctgtggtatttttgttctccagccaggtgaccatgtttccaggatgaatgggaaaccagcttagttcataatccaaaaagtaagcattcttaaggtttaccttcattcatagaatacatttgagtttattagcaaaaccaaaggttctaaatattatgtcttaaaaaataaataaaacctttttttgccataaaaatgttaatatgccttgtgggtaggataaatagcggcattactttcatctctaattcattaattcatcattgatttattaattcaattgtggttttaactaggcagctatgcatacatwtagcgaaaagctgatttcatttaaagaaacttgctggagatcacacatctaaaaacaggcaactccccaaattaaaccaatgctcttatttcttaagatatcctatgttgaagcatgtatttacacccccacctgttttcctcatactgtgttagaaagacttcttaaaacaaatagaacatatttggcatctgtgggctagcatataaacttagaaaaaaaatctcttgacagtttctaatatccctctactttttatcaactttccaccctaaatcaacatcaaagggttttattatctcttatcaggaaagtgattccacaatattccttggaaactatttaagtgttacaggaaccatttgttttctagtcaaagtgcatatggaacagccaatcacataaagtatagtgactgagaacccagtactgatcttgtggaagatataatcttataaaaacattaaatgtgagtataacttagcattaaatcttaatatctaattttccctcaaaatcgtgataataatagggctgggtaatgttatgactgttaggacttctcctcttggtctgacactaccacatccagaatttgcgtttagtgagaatgtgcttttatgccttctccatatgcaaata

SEQ ID NO: 687006 - DNA, 767 bp, Homo sapiens
aaattgataagtgtcagggatttaaatacagtcktcatggacttagtctgctgccttctttatagatctgccaaccctggaaatatagctcagctttacttctagagatcttagccccaggaatcttgactgacagcaccaattgccttccctctggatctattgcagcagctgctcctaacttacaggactggcagaaactggtaccagtgtgaagtcatttctgcccaacaggtgcctttaatgggcaatttttgtttggggaatccctatccctattaataggaatccatattcaattgctcatagaatcagacacctatctgtctgccaatctgaaactattctggtaagtgggaggtacatataaaggtaaaacagaatggaaaggttgctgaatacaggaaaaagtggtatgtagtaacattaacactaatatatttaaaataagttaacagtaaaccaatttatacacacatataacacacacacacacacacataaaataggcttcttttgtattaagaaatgaagcactgtaaaatagttctgaatttgtgttagctgtagattacactatcgaaaactatttttcctatttgtctgtgtacatgtatatgtatgtattcctttttctcttccattaactgaaaagccatgttgagtggtcttcgaccactgcttttcccctgtgtgaggcacaagtgctgctgctgtgtgtatattttttgtatattagccaatttttattaattcttgttttttta

SEQ ID NO: 687007 - DNA, 767 bp, Homo sapiens
aaattgataagtgtcagggatttaaatacagtcttcatggacttagtctgctgccttctttatagatctgccaaccctggaaatatagctcagctttacttctagagatcttagccccaggaatcttgactgacagcaccaattgccttccctctggatctattgcagcagctgctcctaacttacaggactggcagaaactggtaccagtgtgaagtcatttctgcccaacaggtgcctttaatgggcaatttttgtttggggaatccctatccctattaataggaatccatattcaattgctcatagaatcagacacctatctgtctgccaatctgaaactattctggtaagtgggaggtacatataaaggtaaaacagaatggaaaggttgctgaatacaggmaaaagtggtatgtagtaacattaacactaatatatttaaaataagttaacagtaaaccaatttatacacacatataacacacacacacacacacataaaataggcttcttttgtattaagaaatgaagcactgtaaaatagttctgaatttgtgttagctgtagattacactatcgaaaactatttttcctatttgtctgtgtacatgtatatgtatgtattcctttttctcttccattaactgaaaagccatgttgagtggtcttcgaccactgcttttcccctgtgtgaggcacaagtgctgctgctgtgtgtatattttttgtatattagccaatttttattaattcttgttttttta

SEQ ID NO: 687008 - DNA, 647 bp, Homo sapiens
ccttggtgtctgcttctcagagaacctaaacagagacaatacatatgagaatgattgctgcctcaaataactgagttattctagaaaaatggacacataacatttttaaaacacaatttattgtaatcactcctataactatagcagatataaagtgtctcgagaatacagataaggaaacaaccgttcctgtctggagtagaggaatgtgtgttagggaaaggtgcaaggaaataacgacttttaggttggaacccagaagaattgttagaataacagataagagtatttcagaagagatgataacatcaggaaggacacagaggtatgtaagtgttacgtatgtttaggaaataaggtacttttccattcctggaaaattgtttcactgatgcaaaacacttttaaaacacggatcagcaaggcattcttcatttagarcgtccaatttcaatgaaccttccagcctcagtcttcccaaggccaagggaagcatgaactattgccagctgcatgacccatccctccttttcccactttccctcatccctcccttctgtctgcatgtattgtacgtaacatgtgccaggcagcagacagatcctcagaaaaagacctatagatttagataaaagtgtgacacaaaa

SEQ ID NO: 687009 - DNA, 647 bp, Homo sapiens
ccttggtgtctgcttctcagagaacctaaacagagacaatacatatgagaatgattgctgcctcaaataactgagttattctagaaaaatggacacataacatttttaaaacacaatttattgtaatcactcctataactatagcagatataaagtgtctcgagaatacagataaggaaacaaccgttcctgtctggagtagaggaatgtgtgttagggaaaggtgcaaggaaataacgacttttaggttggaacccagaagaattgttagaataacagataagagtatttcagaagagatgataacatcaggaaggacacagaggtatgtaagtgttacgtatgtttaggaaataaggtacttttccattcctggaaaattgtttcactgatgcaaaacacttttaaaacacggatcagcaaggcattcttcatttagaacgtccaatttcaatgaaccttccagcctcagtcttcccaaggccaagggaagcatgaactattgccagctgcatgacccatcccyccttttcccactttccctcatccctcccttctgtctgcatgtattgtacgtaacatgtgccaggcagcagacagatcctcagaaaaagacctatagatttagataaaagtgtgacacaaaa

SEQ ID NO: 687010 - DNA, 639 bp, Homo sapiens
aacagtatagcacatctggtctcataggaagacagcacytcgtgtagcttcctgcgatctgaccaggagagcaggactttttcacaattggcctccacatctgccacgaatgatttctcctctgaaaatagccataggatcccaccgtgtagcctggtatcccagttcttgttcagatagtagatgcaggtggtgcagcagccatcgttgttgaggtgtccacatgatgaatgtaacctattccatttttaagatagcaagccaccattgccttggacctctccttgacatagtattttcccagtggctcctgcactagaggactagcctgtcagtgagggacaggaggaagccaatggcctcgcggcccttcttgttgctcccagaactgtggggtgaactgatcaccccacagttcaccctttagagacactgcacacatcccagccagctggctgtcccgcagggcccccttgcaatgcagctgtttaatgtgctcctggatgcagttgtccaccacctccttgcccaggaagttttgcgggtagcagaagctgacttcccgcagacagcgcatgatgtactctagggaaattttctccaattcctgcctcatgatgtgtcccaggggcatttcac

SEQ ID NO: 687011 - DNA, 639 bp, Homo sapiens
aacagtatagcacatctggtctcataggaagacagcacctcstgtagcttcctgcgatctgaccaggagagcaggactttttcacaattggcctccacatctgccacgaatgatttctcctctgaaaatagccataggatcccaccgtgtagcctggtatcccagttcttgttcagatagtagatgcaggtggtgcagcagccatcgttgttgaggtgtccacatgatgaatgtaacctattccatttttaagatagcaagccaccattgccttggacctctccttgacatagtattttcccagtggctcctgcactagaggactagcctgtcagtgagggacaggaggaagccaatggcctcgcggcccttcttgttgctcccagaactgtggggtgaactgatcaccccacagttcaccctttagagacactgcacacatcccagccagctggctgtcccgcagggcccccttgcaatgcagctgtttaatgtgctcctggatgcagttgtccaccacctccttgcccaggaagttttgcgggtagcagaagctgacttcccgcagacagcgcatgatgtactctagggaaattttctccaattcctgcctcatgatgtgtcccaggggcatttcac

SEQ ID NO: 687012 - DNA, 639 bp, Homo sapiens
aacagtatagcacatctggtctcataggaagacagcacctcgtgtagcttcctgcgatctgaccaggagagcaggactttttcacaattggcctccacatctgccacgaatgatttctcctctgaaaatagccataggatcccaccgtgtagcctggtatcccarttcttgttcagatagtagatgcaggtggtgcagcagccatcgttgttgaggtgtccacatgatgaatgtaacctattccatttttaagatagcaagccaccattgccttggacctctccttgacatagtattttcccagtggctcctgcactagaggactagcctgtcagtgagggacaggaggaagccaatggcctcgcggcccttcttgttgctcccagaactgtggggtgaactgatcaccccacagttcaccctttagagacactgcacacatcccagccagctggctgtcccgcagggcccccttgcaatgcagctgtttaatgtgctcctggatgcagttgtccaccacctccttgcccaggaagttttgcgggtagcagaagctgacttcccgcagacagcgcatgatgtactctagggaaattttctccaattcctgcctcatgatgtgtcccaggggcatttcac

SEQ ID NO: 687013 - DNA, 639 bp, Homo sapiens
aacagtatagcacatctggtctcataggaagacagcacctcgtgtagcttcctgcgatctgaccaggagagcaggactttttcacaattggcctccacatctgccacgaatgatttctcctctgaaaatagccataggatcccaccgtgtagcctggtatcccagttcttgttcagatagtagatgcaggtggtgcagcagccatcgttgttgaggtgtccacatgatgaatgtaacctattccatttttaagatagcaagccaccattgccttggacctctccttgacatagtattttcccagtggctcctgcactagaggactagcctgtcagtgagggacaggaggaagccaatggcctcgcggcccttcttgttgctcccagaactgtggggtgaactgatcaccccacagttcaccctttagagacactgcacacatcccagccagctggctgtcycgcagggcccccttgcaatgcagctgtttaatgtgctcctggatgcagttgtccaccacctccttgcccaggaagttttgcgggtagcagaagctgacttcccgcagacagcgcatgatgtactctagggaaattttctccaattcctgcctcatgatgtgtcccaggggcatttcac

SEQ ID NO: 687014 - DNA, 639 bp, Homo sapiens
aacagtatagcacatctggtctcataggaagacagcacctcgtgtagcttcctgcgatctgaccaggagagcaggactttttcacaattggcctccacatctgccacgaatgatttctcctctgaaaatagccataggatcccaccgtgtagcctggtatcccagttcttgttcagatagtagatgcaggtggtgcagcagccatcgttgttgaggtgtccacatgatgaatgtaacctattccatttttaagatagcaagccaccattgccttggacctctccttgacatagtattttcccagtggctcctgcactagaggactagcctgtcagtgagggacaggaggaagccaatggcctcgcggcccttcttgttgctcccagaactgtggggtgaactgatcaccccacagttcaccctttagagacactgcacacatcccagccagctggctgtcccgcagggcccccttgcaatgcagctgtttaatgtgctcctggatgcagttgyccaccacctccttgcccaggaagttttgcgggtagcagaagctgacttcccgcagacagcgcatgatgtactctagggaaattttctccaattcctgcctcatgatgtgtcccaggggcatttcac

SEQ ID NO: 687015 - DNA, 2517 bp, Homo sapiens
caacaaaacccagtaacctaggcatcgcacccagcctgggtaacatagtgagacttcatctcttctaaaaaaagaaaaaaacaacttcagtaacctttctaaattctctcattaattccaataatttttatttttatttttttcttttgagacatggtcttacctcattgtccaggctgcagtgcagtggcagaaattgggcttattgcagccatgaacttctgggctcaagcgatcctcctgcctcagtgtcccgtgtagctgggatcacagtagtgtaccaccatgcctggctaatttttttatttttttgtagagcctgggtctcactttgttgcccagactggtcttgaactcctgggctggagtgatcctcccatctcagccwcccaaagtactgggaactggaattacaggcatgagccaccacaccttgcctcttttctttgtatataacctctaaaacaatttctaatcacagatttacaactttctttggaagatttatgcatttttaagttacctgaacatctagtacgatgctgtattgaagaggcagtagcaatcatctgtctcgtacctaatctaatacagaatgctttctgtatttcaccattaggtgtggggtttcagatattctatgaggttaaaaaagtcccttctatttctagtgtctcagaattcttataagtgaaagaatgctgaattctatcaaaaacttcttacacatcttttgatatgattttctttaatcttttaatattgttaattatatcaattacattaacctgtcttctaatattaaattgaccttgaagcctacccaattggtcataatacacaatactcttagaactcagaatccaaatgagcaggaaataatacattctttagagccaagtatgtaccataacttaccaattatattcttatctacacacaatgagcaataaatgaacatgtatcagtatctgaccagttgtgtcattttgagtgggtcttttatttacctccatcagtaatgcaacaatctatttaatcagtaaacagtcatgctgagtattcactaaatgccattcacttttctggcactagagtacaaatgacaaagccataaccattgccattaaggagttcataaatgtgtgagtggtgcgtatgtgtgagacaaaagggagaggatggcacaaaggaggagtcgaacaagataaaatgaaaaacatatatagtaagtgctttaccgtaagtgaatgaacgagagtactaaggaaaaagaatggagacgtatttcaagttctcacgttgtttgactcgaatcttgtagacggtgtttgctgcaaaaagatgaagaaaacattcacagacatttatgttgattacatatttattgctatgtgcccagacgttttgaccttggggataaagtagcaaagaaaacacaaaaatctctgttgtattgggtttacattctatcaataaagatacaacttgcccagagaaaagccctctcctggttaggaaacagtatcaacaattaacagctctggtggtttcacagagccacagtgggctgcctgctgcagacaatatcagagtttgtttatatttaaatattattttaatatttctatttttgtccatgtattataatgcacatctatgtaatttgcaaatcatcactcatatatacatcatatcaaaaggtgtaaaagtttttgatagaattcagcattcattcgcttataaaatgagtgaaggctcactttacggatgagagtatttcatcaaaaaaattggggatctacgactctagagttctccgaagtccaccaaggaaaaagtaacttgaatttaatcgcatttaaaactatatagtatccactcctaaaacattagcaacataggaaaacttacacagcggaagaaatgactggggattttttttttttttttaatacatggtctcgctctgttgcccaggctggagtgcggtggcgcgagcaccgcttactgcggtgtcgacctctcgggctcgagttatcctcccacctcagccttccaagtaggtgggaccacaggcaccaccactccaagcccgtatatggtttttaaataagacaaattgcaaaaaacgttgccagacagcgttcgctggtttgggccgtcactgggtatggctcgtgtccgtctagatattcagaggccgagcacagtcctcagtagggctgctcggcaggtacacagctgacgctggtccttggacttatgggagtgggaacaactttcaactcggccgcggaccaggaaggcgttctgacccgctagagctcggggacagggaccccatcccggtgcctagagcgtctcccttagtcggcgtgggccagcgccagttacctcacgagcactgaactagcgcctgcgcccttctatacttctcgctctttcttcaagtcacttctacccggcgagcccgccctcccgccaatcgtcatttccggcgggtgctctgcgtca

SEQ ID NO: 687016 - DNA, 1181 bp, Homo sapiens
tgataggtaattaggatatacttattgaagaatcagaagttgtaatattactataagaagaagccttgtctctaagcaaaactagaaaaatgaatctttacatttaggatgagaagaattgagattcaatttaaattgtcaaatttttgagttttctgatgctgtagggggcacttacctttgatacacatctttacatgcaaggtgaaacaagttatatctgtgctttccaactatcataatcaaatatgaaatagcttttatttttgaaatctaagcactatgcttatttattaaatggttttttctggaagctctgctgtgcattgctaagatgttactatataaacatgtgagattagttttgttaatgatgatggtgatgataatttgttgatgatgatgatatgggcacgttggattaaaatgcactagaaaaggacattcaacaaaagtgcatataacttacctgagtttagcttgcagaaagaaaactaaattattgccagataaaataaacaactrgaaacacttgatcttagctaaaaggccaagaagcaataaacgactataaacagaaaactgggtgtgttgttatctaatatcagtaaagtaaaatattggtattaaatatctcaatgtaggtgaattaataggttcattatattgttatgacattttgaagtaattggcgattattttacaaccaagagaaatgtataaaattaattttgcctggctttatgtgaattgtcatttctattcttttcttaaaggcatgcacaggggaaaagtttctgcattttacttttctattcaaaatattttatctcaccacgggaaagagaacaaaaaacaaatgcccagttttattttattcaggaatcctttgtgcattgaagactttagattcctctctgcggtagacgtgcacttataagtatttgatggggtggattcgtggtcggaggtctcgacacagctggggtatgtttttaccacataagtgtgtagttttgtttttatacaattttaagataccaagaatttcatacaagcatataaggcataggcaagcaatttactctgattcttttcatgttctatttatgttgatttcatgttatgttcatattgtattttaaatcaagtcttccaaaacttaaaaacttttttccctt

SEQ ID NO: 687017 - DNA, 1181 bp, Homo sapiens
tgataggtaattaggatatacttattgaagaatcagaagttgtaatattactataagaagaagccttgtctctaagcaaaactagaaaaatgaatctttacatttaggatgagaagaattgagattcaatttaaattgtcaaatttttgagttttctgatgctgtagggggcacttacctttgatacacatctttacatgcaaggtgaaacaagttatatctgtgctttccaactatcataatcaaatatgaaatagcttttatttttgaaatctaagcactatgcttatttattaaatggttttttctggaagctctgctgtgcattgctaagatgttactatataaacatgtgagattagttttgttaatgatgatggtgatgataatttgttgatgatgatgatatgggcacgttggattaaaatgcactagaaaaggacattcaacaaaagtgcatataacttacctgagtttagcttgcagaaagaaaactaaattattgccagataaaataaacaactggaaacacttgatcttagctaaaaggccaagaagcaataaacgactataaacagaaaactgggtgtgttgttatctaatatcagtaamgtaaaatattggtattaaatatctcaatgtaggtgaattaataggttcattatattgttatgacattttgaagtaattggcgattattttacaaccaagagaaatgtataaaattaattttgcctggctttatgtgaattgtcatttctattcttttcttaaaggcatgcacaggggaaaagtttctgcattttacttttctattcaaaatattttatctcaccacgggaaagagaacaaaaaacaaatgcccagttttattttattcaggaatcctttgtgcattgaagactttagattcctctctgcggtagacgtgcacttataagtatttgatggggtggattcgtggtcggaggtctcgacacagctggggtatgtttttaccacataagtgtgtagttttgtttttatacaattttaagataccaagaatttcatacaagcatataaggcataggcaagcaatttactctgattcttttcatgttctatttatgttgatttcatgttatgttcatattgtattttaaatcaagtcttccaaaacttaaaaacttttttccctt

SEQ ID NO: 687018 - DNA, 666 bp, Homo sapiens
ttgttgttgttgttttttgtgatggagtctcactctgtgtcccaggctggagtgcagtagcatgatctcagctcactgcaagctccacctcccgggttcatgccattctcctgcctcagcctcccgagtagctgggactacaggtgcccaccaccacacccggctaatttttttgtattttttagtagagacrgggtttcaccatattagccaggaaggtctcgatctcctgaccttgtgatctgcccacctcggcctcccaaagtgctcggattacaggcgtgagccaccacgcccagcccaatttttttttgtatttttagtagagacggggtttcatcatgttggtcaggctggtcttgaattcctgacctcgtgacccacccacctcggcctcccaaagtgctgggattacaagcgtgagccactgtgcctggcctaaaatttgtttttataaatcacaatttccccataacctagagtagaagagataatatctgaattttccacaactgatagaaaatatcaaactacatactatcaaaggcttatgaactccagcagggtgaataaaatgacaagttaggtgtatcatatataactgttgaaaaaaaaagacaaacagaaacttacaggtaggaagagaagcaaagtttactttcaaag

SEQ ID NO: 687019 - DNA, 666 bp, Homo sapiens
ttgttgttgttgttttttgtgatggagtctcactctgtgtcccaggctggagtgcagtagcatgatctcagctcactgcaagctccacctcccgggttcatgccattctcctgcctcagcctcccgagtagctgggactacaggtgcccaccaccacacccggctaatttttttgtattttttagtagagacggggtttcaccatattagccaggaaggtctcratctcctgaccttgtgatctgcccacctcggcctcccaaagtgctcggattacaggcgtgagccaccacgcccagcccaatttttttttgtatttttagtagagacggggtttcatcatgttggtcaggctggtcttgaattcctgacctcgtgacccacccacctcggcctcccaaagtgctgggattacaagcgtgagccactgtgcctggcctaaaatttgtttttataaatcacaatttccccataacctagagtagaagagataatatctgaattttccacaactgatagaaaatatcaaactacatactatcaaaggcttatgaactccagcagggtgaataaaatgacaagttaggtgtatcatatataactgttgaaaaaaaaagacaaacagaaacttacaggtaggaagagaagcaaagtttactttcaaag

SEQ ID NO: 687020 - DNA, 666 bp, Homo sapiens
ttgttgttgttgttttttgtgatggagtctcactctgtgtcccaggctggagtgcagtagcatgatctcagctcactgcaagctccacctcccgggttcatgccattctcctgcctcagcctcccgagtagctgggactacaggtgcccaccaccacacccggctaatttttttgtattttttagtagagacggggtttcaccatattagccaggaaggtctcgatctcctgaccttgtgatctgcccrcctcggcctcccaaagtgctcggattacaggcgtgagccaccacgcccagcccaatttttttttgtatttttagtagagacggggtttcatcatgttggtcaggctggtcttgaattcctgacctcgtgacccacccacctcggcctcccaaagtgctgggattacaagcgtgagccactgtgcctggcctaaaatttgtttttataaatcacaatttccccataacctagagtagaagagataatatctgaattttccacaactgatagaaaatatcaaactacatactatcaaaggcttatgaactccagcagggtgaataaaatgacaagttaggtgtatcatatataactgttgaaaaaaaaagacaaacagaaacttacaggtaggaagagaagcaaagtttactttcaaag

SEQ ID NO: 687021 - DNA, 666 bp, Homo sapiens
ttgttgttgttgttttttgtgatggagtctcactctgtgtcccaggctggagtgcagtagcatgatctcagctcactgcaagctccacctcccgggttcatgccattctcctgcctcagcctcccgagtagctgggactacaggtgcccaccaccacacccggctaatttttttgtattttttagtagagacggggtttcaccatattagccaggaaggtctcgatctcctgaccttgtgatctgcccacctcggcctcccaaagtgctcggattacaggcgtgagccaccacgcccagcccaatttttttttgtattyttagtagagacggggtttcatcatgttggtcaggctggtcttgaattcctgacctcgtgacccacccacctcggcctcccaaagtgctgggattacaagcgtgagccactgtgcctggcctaaaatttgtttttataaatcacaatttccccataacctagagtagaagagataatatctgaattttccacaactgatagaaaatatcaaactacatactatcaaaggcttatgaactccagcagggtgaataaaatgacaagttaggtgtatcatatataactgttgaaaaaaaaagacaaacagaaacttacaggtaggaagagaagcaaagtttactttcaaag

SEQ ID NO: 687022 - DNA, 624 bp, Homo sapiens
tacagattcccttttcccaaggtttggtgtatatatctagagtttgggaaagcataaatatatattttttcaacctctttttctaatgaaagatagccatatgcatttgtgtgaagaagtcatattaagagtctcattttcatattgttcttcactctctatttctttcagtgacaagtgaagacatgaattaaacattcaaggtccatttagttctatttcctccccctgagacatatatgtctttggaaggactactttgtctgcaggtagacttagtggtggttgattcttccgattttttcaatagctgaaatttcaaacatactcattatctaaatttctatttttcaatagatcttttgttccaggactttgtagtmcacagatataattcctatgaacaacttatcactggctattctactttggttgaattcccaattattgttcccccaaagagaatgcctcccatcccaatgtggctggagagaatatgtgaatatgttctacttccaaagcctattattcagaaagagtagtttatattgtgttggacactgcctagtaattaaataataaaaacaccacaaatgactcatgatacaagataaaaaaataggg

SEQ ID NO: 687023 - DNA, 624 bp, Homo sapiens
tacagattcccttttcccaaggtttggtgtatatatctagagtttgggaaagcataaatatatattttttcaacctctttttctaatgaaagatagccatatgcatttgtgtgaagaagtcatattaagagtctcattttcatattgttcttcactctctatttctttcagtgacaagtgaagacatgaattaaacattcaaggtccatttagttctatttcctccccctgagacatatatgtctttggaaggactactttgtctgcaggtagacttagtggtggttgattcttccgattttttcaatagctgaaatttcaaacatactcattatctaaatttctatttttcaatagatcttttgttccaggactttgtagtccacagatataattcctatgaacaacttatcactggctattctactttggttgaattcccaattattgttcccccaaagagaatgcctcccatcccaatgtggctggagagaatatgtgaatatgttctacttccaaagcctattattcagaaagagtagtttatattgtgttggacactgcctagtaattaaataataaaaacaccacaaatgactcatgatacaagrtaaaaaaataggg

SEQ ID NO: 687024 - DNA, 613 bp, Homo sapiens
ttgatgtctgcccaaacagctgcccarttttgtgcttgaaacccagggccctggttgtgtaggtgcatgagggaatctcctagtctgtggattgcaaaaactgtaggaaaagtgtagtatctgggccaggtagcacagtccctcatggcttcccttggctgggggagaaaggtaccccaggtccttgcacttccggggtgaggcaacgccccaccctgcttctgtttgccctccatgggctgcattcccctgcctaaccagtcccaattagatgaactggtcacctcatttggaaatgtagaaatcacctgccttctgtgttgctcttgatgtgagctgcagactggggctgttcctattcagccatcttgccagatctccccaaaaatgcatttttaaggaatcagagatctatggaatgacaaccaaatgactttaattccagagcagggagaaaaaatcaacaatctgctacttttgttatttttctttttcatggatcagagtctggccaagacagagaacctatgtttgcagaaagtgaaaccagcaatttttgtagtggttatgtggactagggtgacaatactgaatatttgaaggtttttcctat

SEQ ID NO: 687025 - DNA, 613 bp, Homo sapiens
ttgatgtctgcccaaacagctgcccagttttgtgcttgaaacccagggccctggttgtgtaggtgcatgagggaatctcctagtctgtggattgcaaaaactgtaggaaaagtgtagtatctgggccaggtagcacagtccctcatggcttcccttggctgggggagaaaggtaccccaggtccttgcacttccggggtgaggcaacgccccaccctgcttctgtttgccctccrtgggctgcattcccctgcctaaccagtcccaattagatgaactggtcacctcatttggaaatgtagaaatcacctgccttctgtgttgctcttgatgtgagctgcagactggggctgttcctattcagccatcttgccagatctccccaaaaatgcatttttaaggaatcagagatctatggaatgacaaccaaatgactttaattccagagcagggagaaaaaatcaacaatctgctacttttgttatttttctttttcatggatcagagtctggccaagacagagaacctatgtttgcagaaagtgaaaccagcaatttttgtagtggttatgtggactagggtgacaatactgaatatttgaaggtttttcctat

SEQ ID NO: 687026 - DNA, 598 bp, Homo sapiens
tgcacagttagaaggaataaattgtagtgttcaatagcatagtaaatgactatagttaacaacaatatactatacacttcaaaatagctagaggagaagatttgaaatgttcccaacacaaagaaatgaaaggtttcaggtgatatatattctaaacaccctggctygatcatcacacattgtattcacgcatcaaaatatcacacataccccataaatatacaagtgttatgtatcaagaaagccaccaatccaaatcccataatatttcacaacccagttcaaatcctttagtggcatcactgctattaagactttgcctgacctcattgcctccccctctttgggattctaaaaagcttaggatctgaaccacacctcttagcactggtcatacaggtctggcatagaaatgtggacaaaatttctccagctttgttttttgcttaggattgctttagctattctttataggttccatataaattttaaaataattttttctagtcctgtgaagaatattgttggtagtttgatagaaatagcattgaatctgtacattgctttgggcagtatagccatttcaatgatattggtt

SEQ ID NO: 687027 - DNA, 598 bp, Homo sapiens
tgcacagttagaaggaataaattgtagtgttcaatagcatagtaaatgactatagttaacaacaatatactatacacttcaaaatagctagaggagaagatttgaaatgttcccaacacaaagaaatgaaaggtttcaggtgatatatattctaaacaccctggcttgatcatcacacattgtattcacgcatcaaaatatcacacataccccataaatatacaagtgttatgtatcaagaaagccaccaatccaaatcccatmatatttcacaacccagttcaaatcctttagtggcatcactgctattaagactttgcctgacctcattgcctccccctctttgggattctaaaaagcttaggatctgaaccacacctcttagcactggtcatacaggtctggcatagaaatgtggacaaaatttctccagctttgttttttgcttaggattgctttagctattctttataggttccatataaattttaaaataattttttctagtcctgtgaagaatattgttggtagtttgatagaaatagcattgaatctgtacattgctttgggcagtatagccatttcaatgatattggtt

SEQ ID NO: 687028 - DNA, 601 bp, Homo sapiens
  misc_feature 501, 502, 503, 504, 505, 506, 507, 508, 509, 510, 511, 512,513, 514, 515, 516, 517, 518, 519, 520, 521, 522, 523, 524,525, 526, 527, 528, 529, 530, 531, 532, 533, 534, 535, 536,537, 538, 539, 540, 541, 542, 543, 544, 545, 546, 547: n = A,T,C or G
  misc_feature 548, 549, 550, 551, 552, 553, 554, 555, 556, 557, 558, 559,560, 561, 562, 563, 564, 565, 566, 567, 568, 569, 570, 571,572, 573, 574, 575, 576, 577, 578, 579, 580, 581, 582, 583,584, 585, 586, 587, 588, 589, 590, 591, 592, 593, 594: n = A,T,C or G
  misc_feature 595, 596, 597, 598, 599, 600: n = A,T,C or G
aattagccgggcgtggtagcgggcacctgtagtcccagctactcgggaggctgaggcaggagaatggcgtgaacccgggaggcagagtttgcagtgagcagagattgcaccactgcatcccagcctgggcaacagagcgagactccgtctcaaaaaaatatatatatatcttctcttagccactgcaattcttagaaaatcaccatcaccatctcaacatccacccttcttttaatatcactacagttggacttttacccactccgttaccctcaatcaccaagaaacttgcattgaggtctgatgatttaattgtaagtggcacatttttggtcttcgtcctrctgcccttgttcatggcacatttcctactttaggacgattgtttcccctttcgggatacgtttactatactaagccctttgtcttgatcattccttctcaatacctaatgttcattctccctcatctacctgcctattaaatgtttgaattcctcannnnnnnnnnnnnnnnnnnnnnnnnnnnnnnnnnnnnnnnnnnnnnnnnnnnnnnnnnnnnnnnnnnnnnnnnnnnnnnnnnnnnnnnnnnnnnnnnnnnt

SEQ ID NO: 687029 - DNA, 1491 bp, Homo sapiens
caggatttctcaaccttgtctctattgatattttgggctggataattttgagaggctgacctgtgtgtggtaggatgtttactggcatccgtgggtttccactagctggcaggagcactgctccagttgaaacgaacgaacaaaaataccttcagacgttgccaaatgtccctgggaggcaaaatctcttctcattgagaaccactagcctagaatacaaaaatatttcattatttatatccgaacaagtcatctgaatgttctatggtttaaaaaatatatattgtgtgcataatatgtgccaggcaccatttttctaagtgctttgcaggtactaattcatttaactccccaaataacaacctcataatgtagttattatgtagtgsgtacatgggaaagagaaattagaaaccctactagtctgatggaataaaccctagttcctatccacaatgcttatccacctcctctttggctctgctagtgatttccaattgcaagtccttgataaattttcagtaatatgtgacaatttgagaaaagtaattaaattatgatttttttccttaaagaaagaaacttacgtactagatttaatagaaaaagatataatagaataagtgagttggctgcttatggttctgcaccattcatccttccagaacaatggctagaggaagaagtgttcagtttctgttggttagagaacttacaaatgtcagtcccccagctatagctctaagataatttttcccctagatgcaattttatggtttattaaaaaggaaagtttccagtcaaaatgactacttctcacccattggcttatcaaagctactgttgtagacacatcttcatttgataggaagagaagaggaagtcaagtctactggctggacttcaggcatcagactatgttaaattttcttcgtatttttaaaaaaatttttattatgaaaatgttaagcaactacaaatgtaaagagaatagttgaataaaccttttgcccaccatttattattaatatatactttaatttatacctccactcaaaccagattttttttgaggcaaacatcatcatattatttcacttgtagtattttattatgtatctctaaatctaaaggataaaaaataatttttgaacttaactataaagccatgatcacatctaaattttagaaaaacttgatatcattaaatatctagacaatgatgacattactctgattgacatacaattatgacatatctattatttttatagtgcttgaattgaatccaaataagaagtatgtgttgttgttggctgatttgcttttaaaatatctttcttatagtaatttttttgaggtaaaatttatatcttgttaagtctcttttgacttaaaggttctccttccattttttatctgcaatttttattcttttactgaagaaaggagccatttctcttgtagaatttccaatactctaatatctga

SEQ ID NO: 687030 - DNA, 1506 bp, Homo sapiens
gctaccaaaatcaaaaggggaaaggagtaagatattaggggaaaaagatgtgcaatgtgtatgtaaagtgtctcaggcaagtaagcttaaaaaaaggatatctaaagggatcaaacacggaggatggaggaagtgagaacagagcaaggagtcaccaaactagaaaatgaatgagactggaacaggaggggacagttataataggtaaacaggaagacaaccttagatgataagtaagaaaaggatgtcacctacatcaagattttttaagctctctacagtaaaccaggctgccacggatagtgaaagttatcaggttcttccaaattataatcatctttctgcttagtaaaagtctgtatcttacttttaatttgaaaataagagcataccaccaccctgcatccaaactaaagccttattttttttttcaggtagttacataaaataatgattacatagagttttatcctagcctgcctagggtcgccttcatcatgcccatacttacctacttctcccactctgctgttggtaatctattcctaccatgaaatcctacagtcctttcacaatttggttcatatttacctttacagtcttgtcttctgcctttctccagcaattctaaaaattctgtccctttgtggcacagaaaaataattaataaatgcttaatatcttttgattcacttactgacttcaacttctcaaatacatgggaaaacatctgaagtctacctataaaaatgaatacaagcttgagcagtcagttcaaaattgctgtttcggaaaatttcctaaaatttttccacaagctacgtataactcaaatatgttcaactaaacttagctcatttgcaaactactaccaccccaggatatttaaaggatataatgaattaaaattttcaaatatgtgtgtttacatatacatatattctgtgtgtttacacgtacacatattcaattatgtattctaatctgttctagcacctctgttgtcagtaccacaatactaccatcttgctcatttttgcatatttcctagtagcatgttaagagattagttcgggccgtaatttccttattataagggaagatgtgtacactatgggtaacagggaagcagtagtaataatgttcattgttattgctgagtagtattatacgaatgtactgtaattcctttatccatatactagttcatacacatttaagttgtttctaattttaaacattctctgacaggtctttaagtgtaagtgcaattctctgaagtgttggttcctttaccatcattacaagtgattccctgatgcttatgatattctctgatgtttatattctaaaaggctaaaacaaagaatcccttaacatgaaagtaacattctatttacttccctcacaaygattttctctcctgaacaaacacacttaaagccatcaagaaatttcagtttcatagatgaagagagcaattataagaacactgctctcaacgat

SEQ ID NO: 687031 - DNA, 1704 bp, Homo sapiens
taaaattgacagtgtatctacattgccaaaagttaacacttgaaaacatgctctctgtttccctctgtctctgctgtaaagctttttgtaagccctgcctcccttaacatcataggcgtttgccttgctaatcctgagttgaactcaaacactgcctgtatctgatattcttcctagctataatgcggtacctacctcactctctctatccctttattacacgctatgctggcactccatatctccccttaaaagtgtatcctagtcataattaagtaagaatctgaataattatttaatttcggtgtaccttactagtttgcaaaagccaggaaggcaaacatcttgtttgtcttgtttgttccccattgtctcacctgtgcttgatatacaataatttgttgaatgggggagaaatcaaacaatagaaggttgaacgtaaacagtcttacytcctaacgtcaagcaggatcataaccaatgagaatctagtttgtcttttaaaaaatcaggagaagtaaatttcacaaatttaatcaaacatattccatcgacgcaaaatacttgtgtttagattataagaccaagggttgaaattactttaaggttgctcctttaggaacctaatggattgatgagttgagtaaatgtttattcgcacatttaatgtacaattctatcagcaaatgtttccttgaaataaaattaacattgtgttcgtaaatttttaagagatgaagaaaagtaacagttgatttacataactaaagcatttcttaataatcaaattgtgtgtaatatttgattacagtattttgtcaacgctgtattgtcagccacattgaattaaagtttcctccaaaccagctaaatcaccttttatccacttttctatggcctcagacttgacagatacaaaatgatcaaactcttcatatctttagcaaactttctataggattaagtttaagtaataccttccctattgattcacagttctaaagtatatctctaaacatctttgtgttctaagtactttaggcagtctctgtgatttattctaaaattacttgggaaggtccattaactaaaacaatctatctgaggaggtccacaataaaactagcctttaacacagtcactccaaaaaaaacaaatctagaagattttccgttttaatgtaaatgtaggaaattttcattattaatgaaattattaaatcattattaaacatttttattaattaaatcattattaaaaatgattatcacctcagcaatgctttaataaggaaaaaaattaatgcatactagctgcaagccaatataatcatgtaaattaatacaaaaatcagaattgggactaaaaaaaactttgattaggcacaacagcaatacccaaatcatggaggattttataactgcaattagtttgtaaaatttattcaggagattcctaataacaggtacaaatctttagtgcccaacaaaggaattacaacaaaatattcagaggaatatcataagtcaaaattacaacctccaaaattataatcaaatcatgttttattgatattcaggaatccacaacaaatgaaaacataaatcctacacatttctaaactttaaaatcaaatgtcacaaacaggtaacatttactgatcattcactgtgtcccagccctctctggtgccacttaaaataa

SEQ ID NO: 687032 - DNA, 590 bp, Homo sapiens
tgattwaaaaaaatgttatcttactaaatttactctttcttgctgtatttactcactgacttggagatattttcatgtcagtacatataagcttttcctatttttgttactcttctttagtttttacagtataaatataccataatttgtttaaccatacatgtttacataggcattttgtttttcattgttcattataataataaatataaaaaatccctattacagttagaatatagaaatttttgtgttgttgattaaacttcctcactagacttgttagaagttaatgtcattttagttgataatttagtgtcagaagcttccgtaaatcatttgggccgggcatggtggctcacgcctgtaatcccagcacttcgggaggccgaggcaggtggatcacaggagatcgagaccatcctggctaacacggtgaaaccccgtctctattaataatacaaaaaattagccgggcatggtggcgggtgcctgtagtcccagctattcgggaggctgaggcaggagaatggcatgaacccgggaggcggagcttgcagtgagccgagattgcgccactgcactctagcctg

SEQ ID NO: 687033 - DNA, 716 bp, Homo sapiens
tgagacttattgagtgactcaatgttggctagaattgtccatttagctggaggggaagagggagggaaggatggatggaggagtgaagtatggaagcaggcatcaggccacttcccgtacctctcccaaactccaaaggcaatgatcacattggagggtcagctaaacacaaagggaagtgaagaaagaagtttgaagattttcctgtttccaaaaatcacatactttcctcttttgagtattctatagaataactctctacatttcctagtttgtggaaattttctctacggcataactactctaaattgtgcaattttcctcatatcagacttatttttctctatacctggttccctagcaaacctgagctttatttatatatctgatatgcaccccatctccacagctggcattcaattgcaactctaaattctaaagtgctcagrgtcaatataatgcactgacgattcagacctgactgggcattttcactgcataaatctaaaaagtaaacaatctcattatgtttgagaggatggatggggagaagactgatctatatttccactaaggtagccaagaaatattcacatgaagggacaatgggagaggagctggcaagagtttgggcagtacttggaagatgcattccttatcatatagattacatatggcagtgaattgacagaggattcactgggacatcttcagaa

SEQ ID NO: 687034 - DNA, 648 bp, Homo sapiens
ttcaataaccttgtccagataagaagacccctaaccttagatgggttctggctggtttacagaggctgcgtacttgaatgcctttgtgtccttgcctcaccttttgacatatagggcctaattgaatgcatttaaatgttaaatgtccacctattgtgaacatgggatgcatgtaatatgtgtgcttgttcagtacacatgtctcgggtactgaacccttcatgaatattcatagctcttcttataaacttggaatatgtatacttagccaaccccttcaccataaatttctgtctcacctttcctccttcaaagtgtctgccaatggtctctgccagaggctacacttcccagcctgtcagcgtggcctccctgcaggctgtaatcctytataaggaataaagtctcctttctaaatttaaaaatttgtgatttttttcagttgaaaaatatggcaaaatatgtttttccacatttcaattttatcatctataaagggaataagtcactgattattatataaagtaagttcaatgcatggcttataaacttactcaataattataagctattcttattaataagctcaattacttcagatttagtgattgaatgtaagtgacaagaagtagctaggaatcaaagatt

SEQ ID NO: 687035 - DNA, 631 bp, Homo sapiens
caaaagagaagtcagaaacaaacttggccattaatgaaaaacagtggggatagtgaatccttaccacaacccactaacattgataagaaatgttaattttctttcagtagaaaataaaactgtctttggttctgattaaactggtttttaaatgtttccagaaaagacaatgaggaagatcttttaaaagagcctgatttgtaagtgatctggaagtcttgcattcactgttggcaaggataccagttgtatacagattcaggaattccactggtggacgcttatcagctaaatatctawtgatagagaaaaacaaaataattttgtattaaagagaaaaacatccttttataactagaaaaggagcaagaggattcttagagtagatatgtctttaaaatttacctgaaaatgagtttgagaccagcctggccaacatgtcgaaaccctgtctctactaaaaatatgaaaattagccaggcatggtgccaggcacctgtaatcccagctacttaggaggctgaggcaggagaatcgcttgaacccaggaggcagaggttgcagtgagccgagattgcgccactgcactccagcctgtgtgacaaagcaagactccatctcaaaaaaaaaa

SEQ ID NO: 687036 - DNA, 631 bp, Homo sapiens
caaaagagaagtcagaaacaaacttggccattaatgaaaaacagtggggatagtgaatccttaccacaacccactaacattgataagaaatgttaattttctttcagtagaaaataaaactgtctttggttctgattaaactggtttttaaatgtttccagaaaagacaatgaggaagatcttttaaaagagcctgatttgtaagtgatctggaagtcttgcattcactgttggcaaggataccagttgtatacagattcaggaattccactggtggacgcttatcagctaaatatctattgatagagaaaaacaaaataattttgtattaaagagaaaaacatccttttataactagaaaaggagcaagaggattcttagagtagatatgtctttaaaatttacctgaaaatgagtttgagaccagcctggccaacatgtcgaaaccctgtctctactaaaaatatgaaaattagccaggcatggtgccaggcacctgtaatcccagctacttaggaggctgaggcaggagaatcgcttgaacccaggaggcagaggttgcagtgagccgagattgcgccactgcactccagcctgtgtsacaaagcaagactccatctcaaaaaaaaaa

SEQ ID NO: 687037 - DNA, 776 bp, Homo sapiens
atgggccatcaccctcaggaaaaattaaaataaatttcatgccacaaagaagcaaaaagcaataattaagggctagaaaaaggatcagacaattagtcaccacttgctctgccagagtggttgagagcatagtttgggaatgagacagatctgggtttgagtcctcactgctgtgcaccacctctactaccttgagcaaattagttacttgctctccctgtatctgagccttctgatctayaaaaagtgtctaaaatcttccagagttgttgtaagaattctgctggctttattattttttaatacattatcatactattgctcaattagccatcagtacctttcactaaataacacagcagttatatacacacctcccccagcagaattctctaaggggtaagagcctgtttactggctttactcatgagattcttcactctctggtcaaataggtgtgtcagcaaaggaatctacacataattatcattaaggaattcattaattcaagacttactgagaattgtataaagacttgttgagaaaaactgaacccacactcaaacgaaatctctattcaatgaactatacgtacgtgtttggaatgagttttcttcatgcttcctattctgcagtgctaagaagcaggcaacaagcctttgcagtgaggctaggggagtgatttccatgctgactggttagagtttctcccttgtgggttccatgatgctcttgctctgtattacctgactgatctgtgctgggatattttttta

SEQ ID NO: 687038 - DNA, 465 bp, Homo sapiens
gttctttgaaacagttagagtgtccactgtggacatgagtatgtaataactaaatattgtaaaagaaaaaatgcactggaccagttaaacaggtaaggaagacattattcatgactgttgcaataggagagacttttgcaataaggaagaaagtttgaatccagctgtgctgaaacaaaaggcagggggattcttcatgctggtatgagctaatggagaacattaagatatcagtccaagtgactgggccatttgtgtttgctagttggtgcttagcaaagttaggcttctatatttccacagggactgagacagggttctgtctttcttcatgactacatttcaaatggatgacccctagatctttgagaaagacatttctgggctacagaagatacacttctcaaaagggcaaagaaagggtttataagttttcttaaagtaaatatcctaaggaaagmaaaa

SEQ ID NO: 687039 - DNA, 649 bp, Homo sapiens
ttttttwaaaactatttagtttagaagccatttcaatttatacatttcccatacttctgttcttccaaaagataaacacatacaaacacctcgtggtttcttttgaaattccttccatgagaaaggtgagcaggaagaaacggacaacagctacaagcctgtcatactcttgttggattaagaatctgggaaccgttggtcgggtgcagtggctcacacctgtaatcccagcactttgggaggccaaggtgggtggatcatctgaggtcaggagctcaacaccagcctggccaacagggtgaaaccctatctctactaaaaatacaaaaattagctgagtatggtggtacacacctgcagtctcagctacttggtaggctgaggcaggagaattgcttgaactctggaggcggaggttgcaatgagctaagatagcgcccctgcactccagcctgagcaacagagtgagactttgtctcaaaaaaaaaaaaaaaaaagaatctgggaactgtaaaccatgcccttccaataaaggcaatttttgttggctattttggtgcctaatcgcttgtgtgtctgccgggaaaatccgacaagagcagcatgtgtgcgtggtgtgtgcaccctcagttctgaggaaggcctgctc

SEQ ID NO: 687040 - DNA, 649 bp, Homo sapiens
ttttttaaaaactatttagtttagaagccatttcaatttatacatttcccatacttctgttcttccaaaagataaacacatacaaacacctcgtggtttcttttgaaattccttccatgagaaaggtgagcaggaagaaacggacaacagctacaagcctgtcatactcttgttggattaagaatctgggaaccgttggtcgggtgcagtggctcayacctgtaatcccagcactttgggaggccaaggtgggtggatcatctgaggtcaggagctcaacaccagcctggccaacagggtgaaaccctatctctactaaaaatacaaaaattagctgagtatggtggtacacacctgcagtctcagctacttggtaggctgaggcaggagaattgcttgaactctggaggcggaggttgcaatgagctaagatagcgcccctgcactccagcctgagcaacagagtgagactttgtctcaaaaaaaaaaaaaaaaaagaatctgggaactgtaaaccatgcccttccaataaaggcaatttttgttggctattttggtgcctaatcgcttgtgtgtctgccgggaaaatccgacaagagcagcatgtgtgcgtggtgtgtgcaccctcagttctgaggaaggcctgctc

SEQ ID NO: 687041 - DNA, 1162 bp, Homo sapiens
gagacccaagcaaggggtaactatgatggtagaacttcaggaccccccaccaaaatgagctctgaactgggagtcagggtggagtcccactctggctggcaccgaacccacagttggatgaatcttctctccactctgaggctcacaatcccactctgcacaatgatggacttgaattggatcagttgtcccaagtctgctgcagatgggcatctccccagggcctctgctctgactatgaaatgctctgattccctctcccatttgtgagagaagtcacctgggccatgtgtagtttgacagcagaggtggttgggctcaagatgttgagaggagaatccaggtcagcaggccaycccaggagcattttacatggggtggaatctccctggcttctagagcagccaggaagactgcagaatcccagggagagggcatagtgtcacaggcatggcaaggtacagagagcatgacatggcatcatgggcacagcatcatggatacagcagagcatcatgggcacagatcataggtacagcagaatattacagtcacagccctggtttcctcagcttccccaagaattcggacagacacctgagggggagagaaacataaaaggaatattctcccttctgtcagagttgttttattatttcattttaaaattagaaattattttaaagtacacaagtaacacaactattttatcctcgtataaaaattggaaacaacagagaaaggacaaggctctgtgaccattcccttgctagaggtacccactatgagtgtttcatgagtggacttctagactttttcttggatttacactcatttatgttcatagaggaactcaagtttaagtaagggcagattctgtttttatgagaacagcttttttttttttttttgagcacggagtttcactcttgttgcccaggctggagtgcagtggcacaatctgggctcactgcaacctccgcctcctgggttcaagcgattctcctgcctcagcctccctagtagctgggattacaggcgcccaccaccatgcccagctaactttttatattttcagtagagacggggtttcactatgttggccaggttggtctcgaactcctgacctcagacaatccaccccccttggcctcccaaagtg

SEQ ID NO: 687042 - DNA, 599 bp, Homo sapiens
ccatactagccaggatggtctcaatctcctgacctcgtgatccacccacctcggcctcccaaagtgstggggttacaggtgtgagccaccacgtccagcctccacacattttaaagaaagagcactagcctgagatcagaacctgggctgcactcacagccccactcctacttagttacatgacctggaacaggtcatttctctagctggggcctccctagctgggatctcagtcttcctttccgtacaacggaagggctttaattgacccctaaggtctttttcatttctggatcatccatttggataatgctatcaggaagtttccagcagttctgctttctgggatcctaggacccagaaataggtcctgggatcctaggacctattttgaaatactattatggtccatcctgaccaggtgtcatagtcagtctgctgattactaaagaattactccctagaccagtcgagggttcctaatttttttttcaaggcttaaaagaccatacagctcagacagaaggtctaacagttgcaattaaatcttggaggactaacaagacactgcagaattttgtagagtctcagaccatatt

SEQ ID NO: 687043 - DNA, 840 bp, Homo sapiens
aacagaaatgaaaatcctcacaaggatgtgaactgtggatgtgaaaatgctgtgtgaatttcgcagtgacacactaacaggtataacggtaaataggagtaataatcattatgatggcactaagtatcatctgcatcattaaatttattgagggctgtacctagtggttctgtggtgcctggccccaccgattcctgctgtattgagccagggacttgagtcaggactacatatgagaagctgtaccccagcctttgtgtcaatccttaacacaaatccctgcatgtcccccactcactcctagggcctggggaggagcggtgcagkccacagggtgataccattcatcccatgctgcctgtgaggcccagggaagaactagtcaccctcaaagtcactctccttctgaaacctccccaaggcctttccccttctgcagagcagcctccagctagtttctcggacgagaatcttggtgttccatctttggattcttccagacatttcgttcatgctgtctgttcctcacccccatggggagtcctccagtcagctcagagcctcccctcaagcctctcacctagccactcattgctcagtcatcagccacatgatatgctagccatcacgacagcctggtccctggctaggaggcccctcccatcatgttggccagctcctgctcatccttcaataccctttctgctgcaaaagttgtcttgacactctgccctgggcaccttccatggccatcagcagatctgttcatccagggcagggagcaaggcttgctcaaatctgcaactggtttcccgtgcacaaggagtgactgctgcacgg

SEQ ID NO: 687044 - DNA, 601 bp, Homo sapiens
ctcacagcttggttttagcccagtaaaaccgattctgacactataatataataaatgtgtgctgctttaagccaccaagtatgatgataggaaacaaatataagcataaatcctgaaataagtgttattatatggtatgaaaaggcatggggcacagaggaagggcctggagaagtcagaagagtctctttaggggaggccacactgtgagagttaaaccacgaagttagagggagcacagtctacacaaggctgccctcacttctaactcaaattgaaagttcagggggtcctcaaacttttaggtttgatagttctgtagaaggycacagaactcattgaaagctgctacactcacagttacagtttattacagggaaaggacacagattgaaatcaggcagggaaaaaatagccaagtacatagagcagagcctggggaagtactgaacacagagattccattgtcctctccctgctcagtcatggacagcctcactttctcagcactgatgtgtaacaacatcaacgtgtggcgtgaagtattgccacctagggagcctcaacggagttttcactggggctccgtcgcataggcata

SEQ ID NO: 687045 - DNA, 1345 bp, Homo sapiens
ctcagaccagagcaggccaagtcccagacagaaactctggtaggggtgccccaccagggttgtgtccccctactttttcacacccactggaaaatgcagtgtaactggtagatgcccagttttgggtagaaattgccagatttttgtaccacctggttgctcagtcttcttccaattcccacccaaagtagcttggccagccactaatgtcaaacaaatctatcatttaaaagccattgctggccgggtgtgatggctgatgcctgtgatcccagtactttgggaggccaaagtgggcagatggctagagcttaggactttcagaccagcctgagcaacaccgtgaaaccccatctctaccaaaaatataaagaaattagctgggcgtggtggcatgtacctgtggtccagctactcgggaggctgagttgggagaatcgcttgagtatgggaagtggaggttggagtgatccgagattgtgccactgcactccagcctgggtgacagagtgacatcttgtctcaggggaaaaaaagaaaaagccattgctgcccagtagcagagaattggttaaatactctatctttttacattggcataatggttcaattaaattaatttattaaaattattttaaaagggattaaaacttaggttataaaacaatatatcaaatatgaggctaggcacagtggctcacacctgtaatcccaacactttgggaggctgaggtgggcagatcacttgaggtcaggagtttgagaccagcctgaccaatgtggtgaaaccccatctctactaaaaatacaaaaaattagcctagtacggtggcacatacctgtagtcccagctactcgggaggctgaggcaggagaatcacttgagcctaggaggtggagtctgcagtgagccgagatcgagccactgcactccagcctgggtgactagtgagactctgtctcaaaaaaaaaaaaaaaaaaaaaaaaaaaaagaagaatgtgagctcattttcttaatatatatatttgagtccagtttatacatacatagcatacaaacacaaacacacacacacacacacaaagtgaagggaggaagagagcragagagaaaccgctaaaacggtaacaatatttatctctggatgatgtgattataggagatttttttttctattgctgttaaacaatattttctaaatttttttacaatgaatgagtgttatatttttgaattacccagtataagttattataatttttaaaaagccactgtaataattcttggccttttcttccattctcataagaattaaatatttttctacattttagattcaaagtg

SEQ ID NO: 687046 - DNA, 617 bp, Homo sapiens
agaagcccctgttgtctctatgctgctgaagtcatatgggagaagcaatatgagcaggcaacatctgactccaaagtaggatttgtgcttgtgcatacaccagttaactgacaaagcacacactccttcagatggagttggaatcagtgtcctcaactatgtggcagtaaaagttcaaatttaaatgcaagtgctcaaagcacaattttagaaaggatttttaaagcattagttaaatgctcatgaacagtttcaaaaagaactcactgggggaggagccaagatggccgaataggaacagctccggtctacaactyccagcctgagcgatgcagaagacgggtgatttctgcatttccatctgaggtaccgggttcatctcactagggagtgccagacagtgggcgcaggtcagtgggtgtgtgcaccgtgcgcgagccaaagcagggcgaggcattgcctcactcaggaatcgcaaggggtcagggaagttccctttcctaatcaaagaaaggggtgacggacggacggcacctggaaaatcgggtcactcccacccgaacactgcgcttttctgacgggcttaaaaaacggcgcaccacgagattatatcccgc

SEQ ID NO: 687047 - DNA, 617 bp, Homo sapiens
agaagcccctgttgtctctatgctgctgaagtcatatgggagaagcaatatgagcaggcaacatctgactccaaagtaggatttgtgcttgtgcatacaccagttaactgacaaagcacacactccttcagatggagttggaatcagtgtcctcaactatgtggcagtaaaagttcaaatttaaatgcaagtgctcaaagcacaattttagaaaggatttttaaagcattagttaaatgctcatgaacagtttcaaaaagaactcactgggggaggagccaagatggccgaataggaacagctccggtctacaactcccagcctgagcgatgcagaagacgggtgatttctgcatttccatctgaggtaccgggttcatctcactagggagtgccagacagtgggcgcaggtcagtgggtgtgygcaccgtgcgcgagccaaagcagggcgaggcattgcctcactcaggaatcgcaaggggtcagggaagttccctttcctaatcaaagaaaggggtgacggacggacggcacctggaaaatcgggtcactcccacccgaacactgcgcttttctgacgggcttaaaaaacggcgcaccacgagattatatcccgc

SEQ ID NO: 687048 - DNA, 617 bp, Homo sapiens
agaagcccctgttgtctctatgctgctgaagtcatatgggagaagcaatatgagcaggcaacatctgactccaaagtaggatttgtgcttgtgcatacaccagttaactgacaaagcacacactccttcagatggagttggaatcagtgtcctcaactatgtggcagtaaaagttcaaatttaaatgcaagtgctcaaagcacaattttagaaaggatttttaaagcattagttaaatgctcatgaacagtttcaaaaagaactcactgggggaggagccaagatggccgaataggaacagctccggtctacaactcccagcctgagcgatgcagaagacgggtgatttctgcatttccatctgaggtaccgggttcatctcactagggagtgccagacagtgggcgcaggtcagtgggtgtgtgcaccgtgcgcgagccaaagcagggcgaggcattgcctcactcaggaatcgcaaggggtcagggaagttccctttcctaatcaaagaaaggggtgacggacggacggcacctggaaaatcgggtcactcccacccgaacactgcgcttttctgacgggcttaaaaaacggygcaccacgagattatatcccgc

SEQ ID NO: 687049 - DNA, 612 bp, Homo sapiens
cttttgtctttatggctaaagaagcagtgctgtatcccacagtagtacaaagggcaaaagatgagtgccaggtaagctttgtcctctacaagattctctaaagccccactctacgaattccacttccctctcattggccagattgagtcacatggccattcccagtttcaatggcatctgggaaagtaattttacctgggaacatttaactgtgttcttttaatcagaagaaagggagaaaggacattgaggagataactagtattttctaccacaaataatagaatttaaattcttctgccattgttcctaattggctgaacaactgtgagaacaaattccacagaaaaaatatacagttataaaatacatatatgagtataacatcatgacagatcactgtacttctcagattcattctgtttaattaagactttccacatttcatcaaaaatatttcttatgaatttatcgctaatttacttccaccacttggggcagagctstgtacatggtaggcattcagcatgtgtgtgtgtgtggtgtgtacaaaataatatgtttgacatataacagtgtcctaagcaacaaggtaataaaatatcatatatc

SEQ ID NO: 687050 - DNA, 621 bp, Homo sapiens
taaatacattcacttacataaaagactacagataaatctaatgtccctctttcactctctctctccatccagattccaagaagtagctattgttgctcatttagtttatgacctttatgattttttaatgtacctgtatatctgtatatatgtagctaaagaggtatagtttggtttctttctttctttctttctcttcttcctttctcttctttctttctttctttctctttctttctttctttctctctccttttacaaatgctttgatattttgatgtgattactttgttgattaaggatcagttccytagtgacattaatacctttacaatatttaatcttcctattctggaacatgtttttattttactttatttttagttgacaagtaaaaattgtgtaccatgtgatgttttgaaatatgtacacattatggaatggctcaactgagctaattaacatctgcatttattttgtggtgagaacatttaaaattttactctcagcctttttcaaaatacgataattttttttttttttttgggatgaagtctcgttttgttacccaggctgcagtgcagtggtgcaatcttggctcactgcaacctctgcctcctg

SEQ ID NO: 687051 - DNA, 621 bp, Homo sapiens
taaatacattcacttacataaaagactacagataaatctaatgtccctctttcactctctctctccatccagattccaagaagtagctattgttgctcatttagtttatgacctttatgattttttaatgtacctgtatatctgtatatatgtagctaaagaggtatagtttggtttctttctttctttctttctcttcttcctttctcttctttctttctttctttctctttctttctttctttctctctccttttacaaatgctttgatattttgatgtgattactttgttgattaaggatcagttccttagtgacattaatacctttacaatatttaatcttcytattctggaacatgtttttattttactttatttttagttgacaagtaaaaattgtgtaccatgtgatgttttgaaatatgtacacattatggaatggctcaactgagctaattaacatctgcatttattttgtggtgagaacatttaaaattttactctcagcctttttcaaaatacgataattttttttttttttttgggatgaagtctcgttttgttacccaggctgcagtgcagtggtgcaatcttggctcactgcaacctctgcctcctg

SEQ ID NO: 687052 - DNA, 540 bp, Homo sapiens
tgaaggtagtgggtctttctgcaattttttttattttttacttctctggtgtacttgatctgcaattatttagacaagaaaaagacaatrtattctatgccagaggagatacatatctgataagacaagaaaaaaagattgaaattaagcaagggaaaactcaaagaggctgcctaacgaaatctttttcagacttggctgatcattagaatagcctagggagctatggaaaactattcttttctagaacatatccccagagattttgaatcccttgttctggggtggggtgcaagcacgggtatttttgcacaattctccagataaatgtaatatctatactgttatcttcccttgaattattgtatttttatggaaataaataaatttaacttggaaaaacacagccagagtaaaatgagtcttttgattactaattgactaataatttgtcttttaatattactaaactaaaaacatgtctgcgcaaaaattagggtcttctttttagcctcgttagcagattagaaattttaactc

SEQ ID NO: 687053 - DNA, 540 bp, Homo sapiens
tgaaggtagtgggtctttctgcaattttttttattttttacttctctggtgtacttgatctgcaattatttagacaagaaaaagacaatgtattctatgccagaggagatacatatctgataagacaagaaaaaaagattgaaattaagcaagggaaaactcaaagaggctgcctaacgaaatctttttcagacttggctgatcattagaatagcctagggagctatggaaaactattcttttctagaacatatccccagagattttgaatcccttgttctggggtggggtgcaagcaygggtatttttgcacaattctccagataaatgtaatatctatactgttatcttcccttgaattattgtatttttatggaaataaataaatttaacttggaaaaacacagccagagtaaaatgagtcttttgattactaattgactaataatttgtcttttaatattactaaactaaaaacatgtctgcgcaaaaattagggtcttctttttagcctcgttagcagattagaaattttaactc

SEQ ID NO: 687054 - DNA, 2130 bp, Homo sapiens
tttttttttttttggaatctgttcaatgaaaataaggtatgacccaagtttttactagtctgactagaagtattccacttcaaggtctgaagtaggacttttaccttaaaaaacaacaacaaacaaaactatcacacaggatagataagaagattggttaaacagttttgtgtagatctttttggtgctgaactatgacatgagccttatagattgtaaaatagggatagttggaactaatgtacagaactaaattttttaaactttatttgctgttaaattctgtgaagtttcagttatctaaaataaatatacacaaatatgaaatataatgtttcagattgcaaggtaatatgtaatagtagtgtttgtaagatactcttgtctaatattaactagtagtattttgatttgtacagtcataatttgttaaaatgacttcatttaacattcactgatgtagattaataatgtaagttctgatttaaagaatggtggsaaaatggtgcatgtaatacttttgcaagtgttggggagatcggtatgttttgaaaagagtaatttaacttttgggtgccaggaaatgggttttctcaaagtccattgccggcaatgggcaggcctgcaaatactggcacagagcattaatcatacaccttattaacggtgaggtgaataactttgaaataaagttttagagaaatgtttcagatacttgagtattctttttcactcttgaactaacaacttcggcaagaaatcagctaatattctatttttaaatatgggcattaatttcatttcagttcgttcactcattccattcatttatcatttcacaaacatttgaaatcctaatataagcaaggtgctctgtttaaggcagaaatttgaaaatgtacaagatatatggtcttgtctttaaggagctgttcatctagaatggaggaatttacactgataattattcctacacttgaaacaaagaaattaactctcaaattgcgtggcaagcatatatagactttgctataaatatttatgaaatgagttactgttttccttaaaaaagctaagactaagggctggcaatcaaataagagcaaatttagtggtgaacgtagaactgcccactaccagctagagtctccaacctaaaagtcccatgttgctagtgatccccaggggttttatagaaggaatccctgcattggcagtaattttggattagatgatccctaagagcaccatcaagtcttaggattctatgaattaggaaataaaccaaattatatattttctaatactgatcagctcatattttatcatcatgtcatgtctggctttcatacttagtcataatttactttctgggtcatttagaggctagcgttctctaaggtcacttctgcttgcacattgtaggatattatttagtatggctttaagaattcaatctttccccctctcctttatggaatgtgtgtttcctctatttgtacacttaaccttttgtcctaagtttttatttttatggatactaatgagtaactttgaggttgacactagacccaaacagatgcaaacagccactttctgtcctcttgtgacacagttgaaacactttatctcttgtctgctgtttggagtgtcctgaaagaaacactgaagtggcagtcaacagagcaagggtaacaggatctttaaataatttaaagttgtctgatcttgacataaaagtgaaccctttctttaaaatttctagcaactgctcttaagtcataggttcctcattttttctttgctggtagtgggagaaaatagttgatctgtgatttttgttttcatctccccaaactatgttataaaggcagtaatttgatgctgaagattatgattagaaatcctcagatgggttatatattggggctttatcttttaatattaaaaagaatgtctttcctggactactttattcagtacgtaagcactattcattctatgtatattccttattcagccttgcagactcctgtgggatctgatctcttcctgcttcaactcagtaccatactcaccaaggcttagtatgtcttcacccactctcccttctcttgcattcctcaaaca

SEQ ID NO: 687055 - DNA, 1494 bp, Homo sapiens
aaagatgatttataattcattcaattagaattttttgtatgagctaagaagaggacttccctttatttctaacattatgttttttatacattgtataaggaaggtggaatttcttaattcaaaccataatatgtgaggcaaaagaaaacaaatcataatgggttcctcaacaattcaagtttccaaaaagtgaaagccacagcataaataccacacgtatgataatatagttttgacatctgcctaaaaaattgaggtttatagttctctaaagaacataatagatgtagataatcttatcaataatggtaagatgttatttctaactttttccaaactattccccgtcagtttaggtagttctagattttctataattattattacttcttgtaaatatttcaacagattttttatcagctgccaaacattataatactttgttgtataaaattgtaaagtttactatttcccagtttcttgcttgtgaatactttactggacttttagaactctagtgatataaccctaatattttatgaaatttccctcaggagtattttaaaatagtttttgcttagctaaaaaaaaatttgattgcaaataacagaaagtcacttgcactggattatgcaaatgggttttactacaagaaaacaggactattttaaggactttatggtggtggcacctgttagctagacatcactgtccccactgctctacacatcttagcatcctctctctccagcttctcctgctgctgcctttcgctgcctctctgtatatataggataagatagccacaaaaaagttccatgtgtagaaatcctcagctgcaaaacttttacaatttaattgtctgtgaaaaatatttctgattttctggtgaaaataatgtaaacatcaaatgtaaacccaagtcatgaatgtgaagagcacatggaaccccccaaaaaatgtttgagaaccaattagatgtccccgcctttggtgagtggacagttatcaaagaaaggaggttgttttacatggcacagtcactccaaatacgtctattatgttaaccttaactatttgtccaagagttttaataaaaaacagcatgtatacataatacagtcattgcctttattttctttgtgaagaaaggcagtagagacatttaggatgaaaaaccagctccaacatttcttattaaaattacattttatttaaagttttattgtcttttctatggttttcaattctataatttctctttcacaatactcattttgacacatcaatgtatagtaagaattccaaattaactgcattggaaaataaaaagggaagatagggttcaaagaatgcagagaatacttaatttttttgccacatttttcttaacactgaactattatgtggagttaacactattaatatgacatcttgttttataatttcaggagctgattcaactttttacttagacactcactcatttkgggg

SEQ ID NO: 687056 - DNA, 643 bp, Homo sapiens
agagcaagactgtctcagaaaacaaaacaaacaaaaacaggttaacaggagaggatacagatttacttaatagaagttttgcatggaatagaagccctcagaagaaaatgaatttgagaggtcaaggcaggaggatcccttgaggccaggagttcaagaccagcctaggcaacatagcaagaccctttctgtacaaaaaatacaaaaattagcagggtatggtggcgtgtgcctgtagtcccagctactcaggaggctgaggcgggcggtggaggttgtggtgagctgagatcgagtcactacactccagcctgggtgacaaagactctgtctgtctgtgtctctctctctctctctcaaaaaaagaagggkctgggcatggtggctcatacctgtaatcccagcactttgggaagctgaagcaggtggatcacttgaggtcaggagtttgagaccagcctggccaacatagcaaaaccctgtctctactaaaaatacaataattggccaggtgtcgtggcacgagcctgtggtcccagctacttgagaggctgaggcaggagaatcgcttgaacctgggaggcagaggttgcagtgagccgagatcgcgccactgcactccagcctgggcaatacagcgaga

SEQ ID NO: 687057 - DNA, 643 bp, Homo sapiens
agagcaagactgtctcagaaaacaaaacaaacaaaaacaggttaacaggagaggatacagatttacttaatagaagttttgcatggaatagaagccctcagaagaaaatgaatttgagaggtcaaggcaggaggatcccttgaggccaggagttcaagaccagcctaggcaacatagcaagaccctttctgtacaaaaaatacaaaaattagcagggtatggtggcgtgtgcctgtagtcccagctactcaggaggctgaggcgggcggtggaggttgtggtgagctgagatcgagtcactacactccagcctgggtgacaaagactctgtctgtctgtgtctctctctctctctctcaaaaaaagaaggggctgggcatggtggctcatacctgtaatcccagcactttgggaagctgaagcaggtggatcacttgaggtcaggagtttgagaccagcctggccaacatagcaaaaccctgtctctactaaaaatacaataattggccaggtgtsgtggcacgagcctgtggtcccagctacttgagaggctgaggcaggagaatcgcttgaacctgggaggcagaggttgcagtgagccgagatcgcgccactgcactccagcctgggcaatacagcgaga

SEQ ID NO: 687058 - DNA, 643 bp, Homo sapiens
agagcaagactgtctcagaaaacaaaacaaacaaaaacaggttaacaggagaggatacagatttacttaatagaagttttgcatggaatagaagccctcagaagaaaatgaatttgagaggtcaaggcaggaggatcccttgaggccaggagttcaagaccagcctaggcaacatagcaagaccctttctgtacaaaaaatacaaaaattagcagggtatggtggcgtgtgcctgtagtcccagctactcaggaggctgaggcgggcggtggaggttgtggtgagctgagatcgagtcactacactccagcctgggtgacaaagactctgtctgtctgtgtctctctctctctctctcaaaaaaagaaggggctgggcatggtggctcatacctgtaatcccagcactttgggaagctgaagcaggtggatcacttgaggtcaggagtttgagaccagcctggccaacatagcaaaaccctgtctctactaaaaatacaataattggccaggtgtcgtggcasgagcctgtggtcccagctacttgagaggctgaggcaggagaatcgcttgaacctgggaggcagaggttgcagtgagccgagatcgcgccactgcactccagcctgggcaatacagcgaga

SEQ ID NO: 687059 - DNA, 614 bp, Homo sapiens
tttctgggctctgagatgaccacagaggccagggtcaaatgctgggccactcaccacatactgatgatgctgtcaaaatgtggttacccttctgctccmcctcaattatctatggaaaacctaatttaaggggtatatggtgttttgtctgcccgcatttcttcctgtaagaaacacgctttcccctcttccctagtaaactgtctcagtccttacgagttggtggagctggactgcctcacttccatccccaaggtcaggtacatgcccagatctggtcagaggacttcatgtgtcaaggtacaactactgcctcagccatgagcacttgactcatacagtgcccattagcgtccacctggggactttttctgtgctactggaacaaaagtgcatgtttcctcaccatctttggctgttagccctatgtgaacatggaggtatcttgctgccatgcgatgaaaagcttatacacaacgcagagggtaagtcagagaaactagttaatgacataatttgagatccaaatctgcctgacttttcagctacagaagccaataaattcccttttttttctttttttctttttttttgagacagagtctcactgtcgc

SEQ ID NO: 687060 - DNA, 614 bp, Homo sapiens
tttctgggctctgagatgaccacagaggccagggtcaaatgctgggccactcaccacatactgatgatgctgtcaaaatgtggttacccttctgctccacctcaattatctatggaaaacctaatttaaggggtatatggtgttttgtctgcccgcatttcttcctgtaagaaacacgctttcccctcttccctagtaaactgtctcagtccttacgagttggtggagctggactgcctcacttccatccccaaggtcaggtacatgcccagatctggtcagaggacttcatgtgtcaaggtacaactactgcctcagccatgagcacttgactcatacagtgcccattagcrtccacctggggactttttctgtgctactggaacaaaagtgcatgtttcctcaccatctttggctgttagccctatgtgaacatggaggtatcttgctgccatgcgatgaaaagcttatacacaacgcagagggtaagtcagagaaactagttaatgacataatttgagatccaaatctgcctgacttttcagctacagaagccaataaattcccttttttttctttttttctttttttttgagacagagtctcactgtcgc

SEQ ID NO: 687061 - DNA, 614 bp, Homo sapiens
tttctgggctctgagatgaccacagaggccagggtcaaatgctgggccactcaccacatactgatgatgctgtcaaaatgtggttacccttctgctccacctcaattatctatggaaaacctaatttaaggggtatatggtgttttgtctgcccgcatttcttcctgtaagaaacacgctttcccctcttccctagtaaactgtctcagtccttacgagttggtggagctggactgcctcacttccatccccaaggtcaggtacatgcccagatctggtcagaggacttcatgtgtcaaggtacaactactgcctcagccatgagcacttgactcatacagtgcccattagcgtccacctggggactttttctgtgctactggaacaaaagtgcatgtttcctcaccatcttkggctgttagccctatgtgaacatggaggtatcttgctgccatgcgatgaaaagcttatacacaacgcagagggtaagtcagagaaactagttaatgacataatttgagatccaaatctgcctgacttttcagctacagaagccaataaattcccttttttttctttttttctttttttttgagacagagtctcactgtcgc

SEQ ID NO: 687062 - DNA, 2027 bp, Homo sapiens
gtctataatccatgttcaataactggctgcctggtgaatacagctcacctcagagctgttcatgagcataggatttatacagcacagtcacacgatatgacataggcagtttttatttccttaactactttcagacactatgtggccaggcgcggtggctcatgcctgtaatcccagcactttgggaggctgaggcaggcagatcacgaggtcaggagttcgagatcagcctggacaaactggtgaaaccctgtctctactaaaaatacaaaaattagctgggcatggtggcgggcacctgtaatcccagctgctcgggaggctgaggcaggataattgcttgaactggggaggcagaggttgcagtgagccgagatagcgccactgtatccagcctgggcaacagagaaatgctccgtctcaaaaaaaaaaaagagacactaggctatagctcagattccacaagtatctctatctaaaggatatgaatgagtgaatgaggcaaaatagggaagagaagaagggctttatttatttatttttttttttgagatagagtctcgctctgttgtccaagctggagtgtggtggcgcaatttcggctcactgctacctctgcctcccaggtcgcggttgaagcaattctcctgcctcagcctcccgagtagctgggattacaggcacacgccaccatgcccagctaatttttgtatttttagtagagatggggtttcaccatgttggccaggctggtcttgaactcctgacctcgtgatccacccaccttggcctcccaaagtgctggaattataggcatgagccaccgcgcccagccgggttttaatttttatctactgctttaactttcacttcagtgtgttggagtgtggtggacaagcactcttcctcactctgccatcctgtttctgttgatattttcaaccattcagctatggatgtctgaagcctctctttgacagtgatagacaatttccttgatattcttaattgcttatttttccattgacttataaatgagaaaaatataataaaaatgggaagctatcaacaaattctgctggatattgattataatcacagtgactaagttaggcatccattttaaaatccagagttactatgtatttgtttctgtatgctgcctatctgaagtaaatttctgtctctaccgcttgcttctactgtaacagcctcatgccatttcccttcctgtttcctttcacaacccccagtatattttataaaataataacttttactaaatactgctgtaaatttaacatgtattatgacaaatgcatgtaacagttctaaaacaaagaattacctccctttaacatctgagaaaattgagttcagaaaggatagtaattggcccacaaaaattctggacacttagtacacaaagggaaattaacaaatcatggtgcatatacaatggggtcctgaaaacaataagaatgatgatgggaaaattaggcttataaaacccttagcataaaacgtcattctcaaatgagtcaaacatggaaagatagtcttaaaattgttaacaatggttgcctctgcaaatagaccatatataagcttctttctgaagaaaatggtggatacaggaataccagtggcacaccttgggaatagtaaaaaagtaactgacagggcacagtggctcacgcctgtaatcccrgcactttgggaggtcgaggcaggcagatcacctgaggtcaagagttcaagaccagcctggccaacacggcaaaagcacatctctactaaatatacaaaaattagctgagcgtggtggcgtgtgcctgtaatcccagctatttgggaggctgaggcaggagaatcgcttgaacctgggagacggaggttgcagtgagccgagatcatgccactgcactacagcctgggcgacagagtgagcctccatctcaaaaaagaaaaaaaaaaaaagaactgatagaagcaaacatcatttaaatattctttatttttttgca

SEQ ID NO: 687063 - DNA, 2027 bp, Homo sapiens
gtctataatccatgttcaataactggctgcctggtgaatacagctcacctcagagctgttcatgagcataggatttatacagcacagtcacacgatatgacataggcagtttttatttccttaactactttcagacactatgtggccaggcgcggtggctcatgcctgtaatcccagcactttgggaggctgaggcaggcagatcacgaggtcaggagttcgagatcagcctggacaaactggtgaaaccctgtctctactaaaaatacaaaaattagctgggcatggtggcgggcacctgtaatcccagctgctcgggaggctgaggcaggataattgcttgaactggggaggcagaggttgcagtgagccgagatagcgccactgtatccagcctgggcaacagagaaatgctccgtctcaaaaaaaaaaaagagacactaggctatagctcagattccacaagtatctctatctaaaggatatgaatgagtgaatgaggcaaaatagggaagagaagaagggctttatttatttatttttttttttgagatagagtctcgctctgttgtccaagctggagtgtggtggcgcaatttcggctcactgctacctctgcctcccaggtcgcggttgaagcaattctcctgcctcagcctcccgagtagctgggattacaggcacacgccaccatgcccagctaatttttgtatttttagtagagatggggtttcaccatgttggccaggctggtcttgaactcctgacctcgtgatccacccaccttggcctcccaaagtgctggaattataggcatgagccaccgcgcccagccgggttttaatttttatctactgctttaactttcacttcagtgtgttggagtgtggtggacaagcactcttcctcactctgccatcctgtttctgttgatattttcaaccattcagctatggatgtctgaagcctctctttgacagtgatagacaatttccttgatattcttaattgcttatttttccattgacttataaatgagaaaaatataataaaaatgggaagctatcaacaaattctgctggatattgattataatcacagtgactaagttaggcatccattttaaaatccagagttactatgtatttgtttctgtatgctgcctatctgaagtaaatttctgtctctaccgcttgcttctactgtaacagcctcatgccatttcccttcctgtttcctttcacaacccccagtatattttataaaataataacttttactaaatactgctgtaaatttaacatgtattatgacaaatgcatgtaacagttctaaaacaaagaattacctccctttaacatctgagaaaattgagttcagaaaggatagtaattggcccacaaaaattctggacacttagtacacaaagggaaattaacaaatcatggtgcatatacaatggggtcctgaaaacaataagaatgatgatgggaaaattaggcttataaaacccttagcataaaacgtcattctcaaatgagtcaaacatggaaagatagtcttaaaattgttaacaatggttgcctctgcaaatagaccatatataagcttctttctgaagaaaatggtggatacaggaataccagtggcacaccttgggaatagtaaaaaagtaactgacagggcacagtggctcacgcctgtaatcccagcactttgggaggtcgaggcaggcagatcacctgaggtcaagagttcaagaccagcctggccaacacggcaaaascacatctctactaaatatacaaaaattagctgagcgtggtggcgtgtgcctgtaatcccagctatttgggaggctgaggcaggagaatcgcttgaacctgggagacggaggttgcagtgagccgagatcatgccactgcactacagcctgggcgacagagtgagcctccatctcaaaaaagaaaaaaaaaaaaagaactgatagaagcaaacatcatttaaatattctttatttttttgca

SEQ ID NO: 687064 - DNA, 1999 bp, Homo sapiens
ttgcatttttcactaatggatataccatttctaaagtttgactattgtctgtctgtcccatgcttaatcaaagcaagggctttgtttcatatactgctttatctctagtgcctaacatcattacttacacattgctggcattcaatatttgtcaacaatttctaaaatatatatgttccttcattcataaatctccttagatgcttctcataaaacacaaagtttgagaatagagctaataatctttcaatggtttacccttgtatttagaataaaatccaaactcctattcatggcctacaagcccctttacgatccagttctttcttaaatttctccaatttcttcaacgtaccttttaagcctcaaattgagccactactatcttcagaacaatgctctaatcttattggcctgatttaagttccaagaacatgtcaaattctttcccattttagattttccatatgctgttccatctgccaagaatgctctcaaagtggccacctcctttgcgtgtgaaatgtcctagcttaaatgtcagctgctcagaaagactatcctggatcactttaattaggtccatgccaggtattttctatacctgtaatttattcctaattcttgtttgaatttttgcaattctaaaatttcatttatttatctgttgatctttctgctcctcaagctctacatgtgtagggggaaaatgcctgttttattatatagctagtccccagaacacagtatacatataatgttttattcctttaatatagtttttcatgtcttactttccaatatttattacttaaggccaaatgttcttatatttcccaaagaagtacctcaaaatctcctagaaatagtgacaagtttacacaataaagatcttatattattccgaagaaagaagttgagaaacaagtgtacttttcaaatgcagagaaacctatctgatgtaactggatcagcaggcacagggtctctgaccactgtatataggctgtagaataacaaagactggtcatgggaagaaaaataaatacacatcagtaagctcaaatttaaacagtcttttagaaataagcctccaaaacttgagaaaacacacttttgctgaaaagcaaaaagaaatgataaaaacaaaagcaactacccccccccacttgccatatacacaccacagctcagtttaacaccaattcatgtcagcaacayatcctagaacaagatagaccctgcttttgtttctttcatagaagaacaatatggtttataaaacactgaaagaaatcaatgggcttatggtgattaagggaacactataaggaatcaaataaattcagttgggacccaaaatagctacctatgtgctagtgccctaataaaaatgggaagaaatattaatctaatatgattctggggtaggaggcactatgagaacacaggatggtgctaaacagaaatctagaggaatatagaaaaagttaagattagaataccaaagtctcagaactgtgcccagaatgaggagtacatataaaaatgtattcaattaagtagcagctctttttattgtcattaaattaatgaaaaaactatatggtgaaaaaagggaaaactgcaaaaggggtgatgagtgaagacaacaaaatggagtctgaaaaggaggagtcattttaggaggtttcttttattcttgcccccatcaagtcctactgaatatatctcctaagtagctctcgaatctgttaccttatcaccaacaccactgctgacactcgggaagcccaaggcatcttttttttttttgagatggagtctcgctctgtcatccaggctggagtgcagtcgtgccatctcagctcactgcaacctccgcctccaggttcaagcaattctgcctcagcctcctgagtagctgggcttacaggtgtgcaccaccatgcctggctcatttttgtatttttagtagagataggccttcaccatattg

SEQ ID NO: 687065 - DNA, 1999 bp, Homo sapiens
ttgcatttttcactaatggatataccatttctaaagtttgactattgtctgtctgtcccatgcttaatcaaagcaagggctttgtttcatatactgctttatctctagtgcctaacatcattacttacacattgctggcattcaatatttgtcaacaatttctaaaatatatatgttccttcattcataaatctccttagatgcttctcataaaacacaaagtttgagaatagagctaataatctttcaatggtttacccttgtatttagaataaaatccaaactcctattcatggcctacaagcccctttacgatccagttctttcttaaatttctccaatttcttcaacgtaccttttaagcctcaaattgagccactactatcttcagaacaatgctctaatcttattggcctgatttaagttccaagaacatgtcaaattctttcccattttagattttccatatgctgttccatctgccaagaatgctctcaaagtggccacctcctttgcgtgtgaaatgtcctagcttaaatgtcagctgctcagaaagactatcctggatcactttaattaggtccatgccaggtattttctatacctgtaatttattcctaattcttgtttgaatttttgcaattctaaaatttcatttatttatctgttgatctttctgctcctcaagctctacatgtgtagggggaaaatgcctgttttattatatagctagtccccagaacacagtatacatataatgttttattcctttaatatagtttttcatgtcttactttccaatatttattacttaaggccaaatgttcttatatttcccaaagaagtacctcaaaatctcctagaaatagtgacaagtttacacaataaagatcttatattattccgaagaaagaagttgagaaacaagtgtacttttcaaatgcagagaaacctatctgatgtaactggatcagcaggcacagggtctctgaccactgtatataggctgtagaataacaaagactggtcatgggaagaaaaataaatacacatcagtaagctcaaatttaaacagtcttttagaaataagcctccaaaacttgagaaaacacacttttgctgaaaagcaaaaagaaatgataaaaacaaaagcaactacccccccccacttgccatatacacaccacagctcagtttaacaccaattcatgtcagcaacacatcctagaacaagatagaccctgcttttgtttctttcatagaagaacaatatggtttataaaacactgaaagaaatsaatgggcttatggtgattaagggaacactataaggaatcaaataaattcagttgggacccaaaatagctacctatgtgctagtgccctaataaaaatgggaagaaatattaatctaatatgattctggggtaggaggcactatgagaacacaggatggtgctaaacagaaatctagaggaatatagaaaaagttaagattagaataccaaagtctcagaactgtgcccagaatgaggagtacatataaaaatgtattcaattaagtagcagctctttttattgtcattaaattaatgaaaaaactatatggtgaaaaaagggaaaactgcaaaaggggtgatgagtgaagacaacaaaatggagtctgaaaaggaggagtcattttaggaggtttcttttattcttgcccccatcaagtcctactgaatatatctcctaagtagctctcgaatctgttaccttatcaccaacaccactgctgacactcgggaagcccaaggcatcttttttttttttgagatggagtctcgctctgtcatccaggctggagtgcagtcgtgccatctcagctcactgcaacctccgcctccaggttcaagcaattctgcctcagcctcctgagtagctgggcttacaggtgtgcaccaccatgcctggctcatttttgtatttttagtagagataggccttcaccatattg

SEQ ID NO: 687066 - DNA, 1074 bp, Homo sapiens
acttctgaatagtctcctataaatagaaggcattatagcattcatagtaaaaacaaaggaaaaacaacgaaaaaacccacccctttatatcctccatctttgattaccaaaagcatatgtagaagccccaaatgctgcacccacagttcttgcagccacattactaaaattaataggctgtggtgtaatacaaattactctaattttaaatctactaacagtatatagcctatttctaatatcactatgaggaataattataacaaattctatttgttcatactaaacagacttagaatcactcattgtgtattcatctgtagctcatacagcattactaattatagcatttctcatccaaatgccatgaagttttataggagccctaataactgcccatgaccacacaacatcaaaatgattttgccttacaaattcaaactacgattccaggcacggtggctcatgcctgtaatcccagcatgggaggctgaggtgggcagatcacctcaggtcgggagtttragaccagcctggccaacatggtgaaactcccagctctactaaaaatacaaaaattagacagggatggtggcaggcacctgtaatcccagctacttgggaggctgaggcaaaagaatcgcctgaacccaggaagtggaggttgcagtgagccgagatcacaccactgcactccagcctgggtgagagagcgagactccatctcaaaaaaacaaaaacaaacaaaaaaacaaattcaaactatgaacaaatccatagccaaaccatacacaaggttccccaacttatgatacttagacttaagatttttcaaatttaccatggtaagaaagcaatacacattcagtatgctccttgacttaccaaggggttacacagaactacttacaatatttttgacattatccagaagtaaccccaacatatgttgaggagcatctgtactactagctcgcagactacagacattacttcctttaacagaaacatgataagtatgggctagcctaactgacctagccttttgcaacaactttttggctcctaaggcca

SEQ ID NO: 687067 - DNA, 961 bp, Homo sapiens
tctatataatttaagcttcttagtaactgttggattagcaaatttgagttggttgcttttgataaaaaatatactcctgtgtgtatcttgtgtagtgtggcagaaacgaatgtttttctcccttttcatcttccttttagtgttagatctcttcccctttgagttttaaaacaaggcacatggtcaaggtagagactacatttcccagcctcccttgcagctgggtgttatcatgtgacaaagatcagccaatgggatatgagcaaatgtggcaactgcaactcctatattacctccttcccatggatgggatattgacaagggcaacatccttctagaggatggtggagcaacaaagtagaaagcacctgagaccctggaacactgtgtggagcagagcttctttattagccctgaactggtcacttctgggttgcaacatgagactgaaataaacttctattttattcttttttttttttgagattttttctttatcacagcagcttagcttgtattctagctaactcaggttctcattaactgtgatggtggaagattacagtggtcttgctagtcctgggagcatggctgttgaatgtacgtgtgtatggatatgtaggaaggactggcagaaggaaagggaataggaagtaccatttgtcacatcctaccttgtgttctggatggttgacacttcactattgagggaggaaagttttcttttcaaaatccaaaagaccaagataaacaatactaaattcgcctgcaggaccaacacaaacaaggcagagtgcaagttaaagtaatgtatggtgtccactttaaattgcacacaggagtyctaccctcttgtacatgggactgaattggtagcaggtggaaaatcaaaccacccaacagtggaaatgcaagccccttgtaccatcttgtacccagcacttctcttggttcttcctag

SEQ ID NO: 687068 - DNA, 658 bp, Homo sapiens
gttgcccatggtatggctggtctgtggacttggggaagacaggcccctctctttgtcccatggtggcagcatyccggcccggttaattgcatgccacccttcccaggtcctcttgttccgtctgctcgatgaaggtaaaggctgatttccctgggatctgcccatgctctgcttctcgacctgtgttttcacctgtaatcagcaatgccacttatcagtgtctctgaaccctatctcatttaagcccatgacagtccagtgaactcggcacttttataatccttgtgttatgcctagaagctggcagacggaagaatcttgctcaaggccacccactagcgagcagcagccctggggcctgtccccaccctgcacatctgcccctcactgctgaccaccctggcttatctcagggtctgatttctccttgtgaactctaaactcttctttccagctaccaggcagatgccttgtggacagcttgcccccgtatccacaaggtacctcccagtactcctggctgccctctgctccctgctccattccttgtcttggctgtgggcatcaccacctagccaagcacttgagccctcacaaccagactaaccacaggccggtgaaagggctgaagcctccctgccttttcaccaggctgagt

SEQ ID NO: 687069 - DNA, 658 bp, Homo sapiens
gttgcccatggtatggctggtctgtggacttggggaagacaggcccctctctttgtcccatggtggcagcattccggcccggttaattgcatgccacccttcccaggtcctcttgttccgtctgctcgatgaaggtaaaggctgatttccctgggatctgcccatgctctgcttctcracctgtgttttcacctgtaatcagcaatgccacttatcagtgtctctgaaccctatctcatttaagcccatgacagtccagtgaactcggcacttttataatccttgtgttatgcctagaagctggcagacggaagaatcttgctcaaggccacccactagcgagcagcagccctggggcctgtccccaccctgcacatctgcccctcactgctgaccaccctggcttatctcagggtctgatttctccttgtgaactctaaactcttctttccagctaccaggcagatgccttgtggacagcttgcccccgtatccacaaggtacctcccagtactcctggctgccctctgctccctgctccattccttgtcttggctgtgggcatcaccacctagccaagcacttgagccctcacaaccagactaaccacaggccggtgaaagggctgaagcctccctgccttttcaccaggctgagt

SEQ ID NO: 687070 - DNA, 632 bp, Homo sapiens
ttttttttgagacggagtctcagtctgtcgcccaggctggagtgcggtggcgcgatcttggctcactgcaagctccgcttaccgagttcacgccattctcctgcctcagcctcccgaatagctggaactacaggtgcccgccaccacgcccagctaatttttatatttttagtagagatggggtttcaccacgttagccaggatggtctcaagctcctgacttcgtgagccgcccatctcggcctcccaaagtgctgggattacaggcgtgagccaccgtgcctggcctgtcatcagctgactttcaagagaaactggaaacaattctctggtaggaaaagagwcactttatgttgatctcacgcactttctctgatctctctttgtatctcttttcccactgttcctagatgctggctccacctggaccagggattcatgtggagtttccttggcccagtctgtgccattttctctgtgagtatgtgccttcgatgttcccaaactaggaagaaccaagagaagtgctgggtacaagatggtacaaggggcttgcatttccactgttgggtggtttgattttccacctgctaccaattcagtcccatgtacaagagggtaggactcctgtg

SEQ ID NO: 687071 - DNA, 665 bp, Homo sapiens
gatttacgaaaataaaaacatatcgcaatgaattaggttcacatctgaaattcacagactggctttgacactgcttgtgcattttggaaactcttctagcttctcagaatcttggtttcaaaactgaaaagattggcctgacaattttaaaactgtcttcaagctatgaaagtttatgattcaggaaacagctttcaaaaactactgagaggaccctgaaactcttctgctagatcgattccaaatatctagtgtaaaaaacatccagtgttttccaacatgactcagtgggtgagactgggttttttaagaccaagcaaaaccgataaaggaagcttagaaggtttgtcttccatgaaaaagaaaattgctattgtcttaaataaacagaaggtatgttttcctttgaattgcacttagctttttaatagctaatttcagctacagaaaaccttttttttttctattttaattaagttttcaatctggaactttcttgagaaaggcactttagcaactctgaagaacagtagagggcgccacggtcacaagcaaagcaaacaaacaaaaacgttggcatcacagactgggccgggaagtgccgaggagtacayctgagaaaataagccacagtcagggaggaacaacacattttcaaaatgcat

SEQ ID NO: 687072 - DNA, 617 bp, Homo sapiens
ttcccaggctcaagcgatcctcccacctcagcctcctgagtaatttgaactacaagcacatgtcaccacactcaactaattgtttttttttgtttgttttttgttttttggagacggagtttcactcttgtcgcccaggctggagcgcagtggtgtgatcttggctcactgcaacctccgcctcccgggttcaagcgaatctcccgcctcagcctcccgagtagctgggattacaggtgcccaccaccatgcctggctactttttgtatttttaatagagacaaggttttaccatgttgttggccaggctggtcttgaactcctgacctcaggtgatctgactgcctcagcytcccaaagtgctgggattacacgtgagccactgcacctggcctaagtttttaatttttcatagagacatggtctccctatgttgtacaggctggtctcgaactcctgtgctcaagcaatcatctcatctcggcctcccaaagtgttgggattacaggcatgagccatcatacctggcctctttttatgtatgaagcagtaaacaagcccttggagatgagaaaatgagaaagctctaggaacaaaagacaggggagaccaactta

SEQ ID NO: 687073 - DNA, 617 bp, Homo sapiens
ttcccaggctcaagcgatcctcccacctcagcctcctgagtaatttgaactacaagcacatgtcaccacactcaactaattgtttttttttgtttgttttttgttttttggagacggagtttcactcttgtcgcccaggctggagcgcagtggtgtgatcttggctcactgcaacctccgcctcccgggttcaagcgaatctcccgcctcagcctcccgagtagctgggattacaggtgcccaccaccatgcctggctactttttgtatttttaatagagacaaggttttaccatgttgttggccaggctggtcttgaactcctgacctcaggtgatctgactgcctcagcttcccaaagtgctgggattacacgtgagccactgcacctggcctaagtttttaatttttcatagagacatggtctccctatgttgtacaggctggtctsgaactcctgtgctcaagcaatcatctcatctcggcctcccaaagtgttgggattacaggcatgagccatcatacctggcctctttttatgtatgaagcagtaaacaagcccttggagatgagaaaatgagaaagctctaggaacaaaagacaggggagaccaactta

SEQ ID NO: 687074 - DNA, 557 bp, Homo sapiens
tgcccggctaattttgtatttttagtagagacggggtttcttcatgttggttaggctggtcttgaactcctgacctcaggcgatccgcctgcctcagcctcccaaaatgctgggattacaggcgtgagccaccatgcccggcctaaactggatttttaagttcctgtgttgataatatcaaaactgtattcaatgtacaataataactattttcaaagctgacttttacatatggaatccatccatttacttaagtagaaacaataaaattcggtatttcaggcttatttccttatcaatcaatgttggtaaggaaatataaaaatatcaatggttgtaaaactgctctaaaaaataacgtctctcaatsgttcagctattaagtgtttgcactgttcagttttattttaagaagtctatctaaaaggaacaggacatttgagagcttttcagtaagaacatccacttaaacaataaacctagctcaatcttctggcccaatacttaatttgcagggaatacaacttgggagaaaaaggatcagaaatatatgtcta

SEQ ID NO: 687075 - DNA, 557 bp, Homo sapiens
tgcccggctaattttgtatttttagtagagacggggtttcttcatgttggttaggctggtcttgaactcctgacctcaggcgatccgcctgcctcagcctcccaaaatgctgggattacaggcgtgagccaccatgcccggcctaaactggatttttaagttcctgtgttgataatatcaaaactgtattcaatgtacaataataactattttcaaagctgacttttacatatggaatccatccatttacttaagtagaaacaataaaattcggtatttcaggcttatttccttatcaatcaatgttggtaaggaaatataaaaatatcaatggttgtaaaactgctctaaaaaataacgtctctcaatcgttcagctattaagtgtttgcactgttcagttttattttaagaagtytatctaaaaggaacaggacatttgagagcttttcagtaagaacatccacttaaacaataaacctagctcaatcttctggcccaatacttaatttgcagggaatacaacttgggagaaaaaggatcagaaatatatgtcta

SEQ ID NO: 687076 - DNA, 557 bp, Homo sapiens
tgcccggctaattttgtatttttagtagagacggggtttcttcatgttggttaggctggtcttgaactcctgacctcaggcgatccgcctgcctcagcctcccaaaatgctgggattacaggcgtgagccaccatgcccggcctaaactggatttttaagttcctgtgttgataatatcaaaactgtattcaatgtacaataataactattttcaaagctgacttttacatatggaatccatccatttacttaagtagaaacaataaaattcggtatttcaggcttatttccttatcaatcaatgttggtaaggaaatataaaaatatcaatggttgtaaaactgctctaaaaaataacgtctctcaatcgttcagctattaagtgtttgcactgttcagttttattttaagaagtctatctaaaaggaacaggacatttgagagcttttcagtaagaayatccacttaaacaataaacctagctcaatcttctggcccaatacttaatttgcagggaatacaacttgggagaaaaaggatcagaaatatatgtcta

SEQ ID NO: 687077 - DNA, 557 bp, Homo sapiens
tgcccggctaattttgtatttttagtagagacggggtttcttcatgttggttaggctggtcttgaactcctgacctcaggcgatccgcctgcctcagcctcccaaaatgctgggattacaggcgtgagccaccatgcccggcctaaactggatttttaagttcctgtgttgataatatcaaaactgtattcaatgtacaataataactattttcaaagctgacttttacatatggaatccatccatttacttaagtagaaacaataaaattcggtatttcaggcttatttccttatcaatcaatgttggtaaggaaatataaaaatatcaatggttgtaaaactgctctaaaaaataacgtctctcaatcgttcagctattaagtgtttgcactgttcagttttattttaagaagtctatctaaaaggaacaggacatttgagagcttttcagtaagaacatccacttmaacaataaacctagctcaatcttctggcccaatacttaatttgcagggaatacaacttgggagaaaaaggatcagaaatatatgtcta

SEQ ID NO: 687078 - DNA, 661 bp, Homo sapiens
gatgttgggaaaactagatatttacacagaagaatgaaattaggcccttgtctctcaccataaacaaaaatcaactcttgaaaatggattaaatataagacccaaaactatgaaactactacaaggaaacaggaaactccttgacattagtctggccgatgagttttttgatacaaccttaaaagcacaggcaacaaaagcaaaaatggacaaacagtattacgtcaaactataaagcttccccacagcaaaggaaacattccacagggtgaagaagggacctacagaatgrgagaaaatatttgcaaactatacatctgataaggggttaatatccgaaacacagaaggactcaaacaactcaatagtaagaaaacaacctgattttctaaaaatgtgcagaagacccgaatagatttttctcaaaagaagacataaaaatggccaagtacagtcattcatcacttaacaacaggtctacattttgagaaatgtgttgttaggcaatttcatcttttttttttcccttatgatccaacagaaccaatggtgtggtgatttcatctttgtgcaaacatctagagtgtacttacacaaacctggatggtatagcccactacatacctaagctgtatggtacagcctgttattcctgggctgc

SEQ ID NO: 687079 - DNA, 594 bp, Homo sapiens
ccaccatgacctcatctgctaccttccccttgctcacttggcatcggccacattggcccctggggtactccccagacacaccaggaatgctttcgcttcagagagtttgccctggcagtttcttctgcctggaccattattcccaaagaaaattgcctactcactccttcacctccttcgtgtctcgcactaatgccaccttctcaataaggcctgcatggaccactccatttaaagttgcaaccctgtccacactcccctccagtactcccaaytctcttcccctgttcaaattttctttttcccgtatcatgaaacaccttctaacttaacactgtaattaattaatttattattatgcttactgtttattttctgactttcccttctaaaatgttagcactacaatggtagggacatttgtttatttgctgacatattcacaagcacttataacagtacctgggcctggcatggtggctcatgcctataatcccagcactttgggaggccaaggtgggaggattgcttgtgcccatgagttcgagaccagcctgggcaacatggcgaaaccccatttctacaaatactaca

SEQ ID NO: 687080 - DNA, 2121 bp, Homo sapiens
gctcttcagctggtcatgtaagaatgtatacgccatctaaagccacgcgtatgtgtgcctggcagcactttccataaagaacaaagggctgtgcacaggagtggccttgactgggacatctgtgtcaaaatgagaagcaataacaatggggctcttgaggtcagaaatgcacagggcttccctgtctaacttcagactgaaagttctcctgcctactcccacccaagagctattgcctgccccaatcccctgtctctcccagaggagctgcaggaaactctcccctgccttctcagcacctttcaatcttgggaagcgctctgtaacaggcaggggctgcccagaggctgcaagtctgtccagaccgatttgtgggagaacagctaggcctgcttctgacaccaccccacagggaagctgctggggaacagggctcttcctgaatggcaagttccaggactctaggaatatatccaccatcatcaggccctgttgcccctcactatgacagaaccatgggcaaggggttttctgctctgggtggtgtgccactacccataactgtcaaatgcccaacactccctttcaggttttccaaacatttcacgtgttactgaacagtaacaacagttcctcttgacaaaacaccaactttgtgctggacatttttatatattttctcatgaagtcctcatgataggaatgaataacccagttatcctcattttacaaataaggagactgaggcttagggaggttaactgactacttggccaccatctcagagccagtaagcagcagagctgggagctaaaacagaaccccactcataatctccacctcagcaagcctggtagtggctctgtttcacagtaatggtgggaagtataagaatcagagtgattggctggcctgcagtcacgtagcagaggtctcaaactggccatctgcagcctggatttgggccagggagatgtattttgtttggcctgcagtagttttgagtttttcttttctttttatttttttcctttaagcaaacatttataaatcagaagaattgtcacaaaaggacactgatttctggttctcctgaagaatcggacatgctggtctgcctccttaggtgaggcctgagtttggctgcctgccgtgggctaggctggtgctctcgtgatccacacgccccatcaggtgtcagtctacgcccacagccctcagtctaccagcctgctggccctgttggcattaggactccttcacagagtcagttaatggcatcagcctcacgtttcaggtagaataaatgtttcctgcatgttggtaagaaggaaaagtgctaaactaatggaagatttttttttcatcctaataaatacgggctgtagtcagaaatttgacaggtccagtgaatcattagtgtgaaccatgttcaaacttgtgaaaacggttcagcttgcttccacctttttatgaagcctcactgggggataccacacccccccaaggacccaacaagatgcacagccagaaggctctacacagctggaaggttggccacggtccatgtttgcacttaagggctgcttggtcagacacacggaacactaatgacaatcacgtggccttggctgccaagaagtggcccagagtgatgggaaacaaacctcctgagctagccgatgcaaagacattcagccaacaagtaggaaaggcaccttctgcattggttggcaaaggggaaggaatccaatatctaaacactggagtgccccagggctaagaccatggattgccgactcaacatctccacttaaatatgtactaggcagggcagaataaatgggctcctaactgaacttctaatttccmccccccaaacccagtcccctttcagccttccccaccacagaaaatactgttgcctactgaagactgggcatgacatttgatctctgttttattaaaagggaatttaatgagtgctagagatgtgtcaaaggcatagtaatgccaaacgcgagactatttgccataattagaagaactaaaagagaactgaacaaacaactttcccaccacgggattcaacattctcaaacactgtccttgcaccactgc

SEQ ID NO: 687081 - DNA, 2121 bp, Homo sapiens
gctcttcagctggtcatgtaagaatgtatacgccatctaaagccacgcgtatgtgtgcctggcagcactttccataaagaacaaagggctgtgcacaggagtggccttgactgggacatctgtgtcaaaatgagaagcaataacaatggggctcttgaggtcagaaatgcacagggcttccctgtctaacttcagactgaaagttctcctgcctactcccacccaagagctattgcctgccccaatcccctgtctctcccagaggagctgcaggaaactctcccctgccttctcagcacctttcaatcttgggaagcgctctgtaacaggcaggggctgcccagaggctgcaagtctgtccagaccgatttgtgggagaacagctaggcctgcttctgacaccaccccacagggaagctgctggggaacagggctcttcctgaatggcaagttccaggactctaggaatatatccaccatcatcaggccctgttgcccctcactatgacagaaccatgggcaaggggttttctgctctgggtggtgtgccactacccataactgtcaaatgcccaacactccctttcaggttttccaaacatttcacgtgttactgaacagtaacaacagttcctcttgacaaaacaccaactttgtgctggacatttttatatattttctcatgaagtcctcatgataggaatgaataacccagttatcctcattttacaaataaggagactgaggcttagggaggttaactgactacttggccaccatctcagagccagtaagcagcagagctgggagctaaaacagaaccccactcataatctccacctcagcaagcctggtagtggctctgtttcacagtaatggtgggaagtataagaatcagagtgattggctggcctgcagtcacgtagcagaggtctcaaactggccatctgcagcctggatttgggccagggagatgtattttgtttggcctgcagtagttttgagtttttcttttctttttatttttttcctttaagcaaacatttataaatcagaagaattgtcacaaaaggacactgatttctggttctcctgaagaatcggacatgctggtctgcctccttaggtgaggcctgagtttggctgcctgccgtgggctaggctggtgctctcgtgatccacacgccccatcaggtgtcagtctacgcccacagccctcagtctaccagcctgctggccctgttggcattaggactccttcacagagtcagttaatggcatcagcctcacgtttcaggtagaataaatgtttcctgcatgttggtaagaaggaaaagtgctaaactaatggaagatttttttttcatcctaataaatacgggctgtagtcagaaatttgacaggtccagtgaatcattagtgtgaaccatgttcaaacttgtgaaaacggttcagcttgcttccacctttttatgaagcctcactgggggataccacacccccccaaggacccaacaagatgcacagccagaaggctctacacagctggaaggttggccacggtccatgtttgcacttaagggctgcttggtcagacacacggaacactaatgacaatcacgtggccttggctgccaagaagtggcccagagtgatgggaaacaaacctcctgagctagccgatgcaaagacattcagccaacaagtaggaaaggcaccttctgcattggttggcaaaggggaaggaatccaatatctaaacactggagtgccccagggctaagaccatggattgccgactcaacatctccacttaaatatgtactaggcagggcagaataaatgggctcctaactgaacttctaatttcccmcccccaaacccagtcccctttcagccttccccaccacagaaaatactgttgcctactgaagactgggcatgacatttgatctctgttttattaaaagggaatttaatgagtgctagagatgtgtcaaaggcatagtaatgccaaacgcgagactatttgccataattagaagaactaaaagagaactgaacaaacaactttcccaccacgggattcaacattctcaaacactgtccttgcaccactgc

SEQ ID NO: 687082 - DNA, 2121 bp, Homo sapiens
gctcttcagctggtcatgtaagaatgtatacgccatctaaagccacgcgtatgtgtgcctggcagcactttccataaagaacaaagggctgtgcacaggagtggccttgactgggacatctgtgtcaaaatgagaagcaataacaatggggctcttgaggtcagaaatgcacagggcttccctgtctaacttcagactgaaagttctcctgcctactcccacccaagagctattgcctgccccaatcccctgtctctcccagaggagctgcaggaaactctcccctgccttctcagcacctttcaatcttgggaagcgctctgtaacaggcaggggctgcccagaggctgcaagtctgtccagaccgatttgtgggagaacagctaggcctgcttctgacaccaccccacagggaagctgctggggaacagggctcttcctgaatggcaagttccaggactctaggaatatatccaccatcatcaggccctgttgcccctcactatgacagaaccatgggcaaggggttttctgctctgggtggtgtgccactacccataactgtcaaatgcccaacactccctttcaggttttccaaacatttcacgtgttactgaacagtaacaacagttcctcttgacaaaacaccaactttgtgctggacatttttatatattttctcatgaagtcctcatgataggaatgaataacccagttatcctcattttacaaataaggagactgaggcttagggaggttaactgactacttggccaccatctcagagccagtaagcagcagagctgggagctaaaacagaaccccactcataatctccacctcagcaagcctggtagtggctctgtttcacagtaatggtgggaagtataagaatcagagtgattggctggcctgcagtcacgtagcagaggtctcaaactggccatctgcagcctggatttgggccagggagatgtattttgtttggcctgcagtagttttgagtttttcttttctttttatttttttcctttaagcaaacatttataaatcagaagaattgtcacaaaaggacactgatttctggttctcctgaagaatcggacatgctggtctgcctccttaggtgaggcctgagtttggctgcctgccgtgggctaggctggtgctctcgtgatccacacgccccatcaggtgtcagtctacgcccacagccctcagtctaccagcctgctggccctgttggcattaggactccttcacagagtcagttaatggcatcagcctcacgtttcaggtagaataaatgtttcctgcatgttggtaagaaggaaaagtgctaaactaatggaagatttttttttcatcctaataaatacgggctgtagtcagaaatttgacaggtccagtgaatcattagtgtgaaccatgttcaaacttgtgaaaacggttcagcttgcttccacctttttatgaagcctcactgggggataccacacccccccaaggacccaacaagatgcacagccagaaggctctacacagctggaaggttggccacggtccatgtttgcacttaagggctgcttggtcagacacacggaacactaatgacaatcacgtggccttggctgccaagaagtggcccagagtgatgggaaacaaacctcctgagctagccgatgcaaagacattcagccaacaagtaggaaaggcaccttctgcattggttggcaaaggggaaggaatccaatatctaaacactggagtgccccagggctaagaccatggattgccgactcaacatctccacttaaatatgtactaggcagggcagaataaatgggctcctaactgaacttctaatttcccccccccaaacccagtcccctttcagccttccccaccacagaaaatactgttgcctactgaagactgggcatgacatttgatctctgttttattaaaagggaatttaatgagtgctagagatgtgtcaaaggcatagtaatgccaaacgcgagactatttgccataattagaagaactaaaagagaactgaacaaacaactttcccaccamgggattcaacattctcaaacactgtccttgcaccactgc

SEQ ID NO: 687083 - DNA, 1262 bp, Homo sapiens
aggagtcacatatcctgaatctcagaaaacctgaaaataatcaaattgtcttccatagaatgcctatttatttttggagttgaaaagttgtcaccaatatctaaacaaaagccacaataaaatctacataatgaggattccagaaaggccatagtgaaattttgctgaataaaatagtagacaccatctttagtgtggatcctagtgtcagcgtagaaataagtgtactttttaattctcccatagagaggaatatatttaaatgaaactatttcttagaagagaatatataatttataataaagaaaaaacttaaaaatataaaaatgttgttagtgatatcttagggtaaccagccaaaggatgacatttctttcctggtttccaatgcatacttctcagaacagattaggctgcaaatggaaataaaagtgtatatcattccaggtcctagaaaacagacggtgagaggcaagttcgttcatttcaaaaacagaggggctgactttgaactgcttgatggtgaacaaaccaaccttccctgtgatgtctggctaaggattctttctacattgagtgccaaggacatttaatgtatgatatttgatttgctgggtgcaaagctcagatggggcttggaaaatccatctgtactctcaaagcttttcaaagggaaacaaggttactaacatttatgcaggctttaatatcgtgtatcaggcaatgggagtgaaagaactcattgagtcaatgggatggatctggctgataggctctcagaacaataaagatagtggkgaattttggccaggactccaaggtacattagaatcatactctttaagaggcagaaaataagcctcacagaaggaaagtaacacacccaagatcacacagcttgttagaaaccgagccaaaacaaagaaatgaaaatacatggttaattgacttgcaggttagcattctttctctcttctcaattctgttttgctcttttatctcccatgtgtttcatttcattgaaacatgaatgtcggtgataaagtaaagccttcatgtctgacttgggatcatcctctgtaggctgaatgacatgctagaaggggtgttaaaagatcaatgatatttgagacctagtggacattattccaaaaggtggcaatgttataatgacaaaaaaaaatacattttggggtaagaggacaaggccttgcaattctgagtaggatttttattaagaatatctccaagccttctcctct

SEQ ID NO: 687084 - DNA, 1262 bp, Homo sapiens
aggagtcacatatcctgaatctcagaaaacctgaaaataatcaaattgtcttccatagaatgcctatttatttttggagttgaaaagttgtcaccaatatctaaacaaaagccacaataaaatctacataatgaggattccagaaaggccatagtgaaattttgctgaataaaatagtagacaccatctttagtgtggatcctagtgtcagcgtagaaataagtgtactttttaattctcccatagagaggaatatatttaaatgaaactatttcttagaagagaatatataatttataataaagaaaaaacttaaaaatataaaaatgttgttagtgatatcttagggtaaccagccaaaggatgacatttctttcctggtttccaatgcatacttctcagaacagattaggctgcaaatggaaataaaagtgtatatcattccaggtcctagaaaacagacggtgagaggcaagttcgttcatttcaaaaacagaggggctgactttgaactgcttgatggtgaacaaaccaaccttccctgtgatgtctggctaaggattctttctacattgagtgccaaggacatttaatgtatgatatttgatttgctgggtgcaaagctcagatggggcttggaaaatccatctgtactctcaaagcttttcaaagggaaacaaggttactaacatttatgcaggctttaatatcgtgtatcaggcaatgggagtgaaagaactcattgagtcaatgggatggatctggctgataggctctcagaacaataaagatagtggtgaattttggccaggactccaaggtacattagaatcatactctttaagaggcagaaartaagcctcacagaaggaaagtaacacacccaagatcacacagcttgttagaaaccgagccaaaacaaagaaatgaaaatacatggttaattgacttgcaggttagcattctttctctcttctcaattctgttttgctcttttatctcccatgtgtttcatttcattgaaacatgaatgtcggtgataaagtaaagccttcatgtctgacttgggatcatcctctgtaggctgaatgacatgctagaaggggtgttaaaagatcaatgatatttgagacctagtggacattattccaaaaggtggcaatgttataatgacaaaaaaaaatacattttggggtaagaggacaaggccttgcaattctgagtaggatttttattaagaatatctccaagccttctcctct

SEQ ID NO: 687085 - DNA, 661 bp, Homo sapiens
tctaggagactgaaacaacaaccaacccaaaactttaaattgaaatggtccaaattagaggaaaagaaagagaatgttaccttatgcttcaactctcctgtgttcctttttgtggggggtggactccaggtggccccaggaaccccacctcttagtgttctcatattgtctgacactcaaaaagcagaggactcagttaagctgcccacaaatccttgacccacagaagttgatataaaaacgtcaggctgttttaagccactaaatttatgatactattgccatgtatcaatagctaactaatattctcctataattaaaaagagcagtagtaagcatttcaattagtaacggttttctggaattaaaagtaaatttaagatgacaaattattgtgatgaacaaagtcagttgggaacaagtccctcattaaacaaataaggaaactaaggcacagagaagttaggcacatgggcagttacacacaagtaattaagaactgaaatgtcactgaggcacacacatccccactgacctaccattttctacttcattgctgcytgcagaatgacaacaccctctctctctctctctacatatatataaatatatataaatatataaatatatatgaatatatataaaatatataaatatataa

SEQ ID NO: 687086 - DNA, 1683 bp, Homo sapiens
aatgcttttccttaggtcaactcagcaagtatttgtgattatgcattatgtccagtctctgtcttaagcaaaataataattttataatgaataaggccaggtgcagtggctcatgcctgtaatcccagcattttggggggctgaggtgggtggatcacttgaggccagaaatttgagagcagcctggccaacatggcaaaacattgtctctacaaaaaatacaaaaattaaccaggcatggtggcatgcatctgtaatttcagctacttgggaggctgaggcatgagaattgcttgaatccaggaggcagaggttatggtgagtcaaggttgcaccactgcactgcagactgggcaacagagcaagrctgtgtcagaaggagaaggagaggaaggggaagtgggaggggcaggagtaggggaaggaggagaattttataatgaataagacactgtccccactctgaggaatttatcagggtgtaaaatagacaaataacaatagagattgacaaagggaatcagaaacacaacttacttgttcagggaaggtagggaaggctctgagaacacaaagcatgatagaagaggatcaaaggatgagagaaattattttcaagctaataagaatgacatgcaagggctacttccttagaaactattttctgggtctttgtgtatacatgtagaccttagagataaaagattaccctagatttctgtacaacatcaaatttggataaatctaatattctcacatattcctaaaagaatttgtcattgaaataataaagaatcctgtggtaaatatttttagtgaaaattcctgagttctatatatttgagttttctaagaatattatgtgaaccaaaatgctgagaaagaaattatgttttccatcccacaagtccattgttagctctcttttcatttcctgccttatttgccaataataccacagaaaatgaggggaaaaaatggttgtcttacaacagataacacagcaagtggtttagaagtatttaccttctgtaaccatgatatataccaagtgctaaataaacacttgttgatttggcttggcctggttacaagtgtagcctcccaaagaaaatagtttagtcagaattatattaccttgagccaaaggctgctgaaagacatacaaatcaaagaccaggtgcatgggatctttcagttttaatattcaaaacagaaaacaaaaatggtatctgagagtaagaataggtagcattttagaattggtttcccaagaggagtcactagactcatacatcattttggtgactgttttaaccagaatgtctcaaataactttagctttgcaaatagattacaaagttctgtacatgtctaccttctccaggagaatcacaacccttcaagttcatctccaaacatctagctttattttgaaagcagagaatggaagaaaaatggattcagaccaggggtcacaaaaattgaggggttttggcttgaagtctgggggtaaagttggcatcctataaatatcactttgggatttatcattgtagggcctgccagccaaacttcttaggccagcatttgcatctctttgcctaagagctttgtaggtcagagtccattctgccccaagtgttaaagtgttaatgcccccagttaaagcactcaacaatg

SEQ ID NO: 687087 - DNA, 1277 bp, Homo sapiens
gatactcccactatggttgatgtcaagttatgagggtgacatcattgaatgtgagttaagaaaagatgcccacagctggctctggagagcccacccaggccagccctagtacattactgcacacacctaaatctagggctatgttcaagctccttccaggtggcagaccagtgtctgctggaacaacctgtaaagctctgtgagaatgctttattcatgattaccctgagaatattgttataaataatctatagcatggttcttatattaatttgcagtcccttcttattaggctcttattctttgtttgtgaggggagtatttctatctttaaatcctttatccrgcttaaatccttttggtctttatctattttgacatgtggaatgttcttctctcaaaacttggggtaactggttctttctcatcatttaggtctcagctcaaatgtcagctcttcatagaggactcctcagatgactgttctaaagtatttccttttcccagtcattgtctctaaaacaaagctagattcaaaatggtcttcactatctgaaattatcttacctatgtgtttgcttgtgtaataatctactctgtcctgcaccagagtgaaagctccactctagcagaaacctaccttctttgtctatagacaaatctccagggcctggaagtctacctggcactgttatgtagtaggcatataacaaatagttattgaatgacccaatcaatcattcagtccaagattataatatcaaccagatatgtgccttcatgttattttgtcatgaggaacaaaactttctctacatagtaaaataaactaatcaatcatgtggatgctataagagtttaaagtcttctatttttacttaaaaaatatttagagtagaccttggaacttccatttccaggcaaggtggagtaaaaaattacctgatttatcctccttccaaaaacaaccgaagaacagacatatgaaacaatggtttgcaagacactggatatcagtcaatgaaggacagtgatccaaaagagatgggaaacaaattgccccagctttctcaacctgcttaagagtatgcatgagtagtctatagtatcacacttaatggtaaaagaccacattttttctccctttgataagaaaagatatctactctgaccacttaaattcagcattgtactggatactgtagccatgcaataaggaaagcaaaagacaaaaacgtcatccagttgaaaaacaaacagtgaaaaatacgtttatt

SEQ ID NO: 687088 - DNA, 1487 bp, Homo sapiens
tgatatacaattaacataaatatccatcaactgatgaatgaagaaaatgtggtatatatgtacaatggaatagtrtccagccttaaaaaaaaaaagaaaatcctgtaatttgcaacaacatgaatgaacctggaggatattatgcttagtgaaatacaccaggcacaaaagacaaatgctgcgtgatctcacttataggtggtatcttaagaagtcaaattcacagaagcagagaacaatagaatgatggttgcctgggactgggggcaaaaggggggaggatgaggagatgttggttaaagtctacaagatatcagctcaacagtaggaataagcactgaacatctattgtacaacatgactactatagttaataataacatactgtatacttaaaatcactaagaaagtcaatcttaaatattctcactaccaaaaataataaggatgtgagctgatggacatgtgaagtagcttgatttaatcagtttgcaatccatacatatatccaaacattactataaatatacactattttatttgtcaattagaccttaataaagctgggggaaataatgctggaaattgaaattttaaaatttaatttcaaaataggaaatacataggaacaaatctgacaaagatataaaagatgtgtaccctaacatgtgtaaaacattgctgcacaacttaaagacctaaatgaatgggaagatatactatactgtgttcatgggtcagaagcttcaatatgattaagctgtcagttctcccatatcaaaatcctagtgtggtttctttaatagaaattgaacaatctcattttaaaagctataaggaaatgcaaaggacctaaattagctaatacaacttttaaaaagaataaggctggagagctaacactcccagatttcaagacttataataaaattccaataatcaagatacaagcaattgattttttacaaggtgcaaaggcaattagctgggcaaaggatgtctctattttaaatggtactggaacaactggatatctacatccaaaaatattaactttaatgtataccttgaacagtatagccctggatttattaattttttatatttcattgattttatttatcttatcacattggctgtgacttccaggaagtcttgggctcagagatggtgaaacatatagttctaaattaaaacctagaactctaaaacttctagaagaaaacataagagaaaacctttttgacattggggtatgcaaagatttcctactcctctaaaagtatgcagcaataaacaaattgataaacaggacttcataaaaattttaaatgtctactcatcaaaagacactgttaggaaaatgaaacgataagccacaatctgagaaaatatttacaaaccatatgccagataaagaacttgtatccaaaatatataaggagctcttgaaagtcaataataagaaaacccaataaataaaaaga

SEQ ID NO: 687089 - DNA, 427 bp, Homo sapiens
ggtgagtcgctgcctgtggcctgcagagggcgccgcgggcctgcggtgggggcaccgccccgcctctcggccctcttctgggcggagccgcccagccgtgcccccggcgccaccgccctctcgccgttctttgtgatgcgcccggtgcgtcacgcccgcgtctcgtgcttccgttttccgttccgctggcctgtctcgcttcgcggccacctcttccccaacgctacccgctccgtaccctgactcgctgctcctctgtgctggcagasagcgcgcagaacgtagctggacccaagggtttatttaccacattggctggtgtgtccatctgctgtgcaaccacatttatctccggtgagataaaccccatttatctcctagcaagtccctggcgcacagtgagctctgataaaagtacgttgaattg

SEQ ID NO: 687090 - DNA, 680 bp, Homo sapiens
acaggtgcttccagcttaaggcctatgccagtagcaggaaagacaataaatgtgctttcccgtggacatcttgttttaaaggttgtcttctgtttgctttgcttaattgttgttttaaaggttttcttctctttgctttatttgtttaattacagccttctgtccatggcctctggaagcctggctaagtgaggcagatgygaaacaaaccagggtttattttctcctagcagtttggagtagaggacagtgcctgaagcaaggatctcagactctgggtttcagtgccccatcttctctggtacctctgtgtggtctgcactaccctgcccagggcctacatttgaggccagcagaagccagctgaggcagggttggagctggctctggaccacaggacaggtgccaccaaatgcagagaaagcccccctttctcaatctttgaggggcctgtcaacctgaatgcccctaaagctcaatctgaatcctgcccagcctcctcagctactcaagaggaggcagaaacccagtccccagcagggcagagggaacatgggaggccatgcccagaacctgactgcccaagcgcccagctgtgcccataccaccctgggcactcctggacaagctcgcccacacctcccaggctcaggacaaaggagtcctggaagaatggacca

SEQ ID NO: 687091 - DNA, 680 bp, Homo sapiens
acaggtgcttccagcttaaggcctatgccagtagcaggaaagacaataaatgtgctttcccgtggacatcttgttttaaaggttgtcttctgtttgctttgcttaattgttgttttaaaggttttcttctctttgctttatttgtttaattacagccttctgtccatggcctctggaagcctggctaagtgaggcagatgtgaaacaaaccagggtttattttctcctagcagtttggagtagaggacagtgcctgaagcaaggatctcagactctgggtttcagtgccccatcttctctggtacctctgtgtggtctgcactaycctgcccagggcctacatttgaggccagcagaagccagctgaggcagggttggagctggctctggaccacaggacaggtgccaccaaatgcagagaaagcccccctttctcaatctttgaggggcctgtcaacctgaatgcccctaaagctcaatctgaatcctgcccagcctcctcagctactcaagaggaggcagaaacccagtccccagcagggcagagggaacatgggaggccatgcccagaacctgactgcccaagcgcccagctgtgcccataccaccctgggcactcctggacaagctcgcccacacctcccaggctcaggacaaaggagtcctggaagaatggacca

SEQ ID NO: 687092 - DNA, 2357 bp, Homo sapiens
tgcttcttttttaaatctttttttttctccttccctgtcttgtgttggattaatagggctttagctattctctccacatcaacgccttttcaccaatcagcttctgacttacacgttacattgtatttctttccttctttctttcttttttttttttttgagacggagtcttactctgtcgcccaggctggagtgcagtggcgctgtcgcccaggctggagtgcagtggcgcaatcttggctcactgcaaactccacctcctgggttcacaccattctcctgcctcagcctcccaagtagctgggactacaggcgcccaacaccatgcctggctaatttttttgtatttttttttttttttttagtagagacagggtttcactgtgttagccaggatggtctcaatctcctgatctcatgatccacctgccttggcctcccaaagtgctgggattacaggtgtgagccaccatgcccggcctgtatttcttatattttaatggttaccgataaattgttaaatatacatatatatacagtcttgcatcacttaacaacaggaatatgtttgagaaatgtctcatcaggcaattctgtcattgtgcaaacatcgtagagtgtacttatacaaccctagatggtatagctgattacacatctaggctatatggtatagcccattgctgctaggctacaaacctgtacagcatgttttggtaatgaatactgtagaaaattgtaagtatttgtgtatctaaacatatttaaatatagaaaaggtatggtaaaaatatggtattataatcttctgggaccaccatcatatatgtggtccatcattgaccaaaatactgtgcagtgcctgacctcacagaaatttttgctaagttctaagtttattcataatttctagaatcctcttaaacaaaacagaaatcttagtatgttttaactagtttattgagcactccctaccaccaacattctttgatgctattgtctagacttttggccccattttttaatacaaaatttatttttatgtagttaatagttaatgcacttttactgaactactttacaaatttttctctcttgctcccaattgttctctctgatttctcttttctctttcttgaactaaatgcaagggtctgggagcagtaaattttcttagtctttttgtaacttaatgtatccttattttgccctcacaattgattaatttagctgggatgaaattctaggttgacttttttcttactgctatgaagatatcaactcatctgcaatgggggtctaatctagctgaagatcattcttttgtgaatataatcattaatcctttgtgagtaagctgtcttttccttctggtagcttctaatatgcatttatttttattattcatgttctacagtttcactacagtgtaaatagatgtggttttattttcatttgttctgtttgcattttatatgaactttcaccaaaagattcacgacttcaattctggaaacttacatcattctctatttcttttccctggaactcctaatcagatgcatactggagtctctcaatccatttctattccccttaacttcccatacaaacattaatatgtttgtatgcatatatatgyataatttttctttttgtctatattttgtttatatttctgagttctattttcccattgtaatagattatccagagaaacagaaccaatatggtgtgtatatatatagagagagatttgttataaggaattgtctgacacaattatggagactttcaagtttaaatctgcagtgtgggccagcaggcttgagatgcaggacagctgatggtgcagatgaagtcctattaagtgatctgctggagaatctcctcttacttgagagaagattggcttttgttctattcagtcctactcatctgatttgaagagacctgctcatgttatggagggcaatctgctttactctgccaattgaaatgttaaattcacccaaaaatatccacacagaaacacccagaataatgtctgaccaaatatctgggcaacccatagcccagtcaaattgccacataaaattaattatcactgccacttaaatactctctttttattgtttgctctaaactctacttcagaatttattccatttattattttttaaaatagcaattttttagtacacaatttactattgttactatattctcttatataggtttaatttttgcttttttgtttcatcatttcttattttatcttttaattttttattatactttatctctttgacaatcctaaagacttcattttaaatcattttcaaattgtcctatca

SEQ ID NO: 687093 - DNA, 2357 bp, Homo sapiens
tgcttcttttttaaatctttttttttctccttccctgtcttgtgttggattaatagggctttagctattctctccacatcaacgccttttcaccaatcagcttctgacttacacgttacattgtatttctttccttctttctttcttttttttttttttgagacggagtcttactctgtcgcccaggctggagtgcagtggcgctgtcgcccaggctggagtgcagtggcgcaatcttggctcactgcaaactccacctcctgggttcacaccattctcctgcctcagcctcccaagtagctgggactacaggcgcccaacaccatgcctggctaatttttttgtatttttttttttttttttagtagagacagggtttcactgtgttagccaggatggtctcaatctcctgatctcatgatccacctgccttggcctcccaaagtgctgggattacaggtgtgagccaccatgcccggcctgtatttcttatattttaatggttaccgataaattgttaaatatacatatatatacagtcttgcatcacttaacaacaggaatatgtttgagaaatgtctcatcaggcaattctgtcattgtgcaaacatcgtagagtgtacttatacaaccctagatggtatagctgattacacatctaggctatatggtatagcccattgctgctaggctacaaacctgtacagcatgttttggtaatgaatactgtagaaaattgtaagtatttgtgtatctaaacatatttaaatatagaaaaggtatggtaaaaatatggtattataatcttctgggaccaccatcatatatgtggtccatcattgaccaaaatactgtgcagtgcctgacctcacagaaatttttgctaagttctaagtttattcataatttctagaatcctcttaaacaaaacagaaatcttagtatgttttaactagtttattgagcactccctaccaccaacattctttgatgctattgtctagacttttggccccattttttaatacaaaatttatttttatgtagttaatagttaatgcacttttactgaactactttacaaatttttctctcttgctcccaattgttctctctgatttctcttttctctttcttgaactaaatgcaagggtctgggagcagtaaattttcttagtctttttgtaacttaatgtatccttattttgccctcacaattgattaatttagctgggatgaaattctaggttgacttttttcttactgctatgaagatatcaactcatctgcaatgggggtctaatctagctgaagatcattcttttgtgaatataatcattaatcctttgtgagtaagctgtcttttccttctggtagcttctaatatgcatttatttttattattcatgttctacagtttcactacagtgtaaatagatgtggttttattttcatttgttctgtttgcattttatatgaactttcaccaaaagattcacgacttcaattctggaaacttacatcattctctatttcttttccctggaactcctaatcagatgcatactggagtctctcaatccatttctattccccttaacttcccatacaaacattaatatgtttgtatgcatatatatgtataatttttctttttgtctatattttgtttatatttctgagttctattttcccattgtaatagattatccagagaaacagaaccaatatggtgtgtatatatatagagagagatttgttataaggaattgtctgacacaattatggagactttcaagtttaaatctgcagtgtgggccagcaggcttgagatgcaggacagctgatggtgcagatgaagtcctattaagtgawctgctggagaatctcctcttacttgagagaagattggcttttgttctattcagtcctactcatctgatttgaagagacctgctcatgttatggagggcaatctgctttactctgccaattgaaatgttaaattcacccaaaaatatccacacagaaacacccagaataatgtctgaccaaatatctgggcaacccatagcccagtcaaattgccacataaaattaattatcactgccacttaaatactctctttttattgtttgctctaaactctacttcagaatttattccatttattattttttaaaatagcaattttttagtacacaatttactattgttactatattctcttatataggtttaatttttgcttttttgtttcatcatttcttattttatcttttaattttttattatactttatctctttgacaatcctaaagacttcattttaaatcattttcaaattgtcctatca

SEQ ID NO: 687094 - DNA, 1436 bp, Homo sapiens
tcaaaatttgttgaataaatgatagtgagtaaaaattacaatctgttagattgtctgaatcttagtattttttaatggatgcttactctcattctaaaacaggggctatatatatatatatatatatatayacacacacacacacatttatatataaatatatgtatatatatgtatatgtaaatatatatgtatatatatttttatatatacacacacacatatttccaggacagtttgtcaatattaatatttgcataaatctttgccatcagtgaattaagagaggagaagtgaataatgctcattaaacactgtatgtaagggcacatccaggcaaatctctggctatataattcttccatagaacaaagggtggcaaactaagcactgacaatcacatctgatctaccatcacctgtatttgtaaatgaagttttataggaatgtggccacactcatttgtttacatatttattgtttatagttgcttttgcactacgacagcaaagctgaatggctgcaacggagactgcatgaccccaaaagtttaaaatattcattaactggccctttatagaaaaaaaaatattgatccttgacacagactataactcaatattttttcctccttatttaaatgataatctaccaacacagctaaattctaaataaccaatgacatagccagtcttctttatcaaaggtttggaaacaaatctggaaggcataaaaagtatatgcaatacaaatgccatacatatcacccaggcaaataattatgagccaagaaaagaaattcttcccttgaaagcagcttatagaatacattaatataagcaattcaatgaagactcaaccaacaaacatcagttatagacaagatatgtccagggctgtgcaggaaagacaggtcttaaaaatcaaagctcaggatgggcatggtcgttcatgcctgtaatcccagcactttgcggggccaaggcaggtggatcacctgaggtcaggagttcgagaccaggctggccaacgtggtgaaaccccgtctctactaaaaatacaaaaaattagttgggcgtggtggcatacgcctgtaatcccaactacttgggaggctgaggcaggagaattgcttgaacccaggaggcggaggttgcagttagccgagatcgtgccattgaactccagcctgggagacagagcaagactccgtctcaaaaaaaaaaaaaaaaatcaaagctcaagtaattccccaagttgtatcaaagttgctgtatttccttcttgctgggcagccaatagctgtgaaacagaatcttttcatgctgagaactcaatagccattggaacaatactggattttaactacttcaaactgtcagaagatctacaaattgaaaaggaccttggagtacatcttgcttaatctccatgtg

SEQ ID NO: 687095 - DNA, 659 bp, Homo sapiens
ttccccagccccttcagaggagctatatttgtaatagagttagattcatttgttacagtctgcattccatcctggattctcctaacatcttgggtatttttttttttatttgcatacagcaaaagtcacttttgtgttrtacaattctatgggttttggaaaatgcagagtaaagcaatcccataccgcagcgctattagaccagcttctcaccttaaaaaaatctccttgtgcagtggggcagcatttttatctagacccatattcctttaaaactcaaatatacagccagacatggtagctcatgccattaatcccagcactttgggaggctgaggcaggagaactggttgaggccagaagtttgagaacagcctggacaacacggtgagagcctgtttctattttaaaaaatacaaaaattagccgggcatggctacatgcctgtagtcccagctactcaggagactgaggtgggaggatagcttgagcccacgagtttgaggttatagtgagctattattgtgccagcctgagcaacagagcaagattctgtctctaaaaaaaatttaaaaattaaaaacaaaaaaaactcaaatatataattgaccaccgtaattatttttagactaatattctttcacatttgcttttacttt

SEQ ID NO: 687096 - DNA, 631 bp, Homo sapiens
agaaccccctcccaaattcacagtttcatcccacctcaggtaggacccctgactccaaaataatacacctccactcccctttaagcccctgactctcaaggtcctgctcctaattgacctagagccttggtactcaaagggtggggctgttggacctgcagcagaagcattactcaggagcttattggaaatgcaaaattggggctctacaccagacctcctgcatcagaatctgcattttaaggaaacccccaatttawtcacgggcacattgaagtttaagaagcagtgagttagaatacataatctgattaatcaacttactctattactactagctgatattttaaaattctttctatggtccaggtggtatgctaagactttgcatatctcatcttatttaagtttcacacagctttacaaggtagagactcttttgaacccattttacagataaagaagctaaagtttggagagattaagcaacttccctaaggttacctagcaaatagcagaacagagatttaaacctaggtagtattctaactccagaaaactcatagatctcaaggctgaggttagcaatggtgttatccatcttggggtggggtgggaggggcggattgtg

SEQ ID NO: 687097 - DNA, 647 bp, Homo sapiens
cccaaaggccacatgtcctttcactcctctcttcccagacagccctgaacctggatgacttctattagccttccagatgcagctgatggcaggcaatgtttttcttagccctgtggggtgacacgatccctgggctcaccaattccctggtgccaccttctctctggcccctgatcatggtggctgcttcttcctctgcctcccttggggctcctgacccaatttcctggcacacagcagggctcatgtgagtaagtgaaggcatatggcagaataccagttatggggcaggggtagaattggtgcggtggggagkactcacctacggcacaatttgaccaaaggctgtactcgccctgaaagaatgaagaaattctccattcatgaaagtatgaagaaactgatgagcaattaaatgcctgagcccagagtaatgatgattaaggaatgctggaaaaggcatgattacaaggctctgacagcatttgaaagttctaagttccagtgagttcaggagagtgctttgggtgggcagggcctgactgttatcagaggatgctaggcccctcgttcctgacccattagatcaccaagagctgagagtaaggcaagttgtcaccatttgtgccccaccttacctcactgca

SEQ ID NO: 687098 - DNA, 593 bp, Homo sapiens
gcatgatgtttgaacaactaaacaaaataaactaccatgtaatatgcacacatacacacacagacacatatatcatgagacaaagcagcaaacttctgcctttggccagccacatagtgagagtccttgttataaggaatcyagttttggattttcaactattttcaactattttcaacaagaggttttcaactatttttcaactattttcaacttacgatggatttattggaatgtaaccccatagtaagttaagaaggatctgtatttttaaactactttctattgatatatattcagaagtgcaaaagttctatgtgtacaacttgatgacatgaacatatttgaccatcacctaggtcaagaaacagtactggcactcgttcaatagtcctttttatgtcccattttcaacacccctcccctaccacaactttctaaaggtaagcaccattctaacactatagatcaatttgcctaattttaaaatgtttatgtaaataacattatttatacatttgcacatgtgctttcttttactcaaaattttaaaatgaaatgattcactccattacatgtagcagtaatttaac

SEQ ID NO: 687099 - DNA, 593 bp, Homo sapiens
gcatgatgtttgaacaactaaacaaaataaactaccatgtaatatgcacacatacacacacagacacatatatcatgagacaaagcagcaaacttctgcctttggccagccacatagtgagagtccttgttataaggaatctagttttggattttcaactattttcaactattttcaacaagaggttttcaactatttttcaactattttcaacttacgatggatttattggaatgtaaccccakagtaagttaagaaggatctgtatttttaaactactttctattgatatatattcagaagtgcaaaagttctatgtgtacaacttgatgacatgaacatatttgaccatcacctaggtcaagaaacagtactggcactcgttcaatagtcctttttatgtcccattttcaacacccctcccctaccacaactttctaaaggtaagcaccattctaacactatagatcaatttgcctaattttaaaatgtttatgtaaataacattatttatacatttgcacatgtgctttcttttactcaaaattttaaaatgaaatgattcactccattacatgtagcagtaatttaac

SEQ ID NO: 687100 - DNA, 978 bp, Homo sapiens
attcaagtttacccggtgtgaaagaataaaggttaaaagatggcattatttgaatctatgttttcttcttttttttttttttttacttttccgttctcttgaaatattgttattaaaagccyacaatcactttcatctggtcaactaccaatacctgacaatattatttttaaagcaatatttttaaaaaaatctacaatcactttcttactgataatttctccacctttcatagtctggcatcagtctccaccatttcaagaaaattgccttcatcagtttcacccaggacctctttgatattaaatataatggatcactcacagtttcattttcctttaactatctgtgatatttcaaattgttaattcttcaattcttcttttttctttaaattctatctccttggtttctatgacagcacactctgacgtccagttctcaaagtattttgctggcttctctaatatcaggctatcactcaaataatgacgtttctgattctcctttttttggattctctctcacttttttttaaactattttaagttctggcatacatgtgctcaatgtgcacatgtgttggttgcataggtatacgtgtgtcatggtggtttgctgcacctatcagcccatcatctaggttttaagccctgcatgcatgaggtatttgtcctaatgctctcccaccccctgccctccacttcctgacaggcacccatgtgtgatattcccctccctgtatccatgatgttctcattgttcaactcctacttatgagtgagaacatgcagtgtttggttttctgttcctgtgttagtttactgaggatgatgctttcctgcttcttccatgtccctgcaaaggacatgaactcatccttttttatggctgcattgtattccatggtgtatatgtcccatattttctttatccagtattacaatgatgagcatttgggttgcttccaattcttcg

SEQ ID NO: 687101 - DNA, 978 bp, Homo sapiens
attcaagtttacccggtgtgaaagaataaaggttaaaagatggcattatttgaatctatgttttcttcttttttttttttttttacttttccgttctcttgaaatattgttattaaaagcctacaatcactttcatctggtcaactaccaatacctgacaatattatttttaaagcaatattttwaaaaaaatctacaatcactttcttactgataatttctccacctttcatagtctggcatcagtctccaccatttcaagaaaattgccttcatcagtttcacccaggacctctttgatattaaatataatggatcactcacagtttcattttcctttaactatctgtgatatttcaaattgttaattcttcaattcttcttttttctttaaattctatctccttggtttctatgacagcacactctgacgtccagttctcaaagtattttgctggcttctctaatatcaggctatcactcaaataatgacgtttctgattctcctttttttggattctctctcacttttttttaaactattttaagttctggcatacatgtgctcaatgtgcacatgtgttggttgcataggtatacgtgtgtcatggtggtttgctgcacctatcagcccatcatctaggttttaagccctgcatgcatgaggtatttgtcctaatgctctcccaccccctgccctccacttcctgacaggcacccatgtgtgatattcccctccctgtatccatgatgttctcattgttcaactcctacttatgagtgagaacatgcagtgtttggttttctgttcctgtgttagtttactgaggatgatgctttcctgcttcttccatgtccctgcaaaggacatgaactcatccttttttatggctgcattgtattccatggtgtatatgtcccatattttctttatccagtattacaatgatgagcatttgggttgcttccaattcttcg

SEQ ID NO: 687102 - DNA, 978 bp, Homo sapiens
attcaagtttacccggtgtgaaagaataaaggttaaaagatggcattatttgaatctatgttttcttcttttttttttttttttacttttccgttctcttgaaatattgttattaaaagcctacaatcactttcatctggtcaactaccaatacctgacaatattatttttaaagcaatatttttaaaaaaatctacaatcactttcttactgataatttctccacctttcatagtctggcatcagtctccaccayttcaagaaaattgccttcatcagtttcacccaggacctctttgatattaaatataatggatcactcacagtttcattttcctttaactatctgtgatatttcaaattgttaattcttcaattcttcttttttctttaaattctatctccttggtttctatgacagcacactctgacgtccagttctcaaagtattttgctggcttctctaatatcaggctatcactcaaataatgacgtttctgattctcctttttttggattctctctcacttttttttaaactattttaagttctggcatacatgtgctcaatgtgcacatgtgttggttgcataggtatacgtgtgtcatggtggtttgctgcacctatcagcccatcatctaggttttaagccctgcatgcatgaggtatttgtcctaatgctctcccaccccctgccctccacttcctgacaggcacccatgtgtgatattcccctccctgtatccatgatgttctcattgttcaactcctacttatgagtgagaacatgcagtgtttggttttctgttcctgtgttagtttactgaggatgatgctttcctgcttcttccatgtccctgcaaaggacatgaactcatccttttttatggctgcattgtattccatggtgtatatgtcccatattttctttatccagtattacaatgatgagcatttgggttgcttccaattcttcg

SEQ ID NO: 687103 - DNA, 1487 bp, Homo sapiens
ccactcttcatatgataatatttccttcttatttccaacttcccctctcactgcccattctcatggaaatctttctcctatagcctctgaccttctgcttttctccaaactgaytgctttctaggattgctacgtagttgtttttatccttttgctttcatattgagaaatactcccatcattcttccattttaaaaatactgttctagttttcttgatttatgtccttattttgatggaacatatactgcagtagcttcctgagaatggacacatgaaagactgagaccttttgtttctgagcatagttctaaacacattatttttattcagaattataaaggcattatttcattgtattctaaccactaatgtggctaaaagaaaagcagtttttgattttttatatttcattgtttaaaacctctctgtagaagtccttaggatcttttctgtattcctgatatatttaaattcaggctgatatgctttggtgtggatctttttctattgactgagctggaaactcagtgtatcttttaatatataaatttgtgttatttagttctgaaaagtacttttgaattttttcttgatatttgtctcctctccattttctctgctttcctctcccaaaacgcttttattaatcttgtgtttatatatattttcactatttttaatctctttaattatttaacttctatgaagtttcctaatctaccaacttttccataaaaaaacaacttctacaatcatatttttaattttcaagagatcttgctttctgaatcttcttttatagcatcctgcttttgtttcattgatgtaatatccatcgttatctctgaggatgctatttacagctttctcttttctggtttcttttcaaaattctccttctgttgtggtcttcatttccttcagatcccttttgttaaaaaatatcttttaatgtttatatttcttttttatttttattttattattttacttaaggttctagggtacatgtgcacaatgtgcaggtttgttacataggaatacgtgcgccatgttggtgtgctgcacccgtcaactcgtcatttacattaggtatatctcctaatgctatccctcccccgcccaccccccggcaggcccgtgtgtgtgatgttccccaccctgtgtccctgtgttctcattgttcaattctcacctatgagtgagaacatgtggtgtttggttttttgtccttgtgatactttgctcagaatgatggtttccagcttcctccatgtctctataaaggatatgaactcatccttttttatggctgcataatgttccatggtgtatatgtgccacattttcttaatccagtctatcactgatggacatttgggttggttccaagtctttgctgttgtgaatagtgctgcaataaacatacgtatgcatgtgtctttatagcagcatgatttatactcctttgggtatatgcccag

SEQ ID NO: 687104 - DNA, 1487 bp, Homo sapiens
ccactcttcatatgataatatttccttcttatttccaacttcccctctcactgcccattctcatggaaatctttctcctatagcctctgaccttctgcttttctccaaactgactgctttctaggattgctacgtagttgtttttatccttttgctttcatattgagaaatactcccatcattcttccattttaaaaatactgttctagttttcttgatttaygtccttattttgatggaacatatactgcagtagcttcctgagaatggacacatgaaagactgagaccttttgtttctgagcatagttctaaacacattatttttattcagaattataaaggcattatttcattgtattctaaccactaatgtggctaaaagaaaagcagtttttgattttttatatttcattgtttaaaacctctctgtagaagtccttaggatcttttctgtattcctgatatatttaaattcaggctgatatgctttggtgtggatctttttctattgactgagctggaaactcagtgtatcttttaatatataaatttgtgttatttagttctgaaaagtacttttgaattttttcttgatatttgtctcctctccattttctctgctttcctctcccaaaacgcttttattaatcttgtgtttatatatattttcactatttttaatctctttaattatttaacttctatgaagtttcctaatctaccaacttttccataaaaaaacaacttctacaatcatatttttaattttcaagagatcttgctttctgaatcttcttttatagcatcctgcttttgtttcattgatgtaatatccatcgttatctctgaggatgctatttacagctttctcttttctggtttcttttcaaaattctccttctgttgtggtcttcatttccttcagatcccttttgttaaaaaatatcttttaatgtttatatttcttttttatttttattttattattttacttaaggttctagggtacatgtgcacaatgtgcaggtttgttacataggaatacgtgcgccatgttggtgtgctgcacccgtcaactcgtcatttacattaggtatatctcctaatgctatccctcccccgcccaccccccggcaggcccgtgtgtgtgatgttccccaccctgtgtccctgtgttctcattgttcaattctcacctatgagtgagaacatgtggtgtttggttttttgtccttgtgatactttgctcagaatgatggtttccagcttcctccatgtctctataaaggatatgaactcatccttttttatggctgcataatgttccatggtgtatatgtgccacattttcttaatccagtctatcactgatggacatttgggttggttccaagtctttgctgttgtgaatagtgctgcaataaacatacgtatgcatgtgtctttatagcagcatgatttatactcctttgggtatatgcccag

SEQ ID NO: 687105 - DNA, 1487 bp, Homo sapiens
ccactcttcatatgataatatttccttcttatttccaacttcccctctcactgcccattctcatggaaatctttctcctatagcctctgaccttctgcttttctccaaactgactgctttctaggattgctacgtagttgtttttatccttttgctttcatattgagaaatactcccatcattcttccattttaaaaatactgttctagttttcttgatttatgtccttattttgatggaacatatactgcagtagcttcctgagaatggacacatgaaagactgagaccttttgtttctgagcatagttctaaacacattatttttattcagaattataaaggcattatttcattgtattctaaccrctaatgtggctaaaagaaaagcagtttttgattttttatatttcattgtttaaaacctctctgtagaagtccttaggatcttttctgtattcctgatatatttaaattcaggctgatatgctttggtgtggatctttttctattgactgagctggaaactcagtgtatcttttaatatataaatttgtgttatttagttctgaaaagtacttttgaattttttcttgatatttgtctcctctccattttctctgctttcctctcccaaaacgcttttattaatcttgtgtttatatatattttcactatttttaatctctttaattatttaacttctatgaagtttcctaatctaccaacttttccataaaaaaacaacttctacaatcatatttttaattttcaagagatcttgctttctgaatcttcttttatagcatcctgcttttgtttcattgatgtaatatccatcgttatctctgaggatgctatttacagctttctcttttctggtttcttttcaaaattctccttctgttgtggtcttcatttccttcagatcccttttgttaaaaaatatcttttaatgtttatatttcttttttatttttattttattattttacttaaggttctagggtacatgtgcacaatgtgcaggtttgttacataggaatacgtgcgccatgttggtgtgctgcacccgtcaactcgtcatttacattaggtatatctcctaatgctatccctcccccgcccaccccccggcaggcccgtgtgtgtgatgttccccaccctgtgtccctgtgttctcattgttcaattctcacctatgagtgagaacatgtggtgtttggttttttgtccttgtgatactttgctcagaatgatggtttccagcttcctccatgtctctataaaggatatgaactcatccttttttatggctgcataatgttccatggtgtatatgtgccacattttcttaatccagtctatcactgatggacatttgggttggttccaagtctttgctgttgtgaatagtgctgcaataaacatacgtatgcatgtgtctttatagcagcatgatttatactcctttgggtatatgcccag

SEQ ID NO: 687106 - DNA, 1487 bp, Homo sapiens
ccactcttcatatgataatatttccttcttatttccaacttcccctctcactgcccattctcatggaaatctttctcctatagcctctgaccttctgcttttctccaaactgactgctttctaggattgctacgtagttgtttttatccttttgctttcatattgagaaatactcccatcattcttccattttaaaaatactgttctagttttcttgatttatgtccttattttgatggaacatatactgcagtagcttcctgagaatggacacatgaaagactgagaccttttgtttctgagcatagttctaaacacattatttttattcagaattataaaggcattatttcattgtattctaaccactaatgtggctaaaagaaaagcagtttttgattttttatatttcattgtttaaaacctctctgtagaagtccttaggatcttttctgtattcctgatatatttaaattcaggctgatatgctttggtgtggatctttttctattgactgagctggaaactcagtgtatcttttaatatataaatttgtgttatttagttctgaaaagtacttttgaattttttcttgatatttgtctcctctccattttctctgctttcctctcccaaaacgcttttattaatcttgtgtttatatatattttcactatttttaatctctttaattatttaacttctatgaagtttcctaatctaccaacttttccataaaaaaacaacttctacaatcatatttttaattttcaagagatcttgctttctgaatcttcttttatagcatcctgcttttgtttcattgatgtaatatccatcsttatctctgaggatgctatttacagctttctcttttctggtttcttttcaaaattctccttctgttgtggtcttcatttccttcagatcccttttgttaaaaaatatcttttaatgtttatatttcttttttatttttattttattattttacttaaggttctagggtacatgtgcacaatgtgcaggtttgttacataggaatacgtgcgccatgttggtgtgctgcacccgtcaactcgtcatttacattaggtatatctcctaatgctatccctcccccgcccaccccccggcaggcccgtgtgtgtgatgttccccaccctgtgtccctgtgttctcattgttcaattctcacctatgagtgagaacatgtggtgtttggttttttgtccttgtgatactttgctcagaatgatggtttccagcttcctccatgtctctataaaggatatgaactcatccttttttatggctgcataatgttccatggtgtatatgtgccacattttcttaatccagtctatcactgatggacatttgggttggttccaagtctttgctgttgtgaatagtgctgcaataaacatacgtatgcatgtgtctttatagcagcatgatttatactcctttgggtatatgcccag

SEQ ID NO: 687107 - DNA, 1487 bp, Homo sapiens
ccactcttcatatgataatatttccttcttatttccaacttcccctctcactgcccattctcatggaaatctttctcctatagcctctgaccttctgcttttctccaaactgactgctttctaggattgctacgtagttgtttttatccttttgctttcatattgagaaatactcccatcattcttccattttaaaaatactgttctagttttcttgatttatgtccttattttgatggaacatatactgcagtagcttcctgagaatggacacatgaaagactgagaccttttgtttctgagcatagttctaaacacattatttttattcagaattataaaggcattatttcattgtattctaaccactaatgtggctaaaagaaaagcagtttttgattttttatatttcattgtttaaaacctctctgtagaagtccttaggatcttttctgtattcctgatatatttaaattcaggctgatatgctttggtgtggatctttttctattgactgagctggaaactcagtgtatcttttaatatataaatttgtgttatttagttctgaaaagtacttttgaattttttcttgatatttgtctcctctccattttctctgctttcctctcccaaaacgcttttattaatcttgtgtttatatatattttcactatttttaatctctttaattatttaacttctatgaagtttcctaatctaccaacttttccataaaaaaacaacttctacaatcatatttttaattttcaagagatcttgctttctgaatcttcttttatagcatcctgcttttgtttcattgatgtaatatccatcgttatctctgaggatgctatttacagctttctcttttctggtttcttttcaaaattctccttctgttgtggtcttcatttccttcagatcccttttgttaaaaaatatcttttaatgtttatatttcttttttatttttattttattattttacttaaggttctagggtacatgtgcacaatgtgcaggtttgttacataggaatacgtgcgccatgttgktgtgctgcacccgtcaactcgtcatttacattaggtatatctcctaatgctatccctcccccgcccaccccccggcaggcccgtgtgtgtgatgttccccaccctgtgtccctgtgttctcattgttcaattctcacctatgagtgagaacatgtggtgtttggttttttgtccttgtgatactttgctcagaatgatggtttccagcttcctccatgtctctataaaggatatgaactcatccttttttatggctgcataatgttccatggtgtatatgtgccacattttcttaatccagtctatcactgatggacatttgggttggttccaagtctttgctgttgtgaatagtgctgcaataaacatacgtatgcatgtgtctttatagcagcatgatttatactcctttgggtatatgcccag

SEQ ID NO: 687108 - DNA, 1487 bp, Homo sapiens
ccactcttcatatgataatatttccttcttatttccaacttcccctctcactgcccattctcatggaaatctttctcctatagcctctgaccttctgcttttctccaaactgactgctttctaggattgctacgtagttgtttttatccttttgctttcatattgagaaatactcccatcattcttccattttaaaaatactgttctagttttcttgatttatgtccttattttgatggaacatatactgcagtagcttcctgagaatggacacatgaaagactgagaccttttgtttctgagcatagttctaaacacattatttttattcagaattataaaggcattatttcattgtattctaaccactaatgtggctaaaagaaaagcagtttttgattttttatatttcattgtttaaaacctctctgtagaagtccttaggatcttttctgtattcctgatatatttaaattcaggctgatatgctttggtgtggatctttttctattgactgagctggaaactcagtgtatcttttaatatataaatttgtgttatttagttctgaaaagtacttttgaattttttcttgatatttgtctcctctccattttctctgctttcctctcccaaaacgcttttattaatcttgtgtttatatatattttcactatttttaatctctttaattatttaacttctatgaagtttcctaatctaccaacttttccataaaaaaacaacttctacaatcatatttttaattttcaagagatcttgctttctgaatcttcttttatagcatcctgcttttgtttcattgatgtaatatccatcgttatctctgaggatgctatttacagctttctcttttctggtttcttttcaaaattctccttctgttgtggtcttcatttccttcagatcccttttgttaaaaaatatcttttaatgtttatatttcttttttatttttattttattattttacttaaggttctagggtacatgtgcacaatgtgcaggtttgttacataggaatacgtgcgccatgttggtgtgctgcaccygtcaactcgtcatttacattaggtatatctcctaatgctatccctcccccgcccaccccccggcaggcccgtgtgtgtgatgttccccaccctgtgtccctgtgttctcattgttcaattctcacctatgagtgagaacatgtggtgtttggttttttgtccttgtgatactttgctcagaatgatggtttccagcttcctccatgtctctataaaggatatgaactcatccttttttatggctgcataatgttccatggtgtatatgtgccacattttcttaatccagtctatcactgatggacatttgggttggttccaagtctttgctgttgtgaatagtgctgcaataaacatacgtatgcatgtgtctttatagcagcatgatttatactcctttgggtatatgcccag

SEQ ID NO: 687109 - DNA, 1265 bp, Homo sapiens
gacaggacaactggaataaaataagtatcagtttcattaaaaagggctaacttgaagataaatcttttgaagataaattttaactccagctctttagaggatctaaagtgaccttaatggacagtggaagaatcacaacatagaattcctcgaataaaaatttattgactttaaataaaaataaataaataaataaataaaatagaaataaaataggaaatttcayacagaatcttgaaagcagttcatgcaatttatatgccctaaagtttaagattaactagcttcatgataaatgtatttctgattctagtgtcaattgtttggggaggacgatgaattagatgcttattttcagcttgccctcattattcagaagtctgatttgaatcactttgtaagtgtgctcactcaaaaatatcatgttttgaaaccgttcattttttgtattttttttggttattggatattaacatataactagaatataattttaatggccttaggcctttacataacacctaaaataaatttagcctcatttcctctatcatatatgcaaactactttcagcatggtaaaacttattgtctcacagaatacaagtaagtatcaagcccatacaattacacaaatatacataatatacgagtgtataaatgccaaagagaaaaaaaaatatgaaaatgaggaaaaggaaaaacttgcagagaaggtataattttaaagggatccaatacatctaaaaaatgtggtatttaacaatcagtcaattggtttctagacataagcaattccatgagaaacaatagtaagtgtaaaggccctaaggcaggagctatttgatgtattccagagacaatgaggaagtcaatgtagatgaagagcagtagcaaaggtgtctcaaatgagagaaggcaagatcagagttgtaagaacaggggcggaagggcaaatatgtggcatcatctatgtagcataagtgtaggctattctatggattttggctttgagacatactgttaactatttaagggtttgttcatagattaaacatttaatttgagatatttgtcatgaataattccaagattttttgaagaaatgtgtccaaagtcatgcaaaggaagacggaatatgtgtgtatagatgagaaaatgaatttaaaaaattagaaaagaaaattaagtgacatatttggaatgattagtaaaatgactagcacagaaagaagcaaaactactatacttgtggcataaataaaa

SEQ ID NO: 687110 - DNA, 1265 bp, Homo sapiens
gacaggacaactggaataaaataagtatcagtttcattaaaaagggctaacttgaagataaatcttttgaagataaattttaactccagctctttagaggatctaaagtgaccttaatggacagtggaagaatcacaacatagaattcctcgaataaaaatttattgactttaaataaaaataaataaataaataaataaaatagaaataaaataggaaatttcatacagaatcttgaaagcagttcatgcaatttatatgccctaaagtttaagattaactagcttcatgataaatgtatttctgattctagtgtcaattgtttggggaggacgatgaattagatgcttattttcagcttgccctcattattcagaagtctgatttgaatcactttgtaagtgtgctcactcaaaaatatcatgttttgaaaccgttcattttttgtattttttttggttattggatattaacatataactagaatataattttaatggccttaggcctttacataacacctaaaataaatttagcctcatttcctctatcatatatgcaaactactttcagcatggtaaaacttattgtctcacagaatrcaagtaagtatcaagcccatacaattacacaaatatacataatatacgagtgtataaatgccaaagagaaaaaaaaatatgaaaatgaggaaaaggaaaaacttgcagagaaggtataattttaaagggatccaatacatctaaaaaatgtggtatttaacaatcagtcaattggtttctagacataagcaattccatgagaaacaatagtaagtgtaaaggccctaaggcaggagctatttgatgtattccagagacaatgaggaagtcaatgtagatgaagagcagtagcaaaggtgtctcaaatgagagaaggcaagatcagagttgtaagaacaggggcggaagggcaaatatgtggcatcatctatgtagcataagtgtaggctattctatggattttggctttgagacatactgttaactatttaagggtttgttcatagattaaacatttaatttgagatatttgtcatgaataattccaagattttttgaagaaatgtgtccaaagtcatgcaaaggaagacggaatatgtgtgtatagatgagaaaatgaatttaaaaaattagaaaagaaaattaagtgacatatttggaatgattagtaaaatgactagcacagaaagaagcaaaactactatacttgtggcataaataaaa

SEQ ID NO: 687111 - DNA, 1265 bp, Homo sapiens
gacaggacaactggaataaaataagtatcagtttcattaaaaagggctaacttgaagataaatcttttgaagataaattttaactccagctctttagaggatctaaagtgaccttaatggacagtggaagaatcacaacatagaattcctcgaataaaaatttattgactttaaataaaaataaataaataaataaataaaatagaaataaaataggaaatttcatacagaatcttgaaagcagttcatgcaatttatatgccctaaagtttaagattaactagcttcatgataaatgtatttctgattctagtgtcaattgtttggggaggacgatgaattagatgcttattttcagcttgccctcattattcagaagtctgatttgaatcactttgtaagtgtgctcactcaaaaatatcatgttttgaaaccgttcattttttgtattttttttggttattggatattaacatataactagaatataattttaatggccttaggcctttacataacacctaaaataaatttagcctcatttcctctatcatatatgcaaactactttcagcatggtaaaacttattgtctcacagaatacaagtaagtatcaagcccatacaattacacaaatatacataatatacgagtgtataaatgccaaagagaaaaaaaaatatgaaaatgaggaaaaggaaaaacttgcagagaaggtataattttaaagggatccaatacatctaaaaaatgtggtatttaacaatcagtcaattggtttctagacataagcaattccatgagaaacaatagtaagtgtaaaggccctaaggcaggagctatttgatgtattccagagacaatgaggaagtcaatgtagatgaagagcagtagcaaaggtgtctcaaatgagagaaggcaagatcagagttgtaagaacaggggcggaagggcaaatatgtggcatcatctatgtagcataagtgtaggctattctatggattttggctttgagacatactgttaactatttaagggtttgttcatagattaaacatttaatttgagatatttgtcatgaataattccaagattttttgaagaaatgtgtccaaagtcatgcaaaggaagacrgaatatgtgtgtatagatgagaaaatgaatttaaaaaattagaaaagaaaattaagtgacatatttggaatgattagtaaaatgactagcacagaaagaagcaaaactactatacttgtggcataaataaaa

SEQ ID NO: 687112 - DNA, 642 bp, Homo sapiens
atcctacatttgtctagcaatttaaacccccttaaatacctgttttgactcaattgaatggttattttgaagggttccacctgccacccatgaattaaaagaacaaattatattcataaagaatcagcaaatttccaaatctaaacaaagagctaatgcaataagggagagaaagaaagaaagagaaaaagcagaaatggaggagaagatatagaaaaaagaaaactgtaaattatgtaattaatacaaattagattagggtttttgtttgtaatctcttcctaatttaaatgcttgttttggaggaaattgtttacttcccctcttttttcaccctcttttttccagttatgtagccatcttatgtaattcatttatttaggattaagctttcaaactaagatgcrctattttgaggcattttttttcaaagagctactctaaaatcctatcatttaaagacaactattgttaccaagcatatactttctcttcctgttttatccccagttctacagaaaaaaatagtctaatatcaaaatgaatttgtacttaggattccaaacacttaaaaaatgtttagcagacacaatagttgagaaaaaaatagtattgttactaaccatatatgttttaccaaga

SEQ ID NO: 687113 - DNA, 629 bp, Homo sapiens
ctaattcttaaacattttccaatctaggtctagattcctttcaaagttgacaagtgactggcattagagaaatcttaaacctttttcagagtagaaaatgaagcaatatatttgagaagccaaatcagagatatgcagcatataaaaaaggaagggggaaggatgctgaaaacgtatagaaaagtattgccaaaattaaattttaaaaagctgctccttgagcaactagcaaaaggaaatataatagcagatggcactaaacaggcagtaactttcagttttctttttccttctgtcattatctgaactgtcaactcatataagaaaacccaaggaagatatataaggaataagaaggcacaatttctaaggagaataaagaatatgtgagcaatggataacttgaactatttgaatatgtttaaaytcacagctccagtgatatcaagaatagaatatatatagttaccaaaagttattataaagttattagcaatcatttcttataaatcgagaaaatgtagagaaagacactaaagctgaaaatgctacagtagtgtttttctatgagacaaaatcttgtctttttcataattttaattcatttttaccagatattcctgaatttc

SEQ ID NO: 687114 - DNA, 1876 bp, Homo sapiens
tagctgggactacatgcgcatgccaccacactcagctaattttttgtatttttggtagagatggggtttcaccatgttggccagaatagtctctatctcttcacctaatggwccaccaaagtgctgggattacaggcctgagccacagtgcacagccaagatacactttctttttaagaaaaaataatctttacttgtgtgggggtacaatagtaataaggataatttatatatacatctgttaccaacatccacatggccatagcagcttcaaaaatcattattgaggccagaaggttggtctttggtgtgacacctatagagcatagacagagacacacaacgaattggacttacaggagctgtgcctggctgcttctccagagtgtcaagagaagaagggaggtagaggcaaggtatacgactatataccagatgagacctctccatgtggagtgcccaggagcacgaaacggtaggggttacactgagcacttggctgaaaagcgaagtgttctcctatctaccacaaaaaggagtttctatgcacaggcagtaataaatcaccacattttaacagcagttgaataatgagtttgtgcaagacaactttggtagcatgggaggaaacaattgcttcaaccaaaggaaaacacttagaaaagagaaatcaacttagaatgctacttagaatgcaatttagaatgctatccaaatgctaacatttgggtaacagttgtatcaatgcagaatgtccttccttcaaagaaaaggtggatgcatggtaatgctattggtcaggatctttagtagagtttagtcaaacttggaagtgaagcaaccatgaagaatgggtagggaatgaggcagcaaaagcaatgctatatatgtgtaataaattttagattcaaagtgatctttgaatttcctttaatcctcatgattattacattttacacttgcaggagaaagtgaaattcagaaaatttcagtgattcaaaccaaatttaataagtagaagaatgagagtgtaaaactgaagttgtggtttagcatcttttcactgcaatacgtgaagaacaaaagcaaacaatcaatctggcaaacagaaacccatgaacaaacagagagtatctacaaaaaccttcaatattcaaagtggcaagccatttttatgattttatgttacttagcagtaacctaaaaaagattttccatggctatgattgattttgtattggtatttgacaaaatatgaggctagactagccacttgttttcatagataaagtttaatagggatccactggataagtctatttgtttacctgttttatatggttgctctgagctccaacaacagttgaattgtagcagaaatttatggccatcaaagcctaaaataattactatctggatcattaggaaaactactgcttatccctgattttgatagtggaatatatgatctaagcctttgcacttaacataaccagttcccaaatgtactgaaatataatctgatatcattgattgtgcactataccagtagaattttaaaaaggtcataaaataaatgaaaagttttatttatttagagatagacaaaacaatttcatgtttgcatttactactgtcattatgtgatttatccttcttaactcctccattccaagggtttgctttttaattttgatgaggggcaacttataaatttttcttatatcagtcctgctttgggatttgtacctaaaatctttgccttacctgaagtaacaaacattttctactatgtttttttcttagaagttttattgtttaaatttagtcctacattgcacactgtgttactgtatatgtattatacacacacaca

SEQ ID NO: 687115 - DNA, 1876 bp, Homo sapiens
tagctgggactacatgcgcatgccaccacactcagctaattttttgtatttttggtagagatggggtttcaccatgttggccagaatagtctctatctcttcacctaatggtccaccaaagtgctgggattacaggcctgagccacagtgcacagccaagatacactttctttttaagaaaaaataatctttacttgtgtgggggtacaatagtaatraggataatttatatatacatctgttaccaacatccacatggccatagcagcttcaaaaatcattattgaggccagaaggttggtctttggtgtgacacctatagagcatagacagagacacacaacgaattggacttacaggagctgtgcctggctgcttctccagagtgtcaagagaagaagggaggtagaggcaaggtatacgactatataccagatgagacctctccatgtggagtgcccaggagcacgaaacggtaggggttacactgagcacttggctgaaaagcgaagtgttctcctatctaccacaaaaaggagtttctatgcacaggcagtaataaatcaccacattttaacagcagttgaataatgagtttgtgcaagacaactttggtagcatgggaggaaacaattgcttcaaccaaaggaaaacacttagaaaagagaaatcaacttagaatgctacttagaatgcaatttagaatgctatccaaatgctaacatttgggtaacagttgtatcaatgcagaatgtccttccttcaaagaaaaggtggatgcatggtaatgctattggtcaggatctttagtagagtttagtcaaacttggaagtgaagcaaccatgaagaatgggtagggaatgaggcagcaaaagcaatgctatatatgtgtaataaattttagattcaaagtgatctttgaatttcctttaatcctcatgattattacattttacacttgcaggagaaagtgaaattcagaaaatttcagtgattcaaaccaaatttaataagtagaagaatgagagtgtaaaactgaagttgtggtttagcatcttttcactgcaatacgtgaagaacaaaagcaaacaatcaatctggcaaacagaaacccatgaacaaacagagagtatctacaaaaaccttcaatattcaaagtggcaagccatttttatgattttatgttacttagcagtaacctaaaaaagattttccatggctatgattgattttgtattggtatttgacaaaatatgaggctagactagccacttgttttcatagataaagtttaatagggatccactggataagtctatttgtttacctgttttatatggttgctctgagctccaacaacagttgaattgtagcagaaatttatggccatcaaagcctaaaataattactatctggatcattaggaaaactactgcttatccctgattttgatagtggaatatatgatctaagcctttgcacttaacataaccagttcccaaatgtactgaaatataatctgatatcattgattgtgcactataccagtagaattttaaaaaggtcataaaataaatgaaaagttttatttatttagagatagacaaaacaatttcatgtttgcatttactactgtcattatgtgatttatccttcttaactcctccattccaagggtttgctttttaattttgatgaggggcaacttataaatttttcttatatcagtcctgctttgggatttgtacctaaaatctttgccttacctgaagtaacaaacattttctactatgtttttttcttagaagttttattgtttaaatttagtcctacattgcacactgtgttactgtatatgtattatacacacacaca

SEQ ID NO: 687116 - DNA, 1876 bp, Homo sapiens
tagctgggactacatgcgcatgccaccacactcagctaattttttgtatttttggtagagatggggtttcaccatgttggccagaatagtctctatctcttcacctaatggtccaccaaagtgctgggattacaggcctgagccacagtgcacagccaagatacactttctttttaagaaaaaataatctttacttgtgtgggggtacaatagtaataaggataatttatatatacatctgttaccaacatccacatggccatagcagcttcaaaaatcattattgaggccagaaggttggtctttggtgtgacacctatagagcrtagacagagacacacaacgaattggacttacaggagctgtgcctggctgcttctccagagtgtcaagagaagaagggaggtagaggcaaggtatacgactatataccagatgagacctctccatgtggagtgcccaggagcacgaaacggtaggggttacactgagcacttggctgaaaagcgaagtgttctcctatctaccacaaaaaggagtttctatgcacaggcagtaataaatcaccacattttaacagcagttgaataatgagtttgtgcaagacaactttggtagcatgggaggaaacaattgcttcaaccaaaggaaaacacttagaaaagagaaatcaacttagaatgctacttagaatgcaatttagaatgctatccaaatgctaacatttgggtaacagttgtatcaatgcagaatgtccttccttcaaagaaaaggtggatgcatggtaatgctattggtcaggatctttagtagagtttagtcaaacttggaagtgaagcaaccatgaagaatgggtagggaatgaggcagcaaaagcaatgctatatatgtgtaataaattttagattcaaagtgatctttgaatttcctttaatcctcatgattattacattttacacttgcaggagaaagtgaaattcagaaaatttcagtgattcaaaccaaatttaataagtagaagaatgagagtgtaaaactgaagttgtggtttagcatcttttcactgcaatacgtgaagaacaaaagcaaacaatcaatctggcaaacagaaacccatgaacaaacagagagtatctacaaaaaccttcaatattcaaagtggcaagccatttttatgattttatgttacttagcagtaacctaaaaaagattttccatggctatgattgattttgtattggtatttgacaaaatatgaggctagactagccacttgttttcatagataaagtttaatagggatccactggataagtctatttgtttacctgttttatatggttgctctgagctccaacaacagttgaattgtagcagaaatttatggccatcaaagcctaaaataattactatctggatcattaggaaaactactgcttatccctgattttgatagtggaatatatgatctaagcctttgcacttaacataaccagttcccaaatgtactgaaatataatctgatatcattgattgtgcactataccagtagaattttaaaaaggtcataaaataaatgaaaagttttatttatttagagatagacaaaacaatttcatgtttgcatttactactgtcattatgtgatttatccttcttaactcctccattccaagggtttgctttttaattttgatgaggggcaacttataaatttttcttatatcagtcctgctttgggatttgtacctaaaatctttgccttacctgaagtaacaaacattttctactatgtttttttcttagaagttttattgtttaaatttagtcctacattgcacactgtgttactgtatatgtattatacacacacaca

SEQ ID NO: 687117 - DNA, 969 bp, Homo sapiens
ccagacctcgtgatccacccgcctcggcctcccaaagtgctgggattacaggagtaagccaccgtgttcagcctcatttccttttaacaatgagcatgaattacttggtcaaggggaatgcctactttcctttacctgtttgccagcactatctgtctttgctacttatggggaaaataattgaaaatgggatcattaattattctttaggtttatagctaatgagggcttagttggatctagtactatgacaaagaatatactatgtacagtaattattattggcttgaaagggaatctggcagcgagagaattgttgctctcatgccatcttctagcaggatatgtctttctatttgtcaaaagttttaagaagaactggagactaaataaagttcacatagtgttcaagcaatggcagcgctattggctaatgaattcacctagccaccctttttccctctacttctatcctgaatcccatgaagacaggtatttttgcctattacgataacaattccatctatatggattgggttcttgacctctcagctcacacagctaacttaaaggtgtcaattactgctggcagggactagaactctttaatattgatygacctgtgaagtgctaaggcaggccagctcaaaatccaaaccaagatgctcgtttatttgcaaggtaggatcatgtgcttcagaaaaccaactacaataatggctcagtttattgcaggtgaataaaataatgggtatagtttatttaactacatctagaaatttgcatttttataataagcaaatgttcattttggtggataatttcttaattcacattgctttgatagatcctcctaaaacgtaagtcaggtgtcatggctctgcttaaaaccctattaacgcacacaaaaacttgtacataaatgtttatagcagcattacttataatagccaaaggatggaaacatcc

SEQ ID NO: 687118 - DNA, 666 bp, Homo sapiens
aagaaaagcaacagggctaaaaggaggaaggactggtggtgatacaaaaatctaggttgatgtggaagacatgaatagaaatgttaataaataaaggctaaatcagaatcctaaagatactgtatagaggaggctatagtctctctgagtttttcatgcattccaacattaagatatggggccatgtgagtagaagtttgcctgaattcaacaaagctatggtagatgaatggctatggggcaacagaaatcagtcaagagccacgcacatttgccttccgtcctgccctcaatctgtgatgaaggcaaatgggaaaaccaggcggatgctttttcagttggtgttagtggttgataagctgagtacattatcccacaaygtagagtgtcctgactcatgtttaagagcaacattttcaaatcaactttattgaggtctaatctgcactaagtaaaatatatccacagttcaatgtgttttgacataaactcccatgtacctaccactccaagttatatataaagcatgtccatcaccccaaaaggttcccacatgccccagtgtagtcaattctctccccatcccaaagaaacactgattctaatttctactgccacagattagttttgcctttgttgaatcctaaaatgtgtatttttttccct

SEQ ID NO: 687119 - DNA, 666 bp, Homo sapiens
aagaaaagcaacagggctaaaaggaggaaggactggtggtgatacaaaaatctaggttgatgtggaagacatgaatagaaatgttaataaataaaggctaaatcagaatcctaaagatactgtatagaggaggctatagtctctctgagtttttcatgcattccaacattaagatatggggccatgtgagtagaagtttgcctgaattcaacaaagctatggtagatgaatggctatggggcaacagaaatcagtcaagagccacgcacatttgccttccgtcctgccctcaatctgtgatgaaggcaaatgggaaaaccaggcggatgctttttcagttggtgttagtggttgataagctgagtacattatcccacaatgtagagtgtcctgactcatgtttaagagcaacattttcaaatcaactttattgaggtctaatctgcactaagtaaaatatatccacagttcaatgtgttttgacataaactcccatgtacctaccactccaagttatatataaagcatgtccatcaccccaaaaggttcccacatgccccagtgtagtcaattctctccccatcccaaagaaacrctgattctaatttctactgccacagattagttttgcctttgttgaatcctaaaatgtgtatttttttccct

SEQ ID NO: 687120 - DNA, 644 bp, Homo sapiens
ctttattttcatcatcatagctttttttttttttcctgaggcaggatctcagttctgtcacccaggctggagtgcagtagcatgatcacagctcactgcagcctccacctcccaggctcaagcgatcctcccacctcggtctctcgagtagctgaaacctctgagtagctggtgccttcctcatcaggatgtaaatctgtcagtgccttcctcgccagcaaaattagtgcaccacyatgtccgactaatttttttattttttgtagagatgaggtcttatgttgcccaagctggtcttgaactcctaagctcaagcaatcctcccaccctggcctcccaaagtactaggagtacaggtgtgagccactgcagccagccactgtagctttcatgccagccctcatcacctctcccttctattactgcactagacaatttggtcttctttctttctccatggagctgtggtaatctttcctaaacacaaatctgatgatttcccactacccagagcaggctttcagactgtgcttattaaactctaggaagctcctgcccatctccgcatcttccactggaagtgaaccccattttctttgttacacatttgtcttctgaatgagactttttcaataaaaggtttc

SEQ ID NO: 687121 - DNA, 644 bp, Homo sapiens
ctttattttcatcatcatagctttttttttttttcctgaggcaggatctcagttctgtcacccaggctggagtgcagtagcatgatcacagctcactgcagcctccacctcccaggctcaagcgatcctcccacctcggtctctcgagtagctgaaacctctgagtagctggtgccttcctcatcaggatgtaaatctgtcagtgccttcctcgccagcaaaattagtgcaccactatgtccgactaatttttttattttttgtagagatgaggtcttatgttgcccaagctggtcttgaactcctaagctcaagcaatcctcccaccctggcctcccaaagtactaggagtacaggtgtgagccactgcagccagccaytgtagctttcatgccagccctcatcacctctcccttctattactgcactagacaatttggtcttctttctttctccatggagctgtggtaatctttcctaaacacaaatctgatgatttcccactacccagagcaggctttcagactgtgcttattaaactctaggaagctcctgcccatctccgcatcttccactggaagtgaaccccattttctttgttacacatttgtcttctgaatgagactttttcaataaaaggtttc

SEQ ID NO: 687122 - DNA, 644 bp, Homo sapiens
ctttattttcatcatcatagctttttttttttttcctgaggcaggatctcagttctgtcacccaggctggagtgcagtagcatgatcacagctcactgcagcctccacctcccaggctcaagcgatcctcccacctcggtctctcgagtagctgaaacctctgagtagctggtgccttcctcatcaggatgtaaatctgtcagtgccttcctcgccagcaaaattagtgcaccactatgtccgactaatttttttattttttgtagagatgaggtcttatgttgcccaagctggtcttgaactcctaagctcaagcaatcctcccaccctggcctcccaaagtactaggagtacaggtgtgagccactgcagccagccactgtagctttcatgccagccctcatcacctctcccttctattactgcactagacaatttggtcttctttctttctccatggagctgtggtaatctttcctaaacacaaatctgrtgatttcccactacccagagcaggctttcagactgtgcttattaaactctaggaagctcctgcccatctccgcatcttccactggaagtgaaccccattttctttgttacacatttgtcttctgaatgagactttttcaataaaaggtttc

SEQ ID NO: 687123 - DNA, 2868 bp, Homo sapiens
gcttctttaaatactgaatccttcttataaagtaactttgacttgaaataagatctacagattagataacagcattttgtcaatattattaatctcctgattttgatcattgggctctatttatgtaagagaatgtctttattttcaaagatacataccaaagtatttgaggttaaagggacatcatagctggaaattttttaacatttattttaaaagttcaggagtacatgtgcaggatgtacaggttacatagataaacatgtgtcatagggatttgttgtacagattatttcatcacctaggtattgagcctagtatccattagtcatttttcctgattctccccttcttcctattctctgccctccagtaggccccagtgtgtgttgttcccctctatgtgtccatgtgttctcatcatttagctcccacttgtgagaacatgcagtatttggttttctgttcctgcaatagtttgctaagaataatggcctccatctccatccatgtcccttacaaaggacatcctctgttcttttttgtggctgcatagtactccatggtgtatatgtaccatattttctttatccagtctatcaatgatgggcatttgattccatgtctttgttattgtgaatagttctgcaatgaacatacatatgcatgtgtctttataatagaatgatttatattcttttaggtatgtactcagtaatgagattgctaggtcaaatggtatttctgtctaggtctttgaggaatcaccacactgtcttccacaatggttgaactaatttacactcccaccaacagtgtaaaggcattcctttttctccacaacctcatcagcatcttttattttttgactttttgataatagccattctgactggtgtgaaatggtatctcactgtggttttgatttgcatttctctaataattagtgatttggggcttttttccatatgattgttggctgcaagtatgtcttcttttgagaagtgtctgttcatgtcctttgcccactttttaatggggttgtttttttcttgtaaatttaagtagcttgaattattttcaaatgttttcgaagaaaaaccatgtatatatagaaaaagaaagccaatgtgacaaaatgttaacatttggaatacctgggtgaacaatatctggaattttttgtattattcttccaacttttctgtcattttgaagttatttcaaaataaaaaattaaaaggggctcttctatatttttaaaaattatcatttttatttgttatcacagtaaagatcctctttacccagtgattctactggggaagatgattgaaaagcaaggagctataccctgacacaactcaaaccaaacatattattatataacacacacaaccaaaatcgcattctagaaacctggacaaatttttccataaaacttaaaatgaagttgttctcatcttttcatttgcccattaatttagtcatagaatatttattgaatacctcctgttcaaaatgatcaaaaatgctctggtgctcacaggctgcaaaggagacacacacagtcacttccaggactgcatggtaagtgttaaaacaggttctatggaaratagaggcaaggaacgcctgtaatcccagcactttgggaggctgaggcaggcagatcacttgaggtcaggagtttgagaccagcctggccaacatggtgataccctgtctctactaaaaatacaaaaatagccgggcgcggtggtgcgcacctgtaatcccagctactcaggaggctgaaacaggggaattgctggaacctgggagacagaggttgcagtgagccaagattgcaccactgcactccagcgggggtgacagtgagactccgtctcaaaaagaaaaaaaaaagaaacgaaaatagagacaaggcaacctttgcccagtcttttaagggatcagagaggccttcctaaaaaggggatgtttaatatgagatccctagggaaagaggagttggctagatgaaggaggtatgtgtcagcatgggagagcaataatatcccaagatgtgaaaagactggggcctagcattggggatggagaagaggggaggctctagcttacaaaacagctaaaactgaagagtcaaacagaagctttatatgctctactgatggttgggaattttattctgaatactacaggatttttaagcaaaggagtaacttgcaaaaattattttttataattttaattttgttactgatggaagtactgatttgagaagagcagaaatggagctcaggagaccatttaaatgactccacaccaaggcaaattaaatgaccttacatcatttctgtcttctggaaccaactcttttaagtcaaatggacaaactcatgtaccccatatcaggtagatgataaagccaggtgttcacactctaaacccgcttgagatcatcactgtgggctcaacttccatgatggctttgctatccttgctctaaatcctgtgtctgattctgggagttgaccccatatccctttacaaacccactgtcccttctaaccttctcttaacccttcacctcttgctatgaaagtcagtaaaatgacaacatcgcaatgaagccaaaattatattgcttaaagccataaaactaaatagaaaccaggttatcaaaatagacttttcaacgaaggttattgcttcactgggcttcacaaatgaaaccagaaatacctcttatggtcagtccaactcacatattacaaatactgaaatgccctttgtctgccaggtgaacttttaatgataccttaagacccaaatcaaagaatacctatttggtaacacttctct

SEQ ID NO: 687124 - DNA, 606 bp, Homo sapiens
tatgaagtacatatttttaggttattcttccactgctatttgatgatggcatacagaatttaaaatctgcttgaactatctgaagaacatttcatttcacatgcaaatgtgtgtcttcctgtcctttgaatgatcacagttttctttatgattagtagatgaaccttcagtcagacttctatttttaaatcaacttagcatttttagtctgtaagcagaatgacagttttggatgtctgattgtgattttttttttttttaacgttccagggaatgatcaacctcgtgcttgagtgcatagaccgtttgcacgtctacagcagtgcagcacactttgctgatgttgctgggcgagaagcaggagagtcttggaaatccattctgaattctctgtatgagttgctgggtaagaagcatgaytgggttcatagcaacagagttatctatttaaaatgtccataaatggactaggtgtgatggctcatgcctgtaattccagcaatttgggaggctgaggtgggaggatcatttgaggccaggaatttgagaccagcctggacaacatagcaagaccccatctctacaaaaaataaaataaaaatcaaa

SEQ ID NO: 687125 - DNA, 1600 bp, Homo sapiens
gaaaatatgcatcttttattttcatatcaactctttttatagtctctgttcattggtcccttcaacaggtattgtatccatgagtagcaaaaatgaatagaaggaattataattttttatataatcatagaaaaggcccattgcagcaaagttagcacttcagctttatccttctgagctacttatttctcaagccaatcctccctttacctccacagagttatttggggattaaatttgattattttagaacctacaaaagtaacattaatagactttacaaaatgttggggacttggtgggtatgaacacggttcctgctcctaattagttttgaggttggcttttactggaacatggctagaagtgtgattttaaaatggcttacctatttaaatagaacgagaaaggagctcttgaaggtggagcaatgtttctattgggatgtgttcagttggaaataacagaatacccaaacccaaactggcttcaamaacagaggggattttggggcttgcacagctcgccgtctaccagtgggtttgacacaatggctccatcttatctccagaaccagctgctttatgtctccactctgccttccatggagtcatcttcctctagtgcggccttttcttgatggtctcagctgtctgctgtcagctcctagtactgcatactttctttctgacatgggaaaagtgaaagagggcttgttccagaagttatcccttgtgaaagagtgtgctatttcctaaaatccccaaatacaacgcttctcgcatctcattagcccaaattgtgtctggccattcctgaaccagtcgttctggcaagagtagggaaattttaccaacattggtcttgactgatcagggatccactgttgaaactgggtcaactccttggactgcctatctgtcatatagggaatgaatgttatagaggatggtggccaagaagctgaagtgtccatcccaaatgttgactcatctacttcctcaaagggttttatgaactgaattctaatcagaatgcttttattcactacctagcactatgcttgaatagagtaggcagtcaataaatatttgcttgaattatttaataaatacgttacagagatttccattgacttttctgtagcagggtgcatttggctatcaaattagtgtattaaaaaccagtggaactcttactcctctttcattaggttcctttcttgaaaaataagcacctgaactttcattcaggcatatagcaagtggcatctattgttactataaatattacctgtaaaatggcaatagtcattcccctcataaggttgttgggtggcttaaatgttataatatatagaaaatgctcagcatcgcatattgttgttcttcttatcattattcccatttcttttggatgtttgttatcatcctttcccttgttaacatagtaaaacttttgtctccaacctcttgcttcattcttattattgttgttttgcttttcaaagatgtcctagaaaagaaactttacttagatttgttggatatagcaaagaatgttatggattagccaatagagcacatagaatcataattat

SEQ ID NO: 687126 - DNA, 723 bp, Homo sapiens
tgttttattttaaatgatatatcactgcacccttgcccagctttgtaagtgttgggtgaagaaacatctttctaaagtcaaaatttcaggctataacaattcatacaatattttggaacatttagaccatttacatttgatgtgattattgacatcacagattaaatagctattactagtagcttctctgacttgacaaataagttgcttcaaaaagaagattaaaatrttattatatttctatacaatgtttaaaatcaggtattcaaaaaagataagaactatttactttcaaaaaatataaattcaaactgacaaaaattttaaaccttgaccaataattaagttttaaagttacacacacacacacacacacacacacacacacacatatatatggagaaagaaagagagaaggagagggagagagtgttaagtgttaagtatatatatatatatatgcttaattatgtaaggatatcagagagtgccaatgaatgtcaatagaatgcacataaacttttccacattgttgattaaggttttgttagtcatcaagatacataatttaccattttcattggcattaaaatgcttcaacttgacatcctgtcactcatgatgatgaaaagaaaaaatgcaactacactggcaatcaactaatgagcaataaaatgtaaagaccatttaagaaaaaaataaatattcatagcttatttaaat

SEQ ID NO: 687127 - DNA, 723 bp, Homo sapiens
tgttttattttaaatgatatatcactgcacccttgcccagctttgtaagtgttgggtgaagaaacatctttctaaagtcaaaatttcaggctataacaattcatacaatattttggaacatttagaccatttacatttgatgtgattattgacatcacagattaaatagctattactagtagcttctctgacttgacaaataagttgcttcaaaaagaagattaaaatattattatatttctatacaatgtttaaaatcaggtattcaaaaaagataagaactatttactttcaaaaaatataaattcaaactgacaaaaattttaaaccttgaccaataattaagttttaaagttacacacacacacacacacacacacacacacacacayatatatggagaaagaaagagagaaggagagggagagagtgttaagtgttaagtatatatatatatatatgcttaattatgtaaggatatcagagagtgccaatgaatgtcaatagaatgcacataaacttttccacattgttgattaaggttttgttagtcatcaagatacataatttaccattttcattggcattaaaatgcttcaacttgacatcctgtcactcatgatgatgaaaagaaaaaatgcaactacactggcaatcaactaatgagcaataaaatgtaaagaccatttaagaaaaaaataaatattcatagcttatttaaat

SEQ ID NO: 687128 - DNA, 612 bp, Homo sapiens
tgtttttacagctgtttccacacagcacacaatgtcrcagccctagatagagtccagcagtggcacaaatcacaaaccatttcaataataatagcactgataatatcatcttcatgtatggagtccctaccatgagcctctgtgccaagcattttgtatacaccatctaatataaaccttaaaacaggtccgtaagagagatggcattattatccccatcttgcagaggggcagatcgaggttcaatcatgttaagtaatgtcacaaaaagtcacacatggttggtaaatgttggagttacatccagggctgcatgactccaaagcccatgctgctgagtggaacactatttcattcctgatacaatttcatgcaagaagatggagagagggggccattctcttcttccatcaccccctgccactttccaggccttcgttttctcatctctataaaggagacagctttctgcctgccttgaacagagatggtgacgggatcaccagggttttgcaaaggccaattccgctgggcttgtaaggtgcttgcagctgaatttcaggacttgcgtctcctggggcaccaggtggcttctgaaaggagactgagggg

SEQ ID NO: 687129 - DNA, 612 bp, Homo sapiens
tgtttttacagctgtttccacacagcacacaatgtcgcagccctagatagagtccagcagtggcacaaatcacaaaccatttcaataataatagcactgataatatcatcttcatgtatggagtccctaccatgagcctctgtgccaagcattttgtatacaccatctaatataaaccttaaaacaggtccgtaagagagatggcattattatccccatcttgcagaggggcagaycgaggttcaatcatgttaagtaatgtcacaaaaagtcacacatggttggtaaatgttggagttacatccagggctgcatgactccaaagcccatgctgctgagtggaacactatttcattcctgatacaatttcatgcaagaagatggagagagggggccattctcttcttccatcaccccctgccactttccaggccttcgttttctcatctctataaaggagacagctttctgcctgccttgaacagagatggtgacgggatcaccagggttttgcaaaggccaattccgctgggcttgtaaggtgcttgcagctgaatttcaggacttgcgtctcctggggcaccaggtggcttctgaaaggagactgagggg

SEQ ID NO: 687130 - DNA, 614 bp, Homo sapiens
catatctaatggaaaaataaatacatgaaaaaatgggttttttttttgacagaggactcactctaccaaatatattaaaataaattctaaagtcacagtaataaagtttaatatcagaagatgaatagttagatcaacagcacaccagagaaagttagatccaagtacaccagagacatatgataaagaaaaatagatccaaatacaccaataatatatcataaacatggtaattcaaaataatggagaaagttgatgttgcgacaactggctgggtatttgagaaaaaaattaagctggatttcaacctcacttcttcaccaaaacaaatttcaggcagatccatccatccattcattcattccttcattcaatattaactaagcacttataggtagtggggtaggtttggcaacaacacagacaacattcctgtctgctctgagcttacatggatagcaaagaagatacacaaaaagyaagcacacacaatacataataaataagttcaaactataagttacatactgtacgttttgtaaaggacagtcaagaacacttacttaagtggtaacaatagaaagaaataggcaagatttaaaatatactttaga

SEQ ID NO: 687131 - DNA, 1047 bp, Homo sapiens
gagactccgtctcaaaataaaaaaataataaaaataataaatcagaggccaagaaagcatgttctcagaacaaatgccttgtgtggaaaactctgcattcgtggcatttgcccaggtatgctcgctatgtggacaggaagactccacatctttggtgcaagcacctcctctcacccctgtgccctcaagtgcaggacctgtgctctgtgtggaggaataaccctcacctgcccagagtatatctgtgaagcaccaccccagggtcaggtgacttcatttggtccttacaacccactccgggaggaagagagagcaggtggtatttggtgtgggtgaggaagctgcagacagctgccctgtgttcaaaaccagctgacagatgagacccagaaatgatggagagaaagtatcagctttacttctatacaaatctggattggaggatgtatttacaagtgtggccccagtggccttgctacgcagaggtgaacaactgcaggcctcctgcaggcttagagcctgcctggaggctcagcatgagatggcaggccagacagatctgcccagtgggcccacccacccaatrttgccactccctccctggggacaaggctcaggagtgttacaacagcagcagtacttccatatagaatgaagccaggagaagggaggccccctccactctttggtattatctcttttataggcgaggccctagtgggatggccaggggagggctgaccgactcttagccaggggcccttgctgtcactccacacagagtggggggcagtgggggggattgttattgtgatgctttggcttcctcttgctgagtcacttatcaggtcctctccttccctggccattcctgttgattagcctggccacgcccagcctggaaggaagagttggccccagggatagttatgatttattatctcatgtaattaatattatcaggctgcccactatcctgccacttgtcagcaattcagcagacagtggaaatctgtgcatcctcccataaattatttaacgtctcta

SEQ ID NO: 687132 - DNA, 1047 bp, Homo sapiens
gagactccgtctcaaaataaaaaaataataaaaataataaatcagaggccaagaaagcatgttctcagaacaaatgccttgtgtggaaaactctgcattcgtggcatttgcccaggtatgctcgctatgtggacaggaagactccacatctttggtgcaagcacctcctctcacccctgtgccctcaagtgcaggacctgtgctctgtgtggaggaataaccctcacctgcccagagtatatctgtgaagcaccaccccagggtcaggtgacttcatttggtccttacaacccactccgggaggaagagagagcaggtggtatttggtgtgggtgaggaagctgcagacagctgccctgtgttcaaaaccagctgacagatgagacccagaaatgatggagagaaagtatcagctttacttctatacaaatctggattggaggatgtatttacaagtgtggccccagtggccttgctacgcagaggtgaacaactgcaggcctcctgcaggcttagagcctgcctggaggctcagcatgagatggcaggccagacagatctgcccagtgggcccacccacccaatgttgccactccctccctggggacaaggctcaggagtgttacaacagcagcagtacttccatatagaatgaagccaggagaagggaggccccctccactctttggtattatctcttttataggcgaggccctagtgggatggccaggggagggctgaccgactcttagccaggggcccttgctgtcactccacrcagagtggggggcagtgggggggattgttattgtgatgctttggcttcctcttgctgagtcacttatcaggtcctctccttccctggccattcctgttgattagcctggccacgcccagcctggaaggaagagttggccccagggatagttatgatttattatctcatgtaattaatattatcaggctgcccactatcctgccacttgtcagcaattcagcagacagtggaaatctgtgcatcctcccataaattatttaacgtctcta

SEQ ID NO: 687133 - DNA, 1047 bp, Homo sapiens
gagactccgtctcaaaataaaaaaataataaaaataataaatcagaggccaagaaagcatgttctcagaacaaatgccttgtgtggaaaactctgcattcgtggcatttgcccaggtatgctcgctatgtggacaggaagactccacatctttggtgcaagcacctcctctcacccctgtgccctcaagtgcaggacctgtgctctgtgtggaggaataaccctcacctgcccagagtatatctgtgaagcaccaccccagggtcaggtgacttcatttggtccttacaacccactccgggaggaagagagagcaggtggtatttggtgtgggtgaggaagctgcagacagctgccctgtgttcaaaaccagctgacagatgagacccagaaatgatggagagaaagtatcagctttacttctatacaaatctggattggaggatgtatttacaagtgtggccccagtggccttgctacgcagaggtgaacaactgcaggcctcctgcaggcttagagcctgcctggaggctcagcatgagatggcaggccagacagatctgcccagtgggcccacccacccaatgttgccactccctccctggggacaaggctcaggagtgttacaacagcagcagtacttccatatagaatgaagccaggagaagggaggccccctccactctttggtattatctcttttataggcgaggccctagtgggatggccaggggagggctgaccgactcttagccaggggcccttgctgtcactccacacagagtggggggcrgtgggggggattgttattgtgatgctttggcttcctcttgctgagtcacttatcaggtcctctccttccctggccattcctgttgattagcctggccacgcccagcctggaaggaagagttggccccagggatagttatgatttattatctcatgtaattaatattatcaggctgcccactatcctgccacttgtcagcaattcagcagacagtggaaatctgtgcatcctcccataaattatttaacgtctcta

SEQ ID NO: 687134 - DNA, 592 bp, Homo sapiens
gattaattttacaaataattttgagcaaaatgagacagacacaaacatgtttctaattattttattttgttgttttttgagacagagtcttgctctgttgcccagaatggagtgcagtggcatgatctcggctcactgcaacctctgcctcccaggttcaagcaattctcctgcctcagtctcctgagtagctgggactagaggcatgcaccaccacacctgcctaatttttgcatttttagtagagacggggtttcaccacattagccaggctggtctcaaacttctggccttaagtaatctgcccacctcagcctcccaaagtgctaggattacaggagtgagccagcgcacctggcctatgattattttattacattatttactttttttaaaaaaaatagagatggggtttcaccatgttgcccagtctggtcttgaattcctggactcatgtgatccttcttcagcctgtaaccctcatgaaacaagagaccttgcaatgtaccttaaaaccattaacaataaagtctcggatttatccctacaaaccattaaaaattccgggttctcatgaaarcagaattctgca

SEQ ID NO: 687135 - DNA, 666 bp, Homo sapiens
caagatcgtgccactgcactctagcctgggctacagagcgagactccgtctcaaaaaaaaaaaaaaaaaaaaaactaatataagccaagtgaacaagaagagagtggaaagccaggtgtggtggctcacacctgaaatcccagaacattgggaggcagatcgcttgagcccaggagttcaagagcagcctgggcaacatggtgaaactctgtctccacaaaaaaatacaaaagctggggtgggaggctcacctgagcctggggaggtcgaggctgcagtgagctgtgatcatgctgctgcactccagcctgtacaagaaagtaagaccctatctcaaaaaaaaaaaaaamaaccacatatacacacacacaaataaagaagagagtagaaaagatgagattcaagaagctgttaatagccagattatgttgcccttgtaggctgtgatagtttgggctgggtgtcatggcacacacctgtagtcccagaaggctggggtggaggatcgcttgaactcaagagttcaaagctgccgtgagctattataactgcactctggattgcgcaacagagtgagatcctgtctctaaaaagaataaataaatgcaatttttaaaaagagtttgaaaagggttttattctggttgctatgggaaagaagccaca

SEQ ID NO: 687136 - DNA, 666 bp, Homo sapiens
caagatcgtgccactgcactctagcctgggctacagagcgagactccgtctcaaaaaaaaaaaaaaaaaaaaaactaatataagccaagtgaacaagaagagagtggaaagccaggtgtggtggctcacacctgaaatcccagaacattgggaggcagatcgcttgagcccaggagttcaagagcagcctgggcaacatggtgaaactctgtctccacaaaaaaatacaaaagctggggtgggaggctcacctgagcctggggaggtcgaggctgcagtgagctgtgatcatgctgctgcactccagcctgtacaagaaagtaagaccctatctcaaaaaaaaaaaaaaaaaccacatatacacacacacaaataaagaagagagtagaaaagatgagattcaagaagctgttaatasccagattatgttgcccttgtaggctgtgatagtttgggctgggtgtcatggcacacacctgtagtcccagaaggctggggtggaggatcgcttgaactcaagagttcaaagctgccgtgagctattataactgcactctggattgcgcaacagagtgagatcctgtctctaaaaagaataaataaatgcaatttttaaaaagagtttgaaaagggttttattctggttgctatgggaaagaagccaca

SEQ ID NO: 687137 - DNA, 666 bp, Homo sapiens
caagatcgtgccactgcactctagcctgggctacagagcgagactccgtctcaaaaaaaaaaaaaaaaaaaaaactaatataagccaagtgaacaagaagagagtggaaagccaggtgtggtggctcacacctgaaatcccagaacattgggaggcagatcgcttgagcccaggagttcaagagcagcctgggcaacatggtgaaactctgtctccacaaaaaaatacaaaagctggggtgggaggctcacctgagcctggggaggtcgaggctgcagtgagctgtgatcatgctgctgcactccagcctgtacaagaaagtaagaccctatctcaaaaaaaaaaaaaaaaaccacatatacacacacacaaataaagaagagagtagaaaagatgagattcaagaagctgttaatagccagattatgttgcccttgtaggctgtgatagtttgggctgggtgtcatggcacacacctgtagtcccagaaggctggggtggaggatcgcttgaactcaagagttcaaagctgcmgtgagctattataactgcactctggattgcgcaacagagtgagatcctgtctctaaaaagaataaataaatgcaatttttaaaaagagtttgaaaagggttttattctggttgctatgggaaagaagccaca

SEQ ID NO: 687138 - DNA, 478 bp, Homo sapiens
tttcatagtcattgtcattattctcaatgtagatctgtctgttcaagaggtccccccaaaccttttatttatttatttattttgagacagggtctcactctgtcatccaggctggagtgcagtggcacgatctcggctcactgcagccttgacttccctgggctcaagtgatcctcctacctcaggctactgagtatctsggattacaggtacccaccacgatgcctggctaatttttgtattttttgtagagatgaggttttgccatgttgcccaggctggtcttgaactcctgagcttacaggtgtgtgtgagccaccacacctggccacccaagccccttaaaacttgattttataattaatgtgtgctacttttgtaccctggtcattttacctattatatttaaaataagccatgcaattagctgagtggaaatgaacacatattgttcttttaaaaaataaaaataactagg

SEQ ID NO: 687139 - DNA, 605 bp, Homo sapiens
caattcaacccataacagagggttaggaactaatctggaaaagacaggtggggcagagggaaggccccagcaaggccctgtggtaggaaggagcacagcacatttgaggaacagaggcaaggcagggtaactggcaatgtgtgatcttgcttcttctcagcttatccrgttgtgcctatctttcctcatgacaatttatcaaaactatcttttttttttttttttgagacagagtttcgctcttgtcctccaggctggaatgcaatggcatgatctcggctcactgcaacctccgccttccggtttcaagcgattctcatgcctcagcctcccaagtagctgggattacaggcatgcaccaccatgcccagataatttttgtatttttagtagagaggggtttcaccatgttggccaggctggtctccaactcctgacctcaagtgatctgcccgtctcagcctcccaaagtgctaggattaccaaggtgaaccaccacacccagccaaaactatgttgatagttatcttgatcagaatcagaaagcatgccatgagcctaccatttctctgactctgtttctgacatcctcatgggtaaatccc

SEQ ID NO: 687140 - DNA, 626 bp, Homo sapiens
agctggctgggctcagcagtctatagaaaggtgtgatggagcttgggtgcatggtcttggattgggtggctacacacatagatgggggggcccctgattggggacctggtaatgggcaggatgggaaaggggaaggtccctgctgggggcccgccctccccatgccccatggcatggaactctaagaaaataaggattctaaatgcagaccaatctagttcaggggttggcagactctgcatamagcacccgatagtagataggttcagtttgtgggccacacagcctctgtctcagctcctaacttggacttgtggcatgaaagcagccagcacgtacgtggctgagcatgggctctgcacaaacaggacccagatgtgagctgctgcccaccaatacccgtggtctgtattcctgcatgtatgtttgtcaagctgaggggctggaacacatgcagcagttactgacttagcgataacctctaaaatatttagacaaaatacatgggggcctccctgtgtgcctctgccccatttcccatgggtcccaagggtgtcctcgaatcttaaagagcccaggctgggagggcccagcaagtgatcttctgccacgagggcagcatccca

SEQ ID NO: 687141 - DNA, 886 bp, Homo sapiens
gtcactccaaagccagaggggcccccggtcaccaaagctggatcaattggaaatcaataatgatagtattgcatcataacccgcagaataagataaatacccacaagtccatacctaaaatagttaatggaataaatgtacataagtgagtagaaggggtagcacttccttgtaaaacaatgccaagtagcaggtgtagaggaaggaagaaagaatgaactgaccacaaccaatcatcacatcaacacagcaaccagggcaagacccgccatgggcgccactccctgcagggaagctgcctttatctccagctgcctcaatagagacaacagaggaagtaagagaaaggtgatattcaaatttcctctttctaagagctcaggatgtccaagaggtgatgaaagacactgatgtttgcatgcttgttgactggcatttccatgccccctgtctctctctttccactgcccttctcctatctcatcccaaatgagaggacctgtgcaaacctgaagtcttggactaaggcacagttgtccgttaagtgttgctctaaattatttttaaccccacaaggttggcactaatatttctatgcagtgtttactatacggatgtgtgtgtacacataataaacattattcagatgtgtatgtctatacacatacacacatccatataataaatggaattattagttttaaccccacaaggttggcagtaatatctctatgcagtgtttagtatacccaaaatcctctatttttgttgcctttaaaacttcttttgtagatcactttttccacgtaagtacatcatttagaagattatgtcttcaagtgagcatttgtggtcattctattyatctaaaacgtctttattcttg

SEQ ID NO: 687142 - DNA, 1346 bp, Homo sapiens
cttgcagctgctattctgttaaaaagccaagatttaaggagaataatatagcaatgtaatttattctaamtagaaatgaggaaaaccgtaacgaacaaaacccttgaaagttggactattcttacaaattatactaacaatgggaatcaacaatcccatcagagtttgtagatttcagataatcccatcaggcttgtttcttaattatcaaggtgctttgaagaaatttcctatttgaatccctcaaaataatgactttggggtttgttttcacatcagctatgggtgctgttttgacaaagccttagctgaaaacttgaggccatcagcatccctttctcccctgcaacaatacagttcacacaggcactcttccttccccacccatcttgtgcataaggccttgattttacttagatttcccctcatgagctccttgtttattggttggttggttcattggttttgttgagttggtttgttttgttctgttttcacagtcttattaagaaggaaatttacattccgtagaattcacccatgtaaggtgtacaattgaatggtttctagtatattcacagaattatgcatccatcaccactaccagttataaaacattttcactacctggaaaagaaacatggtactcagccatggccgctcaatctctggatcccccactctagtcctaggaaaccactaatctactttctgtccctatagatttgctgatactggacatttcatataaatggaatcacacaatacaaggccttttgtcactggctttttcactaacatgatcttttcagggttatccaacatagcacagatcagtattttattttcattgccaaatcatcttccatcctaaggttataccacatttcctttatctatccattcattatctgctgagaatttgggttatttccactatttggctattataaatattgctgcttatgaacatgtttgtacaagtttttgtatgaacctgtgtttcctgtctctggactacacacctaggagtaagtcatttatttaaccacatgggggctgcaaacacctgcatacatggcggggctctctgtccccggcatcagtcctcactgacttgactattttaacttcatgacgggtgttgcgactctctctgctttattctccttatcaatattatcttgattatttttaaccttttactccttgtaaatactaaaatctgtgcaacatctatatgaaaaacactgcttggattttggaattaaaattaatctatagattattgggggtacacttgaaagcactttaatattgagtactacccgtggatgtggaatatc

SEQ ID NO: 687143 - DNA, 1346 bp, Homo sapiens
cttgcagctgctattctgttaaaaagccaagatttaaggagaataatatagcaatgtaatttattctaactagaaatgaggaaaaccgtaacgaacaaaacccttgaaagttggactrttcttacaaattatactaacaatgggaatcaacaatcccatcagagtttgtagatttcagataatcccatcaggcttgtttcttaattatcaaggtgctttgaagaaatttcctatttgaatccctcaaaataatgactttggggtttgttttcacatcagctatgggtgctgttttgacaaagccttagctgaaaacttgaggccatcagcatccctttctcccctgcaacaatacagttcacacaggcactcttccttccccacccatcttgtgcataaggccttgattttacttagatttcccctcatgagctccttgtttattggttggttggttcattggttttgttgagttggtttgttttgttctgttttcacagtcttattaagaaggaaatttacattccgtagaattcacccatgtaaggtgtacaattgaatggtttctagtatattcacagaattatgcatccatcaccactaccagttataaaacattttcactacctggaaaagaaacatggtactcagccatggccgctcaatctctggatcccccactctagtcctaggaaaccactaatctactttctgtccctatagatttgctgatactggacatttcatataaatggaatcacacaatacaaggccttttgtcactggctttttcactaacatgatcttttcagggttatccaacatagcacagatcagtattttattttcattgccaaatcatcttccatcctaaggttataccacatttcctttatctatccattcattatctgctgagaatttgggttatttccactatttggctattataaatattgctgcttatgaacatgtttgtacaagtttttgtatgaacctgtgtttcctgtctctggactacacacctaggagtaagtcatttatttaaccacatgggggctgcaaacacctgcatacatggcggggctctctgtccccggcatcagtcctcactgacttgactattttaacttcatgacgggtgttgcgactctctctgctttattctccttatcaatattatcttgattatttttaaccttttactccttgtaaatactaaaatctgtgcaacatctatatgaaaaacactgcttggattttggaattaaaattaatctatagattattgggggtacacttgaaagcactttaatattgagtactacccgtggatgtggaatatc

SEQ ID NO: 687144 - DNA, 1346 bp, Homo sapiens
cttgcagctgctattctgttaaaaagccaagatttaaggagaataatatagcaatgtaatttattctaactagaaatgaggaaaaccgtaacgaacaaaacccttgaaagttggactattcttacaaattatactaacaatgggaatcaacaatcccatcagagtttgtagatttcagataatcccatcaggcttgtttcttaattatcaaggtgctttgaagaaatttcctatttgaatccctcaaaataatgactttggggtttgttttcacatcagctatgggtgctgttttgacaaagccttagctgaaaacttgaggccatcagcatccctttctcccctgcaacaatacagttcacacaggcactcttycttccccacccatcttgtgcataaggccttgattttacttagatttcccctcatgagctccttgtttattggttggttggttcattggttttgttgagttggtttgttttgttctgttttcacagtcttattaagaaggaaatttacattccgtagaattcacccatgtaaggtgtacaattgaatggtttctagtatattcacagaattatgcatccatcaccactaccagttataaaacattttcactacctggaaaagaaacatggtactcagccatggccgctcaatctctggatcccccactctagtcctaggaaaccactaatctactttctgtccctatagatttgctgatactggacatttcatataaatggaatcacacaatacaaggccttttgtcactggctttttcactaacatgatcttttcagggttatccaacatagcacagatcagtattttattttcattgccaaatcatcttccatcctaaggttataccacatttcctttatctatccattcattatctgctgagaatttgggttatttccactatttggctattataaatattgctgcttatgaacatgtttgtacaagtttttgtatgaacctgtgtttcctgtctctggactacacacctaggagtaagtcatttatttaaccacatgggggctgcaaacacctgcatacatggcggggctctctgtccccggcatcagtcctcactgacttgactattttaacttcatgacgggtgttgcgactctctctgctttattctccttatcaatattatcttgattatttttaaccttttactccttgtaaatactaaaatctgtgcaacatctatatgaaaaacactgcttggattttggaattaaaattaatctatagattattgggggtacacttgaaagcactttaatattgagtactacccgtggatgtggaatatc

SEQ ID NO: 687145 - DNA, 1346 bp, Homo sapiens
cttgcagctgctattctgttaaaaagccaagatttaaggagaataatatagcaatgtaatttattctaactagaaatgaggaaaaccgtaacgaacaaaacccttgaaagttggactattcttacaaattatactaacaatgggaatcaacaatcccatcagagtttgtagatttcagataatcccatcaggcttgtttcttaattatcaaggtgctttgaagaaatttcctatttgaatccctcaaaataatgactttggggtttgttttcacatcagctatgggtgctgttttgacaaagccttagctgaaaacttgaggccatcagcatccctttctcccctgcaacaatacagttcacacaggcactcttccttccccayccatcttgtgcataaggccttgattttacttagatttcccctcatgagctccttgtttattggttggttggttcattggttttgttgagttggtttgttttgttctgttttcacagtcttattaagaaggaaatttacattccgtagaattcacccatgtaaggtgtacaattgaatggtttctagtatattcacagaattatgcatccatcaccactaccagttataaaacattttcactacctggaaaagaaacatggtactcagccatggccgctcaatctctggatcccccactctagtcctaggaaaccactaatctactttctgtccctatagatttgctgatactggacatttcatataaatggaatcacacaatacaaggccttttgtcactggctttttcactaacatgatcttttcagggttatccaacatagcacagatcagtattttattttcattgccaaatcatcttccatcctaaggttataccacatttcctttatctatccattcattatctgctgagaatttgggttatttccactatttggctattataaatattgctgcttatgaacatgtttgtacaagtttttgtatgaacctgtgtttcctgtctctggactacacacctaggagtaagtcatttatttaaccacatgggggctgcaaacacctgcatacatggcggggctctctgtccccggcatcagtcctcactgacttgactattttaacttcatgacgggtgttgcgactctctctgctttattctccttatcaatattatcttgattatttttaaccttttactccttgtaaatactaaaatctgtgcaacatctatatgaaaaacactgcttggattttggaattaaaattaatctatagattattgggggtacacttgaaagcactttaatattgagtactacccgtggatgtggaatatc

SEQ ID NO: 687146 - DNA, 1346 bp, Homo sapiens
cttgcagctgctattctgttaaaaagccaagatttaaggagaataatatagcaatgtaatttattctaactagaaatgaggaaaaccgtaacgaacaaaacccttgaaagttggactattcttacaaattatactaacaatgggaatcaacaatcccatcagagtttgtagatttcagataatcccatcaggcttgtttcttaattatcaaggtgctttgaagaaatttcctatttgaatccctcaaaataatgactttggggtttgttttcacatcagctatgggtgctgttttgacaaagccttagctgaaaacttgaggccatcagcatccctttctcccctgcaacaatacagttcacacaggcactcttccttccccacccatcttgtgcataaggccttgattttacttagatttcccctcatgagctccttgtttattggttggttggttcrttggttttgttgagttggtttgttttgttctgttttcacagtcttattaagaaggaaatttacattccgtagaattcacccatgtaaggtgtacaattgaatggtttctagtatattcacagaattatgcatccatcaccactaccagttataaaacattttcactacctggaaaagaaacatggtactcagccatggccgctcaatctctggatcccccactctagtcctaggaaaccactaatctactttctgtccctatagatttgctgatactggacatttcatataaatggaatcacacaatacaaggccttttgtcactggctttttcactaacatgatcttttcagggttatccaacatagcacagatcagtattttattttcattgccaaatcatcttccatcctaaggttataccacatttcctttatctatccattcattatctgctgagaatttgggttatttccactatttggctattataaatattgctgcttatgaacatgtttgtacaagtttttgtatgaacctgtgtttcctgtctctggactacacacctaggagtaagtcatttatttaaccacatgggggctgcaaacacctgcatacatggcggggctctctgtccccggcatcagtcctcactgacttgactattttaacttcatgacgggtgttgcgactctctctgctttattctccttatcaatattatcttgattatttttaaccttttactccttgtaaatactaaaatctgtgcaacatctatatgaaaaacactgcttggattttggaattaaaattaatctatagattattgggggtacacttgaaagcactttaatattgagtactacccgtggatgtggaatatc

SEQ ID NO: 687147 - DNA, 645 bp, Homo sapiens
ctttccatggtttagccacctaggatgtgcagcttttactgtgatcaatggcctctgagagtatggagtggaggtcagaagaaaatgcaaagcaactggacgttccagatgaggagctgttccaaaatgaggagccatttcagacagaatgagctgttccagaayggggagccattccagaatgaggagatgttccagagtgtgtagccatttcagaatgaagagctgttccaggatgaggagctgtttcagaatgaggaaccattccagaacggggagctattccagaatggggagcccttccagaatggggagccattccagaatgagaagctgttacagaatgaggagctgttccagaatgagaagccgttcaagcatggggaacttttccagaatgagaagctgttccagaatgaggagctgttccagagtgggaagctgttccagaatggggagctgttccagagtgggaagccattccagaatggggaatcgtttcagaatgagaagccattccaggatgaggagctgttccagaatggggagctgttccagactgatgagctgcaccttgtacctgcctcacacctgatcacatagccttgatgccagaaacctagagtgctctatttaggaacgtta

SEQ ID NO: 687148 - DNA, 472 bp, Homo sapiens
tggaattacaggccagagccaccgtacctggccttcagaaagaaattgtttaaaaacctccttagggcaagtgcacaacacaaaggaattcaaagagcaccaacatgggattagtgagggccgggagctaggcctgtgccatgtatcactgcatgttgtgctgtgtgagatgacaaatctgtcttccattactttgttgagcagttacccctgagaagaattatttcctttaaaataaaaaacatactctgtactggctgctgcattatagggcatatcttgcctggaaaatggaagtcaggcaacatggctattctatggaaatgtctgagcacaaagaagaggcaaaagggaatgtggaggcctgcgatgtcttggaaatgagcaggaggatgactgcaatggcccttcagttaggttcaggcttctgcgggaargcggcacccaggagcccagagcagggagacaaacc

SEQ ID NO: 687149 - DNA, 1346 bp, Homo sapiens
tacaacatatatctatatacagtatcaatatacaactcacatacaatagaatatgattccacctgaaaaaggaagaaaattctgacacattctacagcatagatgaaccttgagaacattacgttaagtraaattagccagtcacaaaaggacaaatactctatgaatcagttatatgaggcgtctagaggtctagagtagtaaaattcatagagataggagagtagaatggtggttaccagggttaggggtagcaggaaatgaggggttatttaatgtttaatggatagagaatagagagttatttagtgtttaagggctatcgaggctccgtgttgcaagatagataagaggagttctgtgggtggatagtagtagtgatggtagcacaacagtgagtgtgtttaaacacgttgttaaacagtatacttaaaaaggttatgatagtagattttatcataattttaagaattaaggcaggtaaatattttgtggaaatacaaggaactttttttgtcttttatctacacagcttcttctacaaacatttaaaatataacattcctctatgcaagtaagttataagactacccagggctgtataaccgacaaattcacacccagttcttctgatttcaaacctggtgttctctccattgcactctaataaacgtacccttgagtatatgggagcaaatagcacatacacaatcatacaaatgtaagtactatgtatatattatatatatacacacatatatataattaattccaaggattagatcttatgcagtgtgtgtagttcttactagtagacaaaacaataaacgcattttgctgggcatttcaatgctaccttcaatttgtgaatttcagaccaatttatttgtaaataaaaaaatattttcagtgtctttgatgctcaattattctactaagtctatttacagactttgttctttgaaatagtaaatccagtttactatttaaaactaagtggtttgtttttattctaactctaaaccaacagaaatttatccttgtctgcttcttaaaaagtacatatgaattttatgtgctgcccattcttatcgaagcctaacaaagaatctatttattctatgcatatataaaattggaaatagatgactttcattaaaattaaaaattattttgatattatacaatatttggacatcattaaaaaggactcgtaagttccaacaaactaaaagcttatatttaaagtggcaccatgaataaacatgtatttatgatcgtttatttaagggcttattttattacgtgttgcattcatttgaggttttattttgctgcgaacttaa

SEQ ID NO: 687150 - DNA, 1346 bp, Homo sapiens
tacaacatatatctatatacagtatcaatatacaactcacatacaatagaatatgattccacctgaaaaaggaagaaaattctgacacattctacagcatagatgaaccttgagaacattacgttaagtgaaattagccagtcacaaaaggacaaatactctatgaatcagttatatgaggcgtctagaggtctagagtagtaaaattcatagagataggagagtagaatggtggttaccagggttaggggtagcaggaaatgaggggttatttaatgtttaatggatagagaatagagagttatttagtgtttaagggctatcgaggctccgtgttgcaagatagataagaggagttctgtgggtggatagtagtagtgatggtagcacaacagtgagtgtgtttaaacacgttgttaaacagtatacttaaaaaggttatgatagtagattttatcataattttaagaattaaggcaggtaaatattttgtggaaatacaaggaactttttttgtcttttatctacacagcttcttctacaaacatttaaaatataacattcctctatgcaagtaagttataagactacccagggctgtataaccgacaaattcacacccagttcttctgatttcaaacctggtgttctctccattgcactctaataaacgtacccttgagtatatgggagcaaatagcacatacacaatcatacaaatgtaagtactatgtatatattatatatatacacacatatatataattaattccaaggattagatcttatgcagtgtgtgtagttcttactagtagacaaaacaataaacgcattttgctgggcatttcaatgctaccttcaatttgtgaatttcagaccaatttatttgtaaataaaaaaatattttcagtgtctttgatgctcaattattctactaagtctatttacagactttgttctttgaaatagtaaatccagtttactatttaaaactaagtggtttgtttttattctaactctaaaccaacagaaatttatccttgtctgcttcttaaaaagtacatatgaattttatgtgctgcccattcttatcgaagcctaacaaagaatctatttattctatgcatatataaaattggaaatagatgactttcattaaaattaaaaattattttgatattatacaatatttggacatcattaaaaaggactcgtaagttccaacaaactaaaagcttatatttaaagtggcaccatgaataaacatgtatttatgatcgtttatttaagggcttattttattacgtgttgcattcatttgaggttttattttgctgcgracttaa

SEQ ID NO: 687151 - DNA, 1497 bp, Homo sapiens
tttttgaaaatataatacattaaaagtgatcattttaataaactggatacatttacttcctgactttatttaggcagcattaaaatacacatagtttaaaaatttttaagtatttttactagagaggcataataataaactctgaagactcttagaggttatggagaaattaactgaatttttagtgcatggtaaattatacattatcaatccataaacctgtgttgtacttgtagcacaaaatatatcataaatatttctacatgcaaattgaatatttaataaagaaaatactaacagtggctattacttgacaaaggcttatttgtaatttttgtcttcctttgtgagcttttctgtgtctctaaatttcctacacttaacctgtcattatttttgcaacataaaataaacaagcatacatatatgytatgtttaatcattaatatgaaagaaataatatgaatttttgaaaaaatgttagaatataaacagtgaggagatactaaactaatttgattaggtgtgtaaacttgttcattgaaataaacactgcttcacatttctaccaactttatagatgttatctcttaatcctaattttaaattatgttaatttctacagagtctctagcagttacttattacttttcagcagtgtcagtcctgtccatgcatctgtgtattttacacttctctggttatccttggaataatacataaacattattaggaaatgctcgttaattcattgctttgaagttgatattgaggtgatttggtttcagacatatttgagtttgagcagacacaaacaaactcaagtgacagatctatgcataaggtaagggccaagcagaacgagtggcaaggactgagattcccaaccctggaaggattgaaactaattttgattgaccccttgtagtatacattgcagtgggtattcaaacatgaacaaagactagaatatagattgcttaaagtctctttgagatgataggaaaagagtgaaatctgtgtcactgtaagtagcagacacatttggttggctggttctatgatttaaggaaatgaagccccaaacctctgggctggtatgagcacttcagctcacataggccccactgttccctgatattttaaccctgtcttatttacatatatatgtatattatcttctatgcgacgataagtatttatatttctgttccttcttggagaagttttcataggtctataaacaataaaacataaaattgagagcaagatatttcgtctattttgtttactgctttatcttcggcatggaaaacaatgtcttgaatatagtgacacctcaaatcttgttaacttgtcaaataataaatataatacccgttttctattctaaatccttgcagaaagactatattaactattattttttcacaataatcttgatatattttcttacagaacttactccacttagcagtcaggaaaaattaaaaataa

SEQ ID NO: 687152 - DNA, 2465 bp, Homo sapiens
tgggattaaggagtaattccttaaaggcattacaaatgacacttgcatttcaaattcttttttttttttttttttggttcagtgattttcatcaaacactactcttaatgtgggttagggatttcaagagagtaaagcaagaaaatataacttacattattcttattactcctgtcataatatgatgatctctgtagtctgtttcttagaagagccagaccctaaattacagctaagttgcattacaaagtttaactctgagtcctttgtctggaatctggaacatcttttctgattgaaagatgtttaaatgtcagttcgtttcctggagtaggcttaaaaatattctaggtaaaattaattcagcaaattaggttcaggataatttttgtttagtgaactcgactgaaaacaggatcaacagttataacacaagattcagtttggaatactgggaacttatcttcctaccagggaaggcattgatgatagccctgtggagatttcataattgtagatttcatccactggataaacataaagcatgaccacaacccatataattgctaaatgaataaattagtaaatgagtgagcagatatcatttcccttatgtgccatggcagagaaaaaaagttaataattgtctcttccagtatcaagcagcaagaaccatagggaatgctggatcataaactcttattaactatttcccttttgccaaaataaattttaaaaaattctaaccttttttgacatcatgcagataaactcatccagaaatcaggcaattacagagtggatgctagcatgatataaattgcctatatttaaatggcttgctcaaatgaggactagcattaaagattctaccaggagagttgaccctgtctgtccttccaaaagcctcagatctcttcctgttccctttttagaagacttgaataaaaacatgcagaacactcaaaaatatacactcagctggaaaaagaagatagggaaaacaagagaaagcttccttgcttgctacaagaggagggaaatgactgccttttacatataaaactctgaaactaattgcattaaaggcatattcagtaatatttaatatatttccaggacacttatgagtaattttaatatataccttttaacctatacctgatgttccattatacttgcaatatagctattcttccaatatagttattggaatatataactataacaatagttattctacttgcttactataccctttaaattataatgattagtcatgtatattgcataattaaattacaaaaatgattaataatcattatattattgtttaatcttactacataccacatatttcattttaactagaaaacgcaaagtgctttttaactcatgggccaaacatattgttatatggataattagcctgggttttattacaggtaaggaaactaaggtccaagttaagccacttatccaaggtgaaacaagaatattccttgttcttggtctgagtcaataatagcttagagcttagaatacaggactttcagtcatttttttttayaaaactgaaccaaagaaaaaccacaagttttctctgtaattaataatataaatactcttaaagaagattttttttttagaatcgtggttcttacagaagattcagagaatggtgtctaatagaatatttcaggcaacaacctattgacataagcctggttaggctcagctatcacagccccagcctctgaccccatacagtttcaaagcatcctggaataactcctgggtatctcatttcataaatggtctccagacagatattgtcttcagatggcagtaacagagacctgtgatccacgacagaaattctccatcttttcttttctattataacacccatgaataatacaaaagagagcaaaaaaaaaaaaaaagaagaagaagaactgatgggcattactttaaatcacaaggcagcttttaaaattattattacatttttgctccccaaggaagtagttaaaattccctcctgaatagattgcatctggtttagttaagttcattgaaggggtcttttaattattgtaaaaattaagtctcaagctttaagccaggaaaactgggaaaggatacaaatgaatgaacaaacaaaatttggtctatgtttcaatctcttgtaagagataatattcataacctgagagttagtcttattgcttaagattagatcatcttactgttcgccctagttgaatttcggagaaaacaaggcaattgatatgggatatttggctgaaggagtttgtaatgacccctctggtttctgttaattgtaggtagagcacctagattaattaccctaccaaacctctacaaaatgagtggaaaccattcctaaaggtagactggaaagctgttacaaaggcgaaatatgtgctaagcagcaaaaa

SEQ ID NO: 687153 - DNA, 634 bp, Homo sapiens
gaaaggcatgcgtgatgtagctgtgtcagacttctgacttacattattataagatactaaatttgctttaagtcagtaggttcatactcttctgttacggccacaataaaaatataataaaactatcttttcttttcttcccttaaattgttccagatttggccactgggagctccttcatttgagctaggtcttttgctcatcttgatggctgttggtagcactttcttcgtttgaatcaactatgcagtcaaccttatcagtggaagaatcaaattaaaagtcgggtaatttcatacaaatagaattcatcttagattttctttccatgatcacaggaaaaccatgaaagaatacagtttacccagccactataatttttaagagttaatttaaaatattgaagtatggaggcattgggcatttgactctttgccccaatttgtaagaaactcctgtgtttgtgtgtgtgtgtgtgtgtgtgtgtgtgtgtgtgtgtgttgctgtcttttctaaatctgatactaattgggaaactggaggtaggccaggactcaggatataaaataatttaagraaggggtaagaggcaggaaataaatacatgcccactcctactttgctgtgtttacaa

SEQ ID NO: 687154 - DNA, 591 bp, Homo sapiens
gtctgtagtgtacttctcttttccccattcccaattaaaaaagtgttcaatgmataactttaaaaagattttaaaatagtaagatacactacagttgtaaaagtattattaaagatgtaacaatgcacattgctcaaggcactataagtgatgtaatctatttgcaaagcattttagtgatataaatcatgaacctctaatggagttaaatatttctcgaaataagactgaatcaggattttttcctgaaggaataatcttcaatagacaaaaccagcatataccaaaacaagtattgaaacagcaattgtaaccaaaattgaaagcccatcaattgtttattttcaggagtcttcaagtatgatttattcattcaatgcaatattatgccactattatgtatgtatttaggaaatttatttgtttatataaactacatattatacaatatttagggaaaattagaacactaaaattatatgttaaatatgattacaattactttttgaaaagtcattcagagggaaaaaaaatgaaggcatcaacctaaaaagtctctaagtgataagtagttttgctttatttttccat

SEQ ID NO: 687155 - DNA, 591 bp, Homo sapiens
gtctgtagtgtacttctcttttccccattcccaattaaaaaagtgttcaatgcataactttaaaaagattttaaaatagtaagatacactacagttgtaaaagtattattaaagatgtaacaatgcacattgctcaaggcactataagtgatgtaatctatttgcaaagcattttagtgatataaatcatgaacctctaatggagttaaatatttctcgaaataagactgaatcagrattttttcctgaaggaataatcttcaatagacaaaaccagcatataccaaaacaagtattgaaacagcaattgtaaccaaaattgaaagcccatcaattgtttattttcaggagtcttcaagtatgatttattcattcaatgcaatattatgccactattatgtatgtatttaggaaatttatttgtttatataaactacatattatacaatatttagggaaaattagaacactaaaattatatgttaaatatgattacaattactttttgaaaagtcattcagagggaaaaaaaatgaaggcatcaacctaaaaagtctctaagtgataagtagttttgctttatttttccat

SEQ ID NO: 687156 - DNA, 591 bp, Homo sapiens
gtctgtagtgtacttctcttttccccattcccaattaaaaaagtgttcaatgcataactttaaaaagattttaaaatagtaagatacactacagttgtaaaagtattattaaagatgtaacaatgcacattgctcaaggcactataagtgatgtaatctatttgcaaagcattttagtgatataaatcatgaacctctaatggagttaaatatttctcgaaataagactgaatcaggattttttcctgaaggaataatcttcaatagacaaaaccagcatataccaaaacaagtattgaaacagcaattrtaaccaaaattgaaagcccatcaattgtttattttcaggagtcttcaagtatgatttattcattcaatgcaatattatgccactattatgtatgtatttaggaaatttatttgtttatataaactacatattatacaatatttagggaaaattagaacactaaaattatatgttaaatatgattacaattactttttgaaaagtcattcagagggaaaaaaaatgaaggcatcaacctaaaaagtctctaagtgataagtagttttgctttatttttccat

SEQ ID NO: 687157 - DNA, 591 bp, Homo sapiens
gtctgtagtgtacttctcttttccccattcccaattaaaaaagtgttcaatgcataactttaaaaagattttaaaatagtaagatacactacagttgtaaaagtattattaaagatgtaacaatgcacattgctcaaggcactataagtgatgtaatctatttgcaaagcattttagtgatataaatcatgaacctctaatggagttaaatatttctcgaaataagactgaatcaggattttttcctgaaggaataatcttcaatagacaaaaccagcatataccaaaacaagtattgaaacagcaattgtaaccaaaattgaaagcccatcaattgtttattttcaggagtcttcaagtatgatttattcattcaatgcaatattatgccactattakgtatgtatttaggaaatttatttgtttatataaactacatattatacaatatttagggaaaattagaacactaaaattatatgttaaatatgattacaattactttttgaaaagtcattcagagggaaaaaaaatgaaggcatcaacctaaaaagtctctaagtgataagtagttttgctttatttttccat

SEQ ID NO: 687158 - DNA, 546 bp, Homo sapiens
tgaccttgaaagcttgcaatctcttaagagaaaaagacaagtgaaggggaaaayataacatcttgtactaaacggtttgataatgtcaagataggatgcagaactaacctagttatgggtaaaggtatcagaggcagctttctgggaacgtgacatttgagatgagaacggaaagacatgcagttaacagccaggtgaaggacagccaggtaaagttaacagccaggcaaaggatgataggaagaagtaggagatcagtgaaagcagaggaaagagaacatcttaagctctctgacaagaaagaatgtagtccatcagggtatatgtaagcagctgcatctgactggaatgtggattttagggagaaaaaaaatggaggcaaaaagagagtcctgctatgcctgtccagacctgatgatcactgcgaattggggtagggggtggtgaaagggtgacttcaggtttctgatctgggaaactggctgtatgagccttagaggtagcccccttttaactccagactccttcacgtgattggagataaag

SEQ ID NO: 687159 - DNA, 546 bp, Homo sapiens
tgaccttgaaagcttgcaatctcttaagagaaaaagacaagtgaaggggaaaatataacatcttgtactaaacggtttgataatgtcaagataggatgcagaactaacctagttatgggtaaaggtatcagaggcagctttctgggaacgtgacatttgagatgagaacggaaagacatgcagttaacagccaggtgaaggacagccaggtaaagttaacagccaggcaaaggatgataggaagaagtaggagatcagtgaaagcagaggaaagagaacatcttaagctctctgwcaagaaagaatgtagtccatcagggtatatgtaagcagctgcatctgactggaatgtggattttagggagaaaaaaaatggaggcaaaaagagagtcctgctatgcctgtccagacctgatgatcactgcgaattggggtagggggtggtgaaagggtgacttcaggtttctgatctgggaaactggctgtatgagccttagaggtagcccccttttaactccagactccttcacgtgattggagataaag

SEQ ID NO: 687160 - DNA, 546 bp, Homo sapiens
gattgatattttatctcattttagaggcagattgtatagaataaattgaaatttgcctagtgatggtggaaagctttgcatctcttttaggggtgattagctatgcttacaataaaactgtgcatatwtatatttggaacatccttataataaaaaaataagcaacctacatgtccaacaataaaatagtgtttatatgaattatggcataccatagaatattatgctgtgattaaacatggtattcccaaaatataaaatgaaaaaatgaggacataagactgtttaatatgtatctggctgggtgcagcagctcatgcctgtaatcccagcaatttgggaggctaggcaggaggactgcttgagcccaaaagttggagaccagcctgggcaacatggcagaaccttaccaaaataatacaaaaattagccaggtgtgctggctcgtgcctgtggtcccagttactcgagaggctgaggtggaaggaccccttgagcccaggaggcagaggtgcattgagagccatgttcatgccactgcactcc

SEQ ID NO: 687161 - DNA, 1470 bp, Homo sapiens
aaacaaatgaagacagtataaaatctagtgtaaatatatgtgatgaaccaagataagtttaaaagttagatgccttggattttatagttaattttcagtaattccgcatagtcacatttcatagacatgcaaacattagcaagatatgttattaaattcaactgaacagacattgagcaaggatattttagtgagtcaccataattttcctaaggacattgttaggacaatacctttccaatgttggctaattattttctcatttatttgccaaggaacaaaaagcatacgcaaatacttcgggattaaggccaaaggccaaaattgaccctgtaaggggaggccactatgcacacacagagattctgtgcactgtacttacgttggactgcagtctgtttcctagctggaggtgacaaactgaaacagaaaaatccaaattaaaacaaagtaacacaccagtctccttttaaggttgtatttcttttttttttttttttttttttttgacacagagtctccctctctcacccaggttggagtgcagtggcgagatctcagctcactgcaatctccacctcctgggttcaagcgaatcttgtgcctcagccacctgagtagctgggattgcaggtgtgcaccatcacacttggctaattattattattattattattatttttgtagagacagggtttcatcatgttgcccaggctggtcttgaactcctggtctcaagtaatctgcccgccttggcctcccaaagtgctgggattacagatgtgagccactgtgcctggctcctaggtcaattttgaaggcactttatcatatcattctccataactcaattttggaatcgatttctgcaaggtgaaagccaacaacaccatccctcagaattgcaatacatctccaaaaatggagatctaactatgaaagaaatgcccctcttgcctcatgcctgtaatcccagctcctcaggaggctgaggtgggggatcgcttgagcccaggagttcaaggccagcctgggcaacttagtgaaaccccatctctacaaaaaataggaaaattagccgggcatggtggtgcacacctgtagtcccagctactcagaaggctgaggtgggaagatcacttgagccagggaggtcgagactgcagtaatggcaacagaaagaagtcctgtctcaaaaaacacaaaaacaaaaccaaaccctaagtgaaatgcttctttttaaggagaaataactttgagacagttcaaagaagggtttacrtgctttttcagtgtgggcatgagacttctcaaaaagtaggtgggccccaggggaaactcagttggaaaatagctccctggatttggaaaccttgagtcacctatggaatgtgtgtttcctggtgctggtcctccacagggcaccggggtggtttcagagctggaggggaagcgtcagaagtgtctgtc

SEQ ID NO: 687162 - DNA, 621 bp, Homo sapiens
atcaattgtcacccaacaaatatttaataaacatggatttaaatgtgtaagagaaagtattactcagttcaacaatatttactgagcatttattctgtgtcaagccccatgctagtggaagagatacactagttaacaagaagtgaatgtctttcttgtcgaacctacaatctgcatgaaaacaaaccttaaacatgaaattacaaggacaattcagattaaatgtacataaaaattaagctgaattggttgaaacaaggatatgatttagttctttcccgtaaggacttaataatttagtgtcaaaagatacatatatacatacacatatttactcgaatgacaagtagaataaataccatggaaggggtacaaaaatactttggggcaaagactagaaaatgattaatcagggcctcaggaattgtgaaagacttcrtgaataagaaatcagcttggcggggcggggtggctcacacctgtaatcccagaactttgggaggctgaggtgggtgattgcatgagccccggagttcgagaccagcttgggcaacatggcaaaaccccatcttcacaaaaaatacataaattagctggacgtggttgtgcacacctgtagtc

SEQ ID NO: 687163 - DNA, 646 bp, Homo sapiens
ttcacgcagttgtccaatcatcaccactaatttcagaattaaaatttacttttaaaaaatgaaattaaaatatcattgaggaagtttaaagagaaggagaaaaaatactgatttctaaaactcaccattcaaaccaaactcttgttcttttttggtgcattttatttcagcttttcttaacatccagatatttttatatggactaatgagakaattaattatttttaaaatttcttatgagcgtctttggctctgtctctttaaggctactcagagtgtgctgaggtgtgctgtgattttactgctgtgtgtacacatgaaaatattaaagtgaagaaaataacttaatggctatgtatgcggtgatgtgatgctttctaaaataaaccgtctctctttatacttgaactttccagagcactgttaaagctttagacttttggtcattagtagttgatagatatcttttgttcctgcattctagggcatgaaaacagtaaaagcttaaattaattgataaaactggcatgtctttagatgatgctcttcccttaaactgagggcaaacttggcactgggcattgtggagtgatttccagtagcattgatgggaggactgagcagtgagcatgtaagagggaacaac

SEQ ID NO: 687164 - DNA, 646 bp, Homo sapiens
ttcacgcagttgtccaatcatcaccactaatttcagaattaaaatttacttttaaaaaatgaaattaaaatatcattgaggaagtttaaagagaaggagaaaaaatactgatttctaaaactcaccattcaaaccaaactcttgttcttttttggtgcattttatttcagcttttcttaacatccagatatttttatatggactaatgagataattaattatttttaaaatttcttatgagcgtctttggctctgtctctttaaggctactcagagtgtgctgaggtgtgctgtgattttactgctgtgtgtacacatgaaaatattaaagtgaagaaaataacttaatggctatgtatgcrgtgatgtgatgctttctaaaataaaccgtctctctttatacttgaactttccagagcactgttaaagctttagacttttggtcattagtagttgatagatatcttttgttcctgcattctagggcatgaaaacagtaaaagcttaaattaattgataaaactggcatgtctttagatgatgctcttcccttaaactgagggcaaacttggcactgggcattgtggagtgatttccagtagcattgatgggaggactgagcagtgagcatgtaagagggaacaac

SEQ ID NO: 687165 - DNA, 578 bp, Homo sapiens
ctaaggagtttgagaccagcctgggcaacagggtgaaaccccatctctactaaaaatacaaaaaataaataaaaataaaaataaaaagccagacatagtgacaggcaggcacctgtcgtctcagctacttgggaggctgaggtagaaagactgcttgagctgtggagcggagtttgcagtgatcaactgagaactaagacttgattcaatttgaattatagtttgtttataagaataatttataaaataaagctttatgagactaacataagatataattcgagaattcagttcagcttcttaggtttccctcacctactggtttttgtgttatttccctcacctactggttttggtgtcagttttgactggttattccagttggacttcagatagctataggccaagaatgataactactgtatgtacttatacagagttcaaacttataatggctkatctatgtataccctgaaaaatataccagatgcataagaacatcataaccattggacatattttcttatgctaaaatatgctagtcttcaactagtatcttctttcacactatacatata

SEQ ID NO: 687166 - DNA, 1927 bp, Homo sapiens
tattatttcgaaagccaaatgattaaataatctggtttctgtctaataagttattgctgatctctagtactaaattgttttcaaggaagtcaataaaagatgttttgtcttggggaagatctatataaaaacagaaattaaagtgggcttaagttcttcataaacaacttaacaaatactaatgacaatttctgggcattcttgaattacatttctcaatgattttttaaatcaaaatctttgttcaaaggcacacaagaaagcatgatttaagccaaattttgaagagcaatattttatatataaaatgcacatttatacattaagttcaactgatctctgcgttacctaagagttctggaatcagtattctgaaagatatagttagacctgataaacccaggacatgtgcacacaccctgtgatggtcatgggttgatgcctaagtggagaatcgcttctcagatgaattggaatggctcgacatgaatccggttgctgtgcatgcacagttttcaaggcctccaaggaaacaagaacaacatgggggtgttggaatcagggtgggatcacttggagtcctgatgtagttgatccaattgcttctctgccaagcagagggtattttagtcaaggaaaggattacttaggatgatgatgtgtttactaaattaacttttactacactgagctagttggtggtgggagcttgcaggtccttaaaattgcctggcttgagggaaatataccctcatatagagggagcttttcagattcacagagcacatttggcatgtgataaattgttatttgtgtataatgcaatctgtattctaactacactgagcaccaaaacaactggccacaactagctaaactacctcagtaataataatatcagaaagtaattcagaaataaaaaccaaactgtctcaattcagtgaaatagcattttgaaaattaaagaataaaaacactcaaagtgaggaaaagccttttgtgaaattctcagtctacttgtcaattcaagagtaagagaactgtttaccactatgtctaccctactttctctaaattgaacacaaatattagcaaaatagatgacaatgaaacaatatattttcttttagtgagttgaagccaccttactggtccccccacctcattattttaaagacgtgccataatataaatcttagcacagaactggataaacaacaaagtccataaagtttgaatgatttggccaaaatcaatttcattttatggtccatgtgtgttttctgaattattatataaggatactgtactttgaacctgaattcttacaccaaaccctctcactgtaatcccttgaaaggcagcttctgttctgctttcttgcactggtgaagctgctatcttgttttcttcaatgctcactgtgttctaaagtctttgtatttgaccatgttggtccctgcctctttttgagcctctcctattcatagaccaggcattatggcattccagtaagctgacccaattagttcaccatcatttttgtcccattttctctttcctttttggggtgcttgtttccacatctcttaaaggcatggtatttttccytcaagagtatatcctctttcctcaaatattttatgcattgtttacttagtaattcacttgctactaagatttaaactaatattctactccttaaattaacctctgttcatattcccatccatcggcaccaactgaatgaaagacttgtccatttacgtgagcttcaaactcaccacatcaaactctccattctccttcttttattctccagctctcaataaactccttacttaaatttctttatttctatccagaggaccacaattttcctaataatataggctgaaaatctcaacagctgactctttccatttcc

SEQ ID NO: 687167 - DNA, 670 bp, Homo sapiens
tgttataaaattttaaataaattaatcacaaattagttatcatgagtcacagctgtattataataacacttcacatcttaaaaaatatttcataggacaaataatggctcaccattgttgttatctacatatttatggcaaaaagtgtgtcttaagttcttaaattaagagttaatctcatactttcaaatgtatttatattctcacagttcttttggaaagataaaagacaattatgacgtttttattttatacctagaaaatcaagtttaactgattctgacttagttaagaaaagtaaaactaagaattttttttttacaaacaaaactaaaccaaaaccaacgatctgaacataaaaagcattttaaactataataactggataatcccgtaaaaaaggcactggcatacagtgatcctttgtttacttggactgatctccccaaactatcataaaatgagctctggccctaattcaaattatctactattttatgcatcaattcaaacaagtatcaacttttaccagactttcagattttcagataggccttaactagggaagaatcagagtatattacttgattctgaagagagtgtgtgtgtgtgtgtgtgtgtgtgtgtgtgtgcgygtgtgtgtgtgtgtgtgtatatatatatctcctat

SEQ ID NO: 687168 - DNA, 1110 bp, Homo sapiens
catggcaaagtctgtctctactaaacatacaaaaattagccagacatggtggcaggcttctgtaatcccagctactccagggaggctaaggcacgagaatcacttgaacctgcgaggcaaaggttgcagcgagccgagatcaccccactacactccagccagggggacagagcgagactctgtctcaaaaaaaaaaatactgatagttattcatttcagtgatgaataaactattctaaaaatgtagtgcttttaattagcatagctctttattgaactcatacattttaagctgtgtgttttattacagccagccttttagcattttttactgcaaatataacatgtttcaggacatgtaattggaagaatctatcacaatatcaacaaagtaatatcttgtctattcacatttttttacacttatggatagttaatgaacattacagtttggtactaaataccaagatatgattaataacctccttatagtttgtgattaaatctaaaccatkgcacaacacttaacactaagtgattaattcattcagcaactatagactgtttattatggtcaaagagctctgctcaatggtgaagggatataaaaatgaatgataagatctttgcctttgtgagcttgtaaaatagctgaggagacagaaaagatttataaattgtcataatgcaaggcataacatgataaattccaaagagaattataaacaactctgtagagcagcgaggagaatggagttattaatttccactacagatacagagaaagcttcataaaagtgtcatttagacttaaaagctaagttgggcctgggtgtggtggctcacgcctgtaatcccagcaccttgggaggctgaggtgggcagatcacctgaggtcaggagtctgagaccagcctggccaacatggtgaaaccctgtctctactaaaaatacaaaaatcagctgggtgtggtcgcatgtgcctgtaatcccagctactctggaggctgaggcaggagattcggcttgaacccgggaggaggaggttgcagtgagccgagatcacacaactgccctccagcctgggtgacagagtgagactctgtctca

SEQ ID NO: 687169 - DNA, 1110 bp, Homo sapiens
catggcaaagtctgtctctactaaacatacaaaaattagccagacatggtggcaggcttctgtaatcccagctactccagggaggctaaggcacgagaatcacttgaacctgcgaggcaaaggttgcagcgagccgagatcaccccactacactccagccagggggacagagcgagactctgtctcaaaaaaaaaaatactgatagttattcatttcagtgatgaataaactattctaaaaatgtagtgcttttaattagcatagctctttattgaactcatacattttaagctgtgtgttttattacagccagccttttagcattttttactgcaaatataacatgtttcaggacatgtaattggaagaatctatcacaatatcaacaaagtaatatcttgtctattcacatttttttacacttatggatagttaatgaacattacagtttggtactaaataccaagatatgattaataacctccttatagtttgtgattaaatctaaaccatggcacaacacttaacactaagtgattaattcattcagcaactatagactgtttattatggtcaaagagctctgctcaatggtgaagggatataaaaatgaatgataagatctttgcctttgtgagcttgtaaaatagctgaggagacagaaaagatttataaattgtcataatgcaaggcataacatrataaattccaaagagaattataaacaactctgtagagcagcgaggagaatggagttattaatttccactacagatacagagaaagcttcataaaagtgtcatttagacttaaaagctaagttgggcctgggtgtggtggctcacgcctgtaatcccagcaccttgggaggctgaggtgggcagatcacctgaggtcaggagtctgagaccagcctggccaacatggtgaaaccctgtctctactaaaaatacaaaaatcagctgggtgtggtcgcatgtgcctgtaatcccagctactctggaggctgaggcaggagattcggcttgaacccgggaggaggaggttgcagtgagccgagatcacacaactgccctccagcctgggtgacagagtgagactctgtctca

SEQ ID NO: 687170 - DNA, 601 bp, Homo sapiens
tgtgctttaagttactaatattttaatgagttactcctctgcagatgggggcatttgaagtcaagaaaatagggataccggaggaatatctgctagagcacagtagtgaactggatgaagctctccaaagatgctgtatttggcaagcacagtgtttcaaaaagattttagccagttttttaaacttgaaacttttacataaaattccaggtttctggcttattttgagaaatgagatctgtctacactgartccacattcttgcatgtcagcaatgagcgggagctttccctttcatacagagcctgtactcttcagttacccaactctccctaccacattctgttgcttctactcagcgcttttcactcatttactcttattcaaaatagggatcttgtcttatcttcatagacatttatttgagtttgcaacttctgtggtagctactggctagttctttctaattttgctggtggcagctagtgagggttggttaaagtaatcaaatctcgataatttggttctttctattaatcaagtttctctctcatgttgttattatgggtagcttattgttgttttttaaactcgaaacttt

SEQ ID NO: 687171 - DNA, 632 bp, Homo sapiens
cccagcagagaatcaagacacattagcactgattcaaacacacatgaacctcactgtcttagaaacagagcatttcaaagcctctcaactcaccttgatcacaatttcatccccagaagatttaggaagtaacaaaggcaacagccttttcaggattaattctgatccaccaggaagaaattactgggaatctgaaatgacagaaaccayagacagaagagacaggatattagaagaaagtgaacatgtcatcttagacttcagagcagcccagaaagagaatagtagagagacatgtgtcaaagactttagaaagtctaatttccagacatttggagaaaaggtagctacaatccagtaaccagagtctctacaggggaagatatttcaagaacgaagcgtagcagtttctggagacaaggttctgtctacacaattgcaaaatatttcactgggggagaaaggagaaagaaatcttaaaaagataataacaatttcagctgcactagcacctctctggctccagcaagaaagcagacatcctagctcttaccatctcctacatcaacgaaaattagctttgccttgaaatcctgttttagtcacagcacttcccagctctaaaatgttca

SEQ ID NO: 687172 - DNA, 684 bp, Homo sapiens
ggatgtaagacagggtgtcaaaggagattatttcagaggtttaagatttaaagactgccctgctggattttggacttgcatggggcctgtagcacttttattttggccaatttctccccttggaatggaagcatttaccaaatgcttgtacccccattgtatcttgatagtaactgacttgtttttgattttacaggtttgttagggggaagggacttgtattgactcagatgagactttagactgggactttgagttaatgctggaatgagttaaaactttggaggactgttgggaaggcatgacggtgttttgaaatgtgagataactcttgcttatttcttacacatacccctatrtaaactctgagcattggagacaggtagaatgaatgaagaacaggaaggttactagagtaactaaatcagaacaaactagagccagaagggggagaaagaagccttgtccagaatttaaaggaggaaaaaaaatataatttgaggaagaaaagtgataattttaagttacaactcatgcagtcagttttaaggaaaaggaagaaggatgtcaactgggttcctcaaatgaaataaagtattgctgccatataaactagaaaatgcttcagaagtctagaaagtataaagcagtgtcataattacttaaaaacactgtcaagataat

SEQ ID NO: 687173 - DNA, 3138 bp, Homo sapiens
tttagtcaacagtctttactcagatcttgtttaattcacttgattggcaattgttttctctgctattgtctggataatcccaaatacccagacagggattgtcaaacacattcattgttctttctcttccttgctgtgctactgcacttgctctgtgttaatgtgacattactgttagaaagttttcaatttgtctgtcactaaaagtttcactgcatttttctgtggcagtttaatcacatgccctgggatgccttgtcacttacttgcaatcacagagctaaagtgattttggcatttctcacctgtaagtttaccaaaatacactgcagccatttttgcattaaatatgatatttatttgtcctttaactttaagtaaatagtaaagtgatcactactttatttctatttctaaagcttaactactcccattagctaccaaagtccttgcttcctgactcctgtttcctggaagatattttgctaaaatgtgacatttttggaaaccaaaaatagcctattcgcccaaatagaatgatttctggtgttgttattaggaaaaatagagaagtagacatttagcctcaaagagtttaacatggaaatttaacgtttatttacaattacctccaatttcctaacaatcagaccacttcaagagaaacaacaacaacagcagaatcacatggaaatcatcatacatttttgaagtatggtgaaatgggatgcttctgaaagggtcaaaattcaaaatggctattttacacattttaatacatccttttacacaatgaagaaatcaatacacctaccatgtgtaggtctccagcctgtctctcattccatgggataacgttaatttctgctcctatgatattagtataactaccttgtggcacaatgtgaagacaagacaaacatgcacaaagtcatgcaatgattatctcatctctgcttggaggttgttttatcctttatggtgatgagcaaatacaggcagaatgaataaacgttagaacacattttccttggtaaaatataaaatagcttatcaggttttagaatactaaccagccataattttaattttatttaaaatgtaataaaatattacatataatggaaataaaataaaatctattttaatgaaaatacataatagaatattattcagcctttaaaaagaaggaaatactgccatatatgaaaacaaagatttacctggagaccttcatggtaagcaaaataaacaaatacagaatgacaaatcctgcatgatctcatatgcagaatctgaaaaagctgaacacatagaaatagggagtagaaaggtggttaccagaggttgggcagtgaagaaaatggggaaattttggtcaaaatgtacaaatttctagttaaaatatgaataagttctaaagattgaatgtacagcattgtgactacagtaataataatatactgtatgattgatatttgctaacagaatagttcttattctcacctcacatacacacacaaaccatgtgaggtcatagatacattaattagctttattgtggtaataatttcactatatataaatatatattaaagcatcacattgtgcaccttgaatatatgcaattatttgtacaatttatggttcctcaataaagctgaaaaaaatataaatagtactgtttgtgtggatagatcccattctaaatcatactttagtctgagttcaagggaagcagcaagaaagggaatatcaaatgcttcatatatgctaggcaagtgaaatgagaagaaaatggattagataatagtcatcttaaagtaaagtaattaaagggaattcctttcaatataagctatacttagctatccataaaactgggctgcataaacagggatggaagggcatgatgtgaacttttcaagccactcattgagtcatctctcatgactcatggaagttccctaaaaatatatattttccatgaattgcttaggcttttagaaatcattgagctttatgaaactttattaaaaatttctgatctttcataagtagtcctagggcaatgagtctctgttaagatagatcttgaccctttacccttgagaactcactggtcaatgtggtagccactagccatgaggctaataaaagctcttgaaatgtgagtagttcagattagaatatgctgtaaatgcaaaatacatgctggattttgaaagttaatttgaaaaaaagtaaaatacattttgaatgagttttatattgcttatgcattggtaacagtttgcatatattggatatttattattaaaattaatttcaactgtttcatctcacactttaagtgcagctactagataggataataaaaaattacctatgtggcttctatttgttgctcacattatatttattttgcagtgatgatctagatttttactgtttctgaaaaaattttaacttgtttcaaaattgcttaataatacttaagttcttagttaattaatgagatatgtttatcttcaatatttctagtgagaattgagatggaaggacatacacatatctaatgtgatttgaaattaggagaatatataatgcaatgtatttgatggtgcagtgcttttaatttactatttgagctgtcaaataactgaaatatggagaataacaaaggagttactgtttaaaagggaaagaggcagaaaaatgtttcccctgggtactctttggaaatacgaataacctttgcattcacttaccacatctgtggcttagctagagataatgttttatatgtattagaaggagatacagttaggctctcaaaaggaagattaaaaataagtcactagcattctcaattacattataaaggacaaatctttgttagttgttgaatgaaatagccagtttataaaaactgagtaataagaaaagaccttgcataaggaaaaaacaaaacaaaacaayaaaacagttggtttcctaggaagcaatttgcataggtattccgcaaagttaagagttagtattgaatcttgcattgttaagtagttttgctcaggaattttatcgacataattatgatgtatttttccattagaaaaccaattttcacttaagtgg

SEQ ID NO: 687174 - DNA, 1381 bp, Homo sapiens
aggatatatttatttaaataaaatatactatagtgatagtatttatagcatctgtttctttgtactttttgaatatgactaattgtaaatttaaaattacatatgtagcccacaatatatttctatcaaagagccttgccccagatcatggttcataaatctgaccctaacccccgtaacacctatggtataaccacctatccccaattccatactgatgacagagtttttccttagtaacttgaaggtataaagagataaataatattgtgtgtccctaaatgctgattctgtttatatgaaattttggaatcgagagtgttccagagttagtgaaaaagttcaagatactttaccaagttacatttcagtatcagatayaacatttatattttatataacaaaaattaaatatagcaatattttagtacaaatgtgtatcttgcaatataatatgtctcatgcaatatttcaattcatttagaacatacttgtactaaaaaaatttgttgtttatctgaaatttgaatgtaactgggagccctgtattttatgtgacatctctagaaattgggtatgattcagagtagggaaaaaatatcattttcaataagtgatagaaaattaaaaatcagtatgggaaaaaaagaaccttgataaatgttgcaaactatactataaaaaatggttctaaaatgtgcagatctcaatgtgggaagtaaaataggaaaatatttagttgataaaatagttgattatcttcatgactttatggtagggaaagtcttgttaactttgttaataaagcattaacccaaaaggaaaagattgatcagctagatttcaataacgaacttctatttattttttaaaagggattttaactttttatttttattttttatctttttcaacttctttaagctcaggggtacatgtgcagtctgttgcacaggtaaacttgtgtcatggttgtttgttgtacagattattttatcactcagatacttaaactagtacccattagttacttttcctgatcctctccctcctactaccatccatcctctgatagaccccagtgtgtgttgttgccttctatgtgtccatgtgttttaatcatttagggcccacttataagtaagaacatgcagtatttggttttctgtccctgtgttagttttctaaggataatggtctccagctccatgcacgtccctgaaaaggacatgatctcattctttcttatggctgtgtagtattccatggtgttttgtaccacctttttgttatgaagtctatcatggatgggcatttatgttgattccctgtctttgctattgtgaatagtgctataatgaacatatgcatgcatgtctct

SEQ ID NO: 687175 - DNA, 1381 bp, Homo sapiens
aggatatatttatttaaataaaatatactatagtgatagtatttatagcatctgtttctttgtactttttgaatatgactaattgtaaatttaaaattacatatgtagcccacaatatatttctatcaaagagccttgccccagatcatggttcataaatctgaccctaacccccgtaacacctatggtataaccacctatccccaattccatactgatgacagagtttttccttagtaacttgaaggtataaagagataaataatattgtgtgtccctaaatgctgattctgtttatatgaaattttggaatcgagagtgttccagagttagtgaaaaagttcaagatactttaccaagttacatttcagtatcagatataacatttatattttatataacaaaaattaaatatagcaatattttagtacaaatgtgtatcttgcaatataatatgtctcatgcaatatttcaattcatttagaacatacttgtactaaaaaaatttgttgtttatctgaaatttgaatgtaactgggagccytgtattttatgtgacatctctagaaattgggtatgattcagagtagggaaaaaatatcattttcaataagtgatagaaaattaaaaatcagtatgggaaaaaaagaaccttgataaatgttgcaaactatactataaaaaatggttctaaaatgtgcagatctcaatgtgggaagtaaaataggaaaatatttagttgataaaatagttgattatcttcatgactttatggtagggaaagtcttgttaactttgttaataaagcattaacccaaaaggaaaagattgatcagctagatttcaataacgaacttctatttattttttaaaagggattttaactttttatttttattttttatctttttcaacttctttaagctcaggggtacatgtgcagtctgttgcacaggtaaacttgtgtcatggttgtttgttgtacagattattttatcactcagatacttaaactagtacccattagttacttttcctgatcctctccctcctactaccatccatcctctgatagaccccagtgtgtgttgttgccttctatgtgtccatgtgttttaatcatttagggcccacttataagtaagaacatgcagtatttggttttctgtccctgtgttagttttctaaggataatggtctccagctccatgcacgtccctgaaaaggacatgatctcattctttcttatggctgtgtagtattccatggtgttttgtaccacctttttgttatgaagtctatcatggatgggcatttatgttgattccctgtctttgctattgtgaatagtgctataatgaacatatgcatgcatgtctct

SEQ ID NO: 687176 - DNA, 635 bp, Homo sapiens
ttaaataatttgtacctagaacactgggacatagctagtgcttgataaatatccactgaaggaatgaaaaagataacaagggaggcaagaacacttcacccaaaatatgtaacagacaaaaagtgggaattgaaactttcaagcatgagaaagatggagagaaatggtataatatctatgcaataattgtgttattgtaggtaaatacaggaggtagcaagtgaagggtggaagaatcacaaaaaaaaaagatgaagattttggcttaaaaaaaaacacaaaaggaaaaaatattctctgagtacctctcactagcaaaacatcwaaggtaaacctaaacccaatacaaacaaaaatgaacaaaaaggtaaaatgttaaatcaacacaatgagatgaaaagacatatgctgatctaagaaaacaaataagtatcaaacaatacaataaaagatgtgagaagtacattagaaacaatatgcatcagaaatgatagagcaaaataatcaaaattctggaatgaaataaagacttgagatggtcactgtgcatacaccagaatatttttttcaccagagcaattcatcaggaaaagagatacagcaccttgccataaaatttgaaaagtaatggcgca

SEQ ID NO: 687177 - DNA, 2032 bp, Homo sapiens
ggccggctgctctgagtgcggggccctccaagcccatgcccacccggaactccagctggcccgcaagcgccgcgcgcagccccggttcccgctcgcgcctctccctccacacctctctgcaagctgagggagccggctctggccttggcctgcccagaaaggggctcccacagtgcagcggtgggctgaagggctcctcaagtgccgccaaagtgggagcataggcagaggaggcgcggagagtgagcsagggctgtgaggactgccagcacgctgtcacctctcagtaggatcactgaactggtattggaaatatggtggtgatttcagataacagtgtctatgtctgttttccccaaagtttggttctacgcaaaatcagagaaccttcacctttgtgggcaaaacttttcattcttccagtacataggttggaaacatggaacagcaacaggaactaagagggcctgccagacactgtttttgaccaaaattgtgagaccctgactcactacaaataatctggctttatatattttcccttatcttggtcatactggatgtctcctagtactctttagagcagaacatcaggacttcatcagaccttgtagactgaactgctcaacttacaggaaattacgttataatgatctcaaaatgataaaagaatatttgatgaaactcaacacttatttctgattttaaaaattttattaaaattggaatagatggatactttcttaacccattaaaaagaaattccgataaaaatgcatcattatgcttaggatttggaacattcctattagcaatgtccactgtcatcacaattgtttcatatttgagattctggaatttggaattgtcaaccagtatcatctgaaaaatgaaagccatgtactaatattgaaaagaaggacaacttactctttgaaaatatggttgtataataaatatacaagaaaattactaaaagtaaatttcagcatgatgctttcttatgttcaagcaataccctataaagggtctatttgtaatagcaataaaatatattagataggaatttataatagcaagtaatatataaaatagcttggaataagcctaagcatttgtataggaccctttatgaagacaactgtaattaaatgtgatctcaatcaatactgataacactaatatgacaaaatagttctgaagtgtagtgagataaatatgtgagaacagttaaaaaaaattccaaggggaaaaatatttatggattgggtaaaggaactagcccgtcatctcaaatattgaaatgttttatgaaaaccacagttgttaaaatagtttagtactgacactgaactagatcagtgaaattgaatggagattcagtaaaaaacccaaatatataagtgtacttagtatatgttaaagtttgtttttcaaatcagtgagagaaaagatggattattctacagcatgtcaggataactggctagtagtttggataaagataaagccaatcactgctgcacttttatacaagaataaaattgtgaatggaccaaatacacaaatattaaaaaaaaaaaactagagaaataaagaaaacaatagtgaattttcagtgattttgggatagggaggacctttctaaatgtgacacaagtttcaaaagccaaatatgtatatatacttgactacataaaaattaaaatgctaaaggttaactaaatgactgaaattgtttagtttctttagctaaaaaacatgctgtggggtaagggagtggatatttgctacatatttgataaaagacaaatgtccttgaaaatccaaaggttttttttttataaattaataaaagataagcccttaaaaaatatgtaaagttatacaagaaacaattcataacacacataaaaatggccaggatacatgcaaggatgttcactcttctttatgaatgaagaaattcaaattaaagcaagatactattttatattcataagactggcaaagatttaaaatttacttatca

SEQ ID NO: 687178 - DNA, 1066 bp, Homo sapiens
  misc_feature 962, 963, 964, 965, 966, 967, 968, 969, 970, 971, 972, 973,974, 975, 976, 977, 978, 979, 980, 981, 982, 983, 984, 985,986, 987, 988, 989, 990, 991, 992, 993, 994, 995, 996, 997,998, 999, 1000, 1001, 1002, 1003, 1004, 1005, 1006: n = A,T,C or G
  misc_feature 1007, 1008, 1009, 1010, 1011, 1012, 1013, 1014, 1015, 1016,1017, 1018, 1019, 1020, 1021, 1022, 1023, 1024, 1025, 1026,1027, 1028, 1029, 1030, 1031, 1032, 1033, 1034, 1035, 1036,1037, 1038, 1039, 1040, 1041, 1042, 1043, 1044, 1045: n = A,T,C or G
  misc_feature 1046, 1047, 1048, 1049, 1050, 1051, 1052, 1053, 1054, 1055,1056, 1057, 1058, 1059, 1060, 1061: n = A,T,C or G
ttttctggccgtattttcccctttattggagtgtgtctgtgtttctcttctctgtcacacatatacacccttccctgaaacgtggaaaagcaaagtgattgatttttatttccttaaaggagattttatatctgaggagatttattcattatcttaggaggggcagcaggtgtgttttcagggagccaagtgttaatctaataattgtaataatgtttgctactgcaacccagaggtacctatgcatcaatcctaggcagttaagcttccttggaagcctggcttttaaattttatttttgagaagattaggttcaagtctttttcattctttgaggattctatatcgggttatattttcattatctgatttctgctcagacaaagactgacttttgagatttttgctaagcttggactgaagaggtaggttagttcatytaatagatatatattaatactaaatacctactatgtgctagccatctttttgggtgctatagcaatgagcaagactgggtcctcgttatgattgggactaaaaaggtcttagttatggttggatttattgtgtagttagagaaatagacattaagtaaatacagaaatattggacaacaatgtgtttagaaaaaagcaaagcagcaggatagtttgataaagaatgactaggcttggtagtgatacagtagattaaatttgctagttgaaaaagagatggtgacatttggcattcatacatcaaaacaaaaatcttatattaccttgtctgacatggctgccaaaggaaatcgctttttgtacctttcagagatctatcccctttgaaccttctaaagttctctctgaacctgccaaaaattttcatggaaagcacatctcttgggtgcctcctgttggcgttttgagtatttttctctttgttccctctctcgcgctgtattttttttttgttttgtttgnnnnnnnnnnnnnnnnnnnnnnnnnnnnnnnnnnnnnnnnnnnnnnnnnnnnnnnnnnnnnnnnnnnnnnnnnnnnnnnnnnnnnnnnnnnnnnnnnnnntgctc

SEQ ID NO: 687179 - DNA, 1229 bp, Homo sapiens
ccaaagcacagaattcttggctgacttcccttctgtctgagtttctttttaaatccattttgctatttccctcagttccagttctgtccacctccaggttgatatgtttttcctgtttcactggtcacagcatcattcaaatgtatgctagcttgggaatcaaaggtccttcataccctatttcttcattttcctttctttcaagtagaactttaaccattatttaatyttaaagccaagggccactgcaagtatcctgctcagagtaccaactgcagcaattataaaaggtcagaccactgaaaatactcctgagactccacaaggtttacttatatcagcctttaataaagaaaaagaatataatacaggaggagctagaaagcacaaacaacagacagaatggagatttctaggcacaattctagactcttttctcagtcacatagcacaggcttcatctgtggatcatgaaccaccaagatatatgtgagaaatcatgatttgacagagccaatgctcaagtttactggatgggtcttttatattccactggtcatagaattaaaatgagactgagaaaccaggtgagctggatgcaaaccattaatctatacatttttaataaacagagtagacaaactggtacaagatacttccaggcaagtgtagaactttaaacaacatattataaatcactagctaatatatttattttatatcttgatttaaggtcagaatcagagtatccctggagacaaaaatagaactatcacagagcagcacaaattaaccctatcactagacaatgattaaaaaaaacaaagaataaaaacagcagaaaggaacagtaaaacacaagcatatttgaaaataaatacaatatgtagagtgatagatgaagtctttgtaattaaaaactacagattaggaattactgaaaaaatagagaaatggaaaataaagatatgaaaaatactcagaaatcagtgtagaaacataagaaaaatgaaaaatgaagttaaaagtcatgaaagatacaaacttggaatatatgctcttaaaattaataaaagttacaatagagacagtaatacaaaaaggatatttgaaataactttctatgacagtttacagctatatattataatattcaataagtgaaattaacttaaacaatataaataaaaataatatgacattttaaacataacaagaaaattgcacaa

SEQ ID NO: 687180 - DNA, 2170 bp, Homo sapiens
  misc_feature 976, 1621, 1839, 1840, 1841, 1842, 1843, 1844, 1845, 1846,1847, 1848, 1849, 1850, 1851, 1852, 1853, 1854, 1855, 1856,1857, 1858, 1859, 1860, 1861, 1862, 1863, 1864, 1865, 1866,1867, 1868, 1869, 1870, 1871, 1872, 1873, 1874, 1875: n = A,T,C or G
  misc_feature 1876, 1877, 1878, 1879, 1880, 1881, 1882, 1883, 1884, 1885,1886, 1887, 1888, 1889, 1890, 1891, 1892, 1893, 1894, 1895,1896, 1897, 1898, 1899, 1900, 1901, 1902, 1903, 1904, 1905,1906, 1907, 1908, 1909, 1910, 1911, 1912, 1913, 1914: n = A,T,C or G
  misc_feature 1915, 1916, 1917, 1918, 1919, 1920, 1921, 1922, 1923, 1924,1925, 1926, 1927, 1928, 1929, 1930, 1931, 1932, 1933, 1934,1935, 1936, 1937, 1938: n = A,T,C or G
tgccaatagatcagcagttaaccagaagcttgagttgagtatggacctgacatatggatagacatattgacatcttatgctagtgttctggccctccctgccccgacagtgatagaagcatccatcaacgcccatcctgacatcagcataaagcacaggttggagagattgtagataaaggcagagaggctattataatgcttctcacctccagttccccagatggaagacaaggaggccctggaacaaaggaatggcatttgggacaaagtgatgttggcaagtaagaaatgcagcagtggtccaacccacaggagatgccagacaattgctcatggcatgagatagggtcatgaggaaaagctgaagaactgaaaatctttcttcttccctccctaggcattcatgctcccacctcatctacatcccacagatcctccattttctctaggtatgagatttatttccaagctagactgaaagctggaagaagatgggacacatgtctgcttcattttctatttccccagcatgtaggtgcagcacccagcccctagttgtttatcaattataggtcttgatggtcatgtccccagcctcccgcctcaggagtaggcttcacatgtctccctttcagaaacaaagccacgtaagactccaaaaccccgccttcccttgggctccacacaatcagcatacatctttccttatctgttttgtgctctgaaaatcggtactacctccaaatgatacatctttaaagtgagtcacccctcctcacaatctactccaaaatttccaacaaggtttcttcttttcattcttcctcccaccagcctatcctattcccttctctccccccacaaaatctagctcttctttaaatacatttaaacattttcgctaggacatttcatctatacaggagatgctatattctaactatttcttagtaaacatttgaaggagtttcttnctttattcagtatggaaccctgctcatatccttttggtcttctatgccttctttcaggcctttgtgaaatttttttccatgcctgaaagccggtggggttttacacagggactgcgatggctaaatccaaggcagagtgggatctttatctattaaccatttgataactcaagtttatcccttgatgaatgaataagttatcatttgcctttgggtcccattcttgagtggtcatggagagttctgtagctcaccctctttatactcataatttgcacaaatttcacctaagagtatttacttaaccactttaattcaatttgtctctacctaagacatttaattcaacaaatattttttaagcttctctataaaagggactctggcaactttcagaccygcactgtagcaccagctctctgctggcccaccccttgcagactttgggcttgcctgccttcaaaatcatgtgagtcaattccttaaaataaatatatttttatttatttatatatatgttggcacacacacgcgaatcttattttttctgtttctctggagaattctgactaatgcaccccatccacatccaggctttgaggagaaagatccaatctagcagcagaggccctctgaatgaacaangattggttgcaaagctgacaaaagtcctttgcaaaaggaagaaggaaaccctgggggtgattaagacggggttataactggggaaaaaaaacccctggggaacaaaagaggggaggggccccctttgaatgttattgaacctttaaaaactggtcgccctttaaaaacctaaaaaaaggccttggttaagggcttaaaaggggaatttccccccctgnnnnnnnnnnnnnnnnnnnnnnnnnnnnnnnnnnnnnnnnnnnnnnnnnnnnnnnnnnnnnnnnnnnnnnnnnnnnnnnnnnnnnnnnnnnnnnnnnnnncccctgtttttttagcaaggcaggctctgcagaggctcttgacctccaagcccctgcacagcttcatgaggcagtgctatttccggcttggttgttatgtatttcgtacaacaccaagctcaatccacttagcttcctcatccataataacggcccacttcaggaactaataactaatcttggaaaaatcaatcttatcctggagtgaaatacaaccttaaatatatgcctg

SEQ ID NO: 687181 - DNA, 2170 bp, Homo sapiens
  misc_feature 976, 1621, 1839, 1840, 1841, 1842, 1843, 1844, 1845, 1846,1847, 1848, 1849, 1850, 1851, 1852, 1853, 1854, 1855, 1856,1857, 1858, 1859, 1860, 1861, 1862, 1863, 1864, 1865, 1866,1867, 1868, 1869, 1870, 1871, 1872, 1873, 1874, 1875: n = A,T,C or G
  misc_feature 1876, 1877, 1878, 1879, 1880, 1881, 1882, 1883, 1884, 1885,1886, 1887, 1888, 1889, 1890, 1891, 1892, 1893, 1894, 1895,1896, 1897, 1898, 1899, 1900, 1901, 1902, 1903, 1904, 1905,1906, 1907, 1908, 1909, 1910, 1911, 1912, 1913, 1914: n = A,T,C or G
  misc_feature 1915, 1916, 1917, 1918, 1919, 1920, 1921, 1922, 1923, 1924,1925, 1926, 1927, 1928, 1929, 1930, 1931, 1932, 1933, 1934,1935, 1936, 1937, 1938: n = A,T,C or G
tgccaatagatcagcagttaaccagaagcttgagttgagtatggacctgacatatggatagacatattgacatcttatgctagtgttctggccctccctgccccgacagtgatagaagcatccatcaacgcccatcctgacatcagcataaagcacaggttggagagattgtagataaaggcagagaggctattataatgcttctcacctccagttccccagatggaagacaaggaggccctggaacaaaggaatggcatttgggacaaagtgatgttggcaagtaagaaatgcagcagtggtccaacccacaggagatgccagacaattgctcatggcatgagatagggtcatgaggaaaagctgaagaactgaaaatctttcttcttccctccctaggcattcatgctcccacctcatctacatcccacagatcctccattttctctaggtatgagatttatttccaagctagactgaaagctggaagaagatgggacacatgtctgcttcattttctatttccccagcatgtaggtgcagcacccagcccctagttgtttatcaattataggtcttgatggtcatgtccccagcctcccgcctcaggagtaggcttcacatgtctccctttcagaaacaaagccacgtaagactccaaaaccccgccttcccttgggctccacacaatcagcatacatctttccttatctgttttgtgctctgaaaatcggtactacctccaaatgatacatctttaaagtgagtcacccctcctcacaatctactccaaaatttccaacaaggtttcttcttttcattcttcctcccaccagcctatcctattcccttctctccccccacaaaatctagctcttctttaaatacatttaaacattttcgctaggacatttcatctatacaggagatgctatattctaactatttcttagtaaacatttgaaggagtttcttnctttattcagtatggaaccctgctcatatccttttggtcttctatgccttctttcaggcctttgtgaaatttttttccatgcctgaaagccggtggggttttacacagggactgcgatggctaaatccaaggcagagtgggatctttatctattaaccatttgataactcaagtttatcccttgatgaatgaataagttatcatttgcctttgggtcccattcttgagtggtcatggagagttctgtagctcaccctctttatactcataatttgcacaaatttcacctaagagtatttacttaaccactttaattcaatttgtctctacctaagacatttaattcaacaaatattttttaagcttctctataaaagggactctggcaactttcagacccgcactgtagcaccagctctctgctggcccaccccttgcagactttgggcttgcctgccttcaaaatcatgtgagtcaattccttaaaataaatatatttttatttatttatatatatgttggcacacacacgcgaatcttattttttctgtttctctggagaattctgactaatgyaccccatccacatccaggctttgaggagaaagatccaatctagcagcagaggccctctgaatgaacaangattggttgcaaagctgacaaaagtcctttgcaaaaggaagaaggaaaccctgggggtgattaagacggggttataactggggaaaaaaaacccctggggaacaaaagaggggaggggccccctttgaatgttattgaacctttaaaaactggtcgccctttaaaaacctaaaaaaaggccttggttaagggcttaaaaggggaatttccccccctgnnnnnnnnnnnnnnnnnnnnnnnnnnnnnnnnnnnnnnnnnnnnnnnnnnnnnnnnnnnnnnnnnnnnnnnnnnnnnnnnnnnnnnnnnnnnnnnnnnnncccctgtttttttagcaaggcaggctctgcagaggctcttgacctccaagcccctgcacagcttcatgaggcagtgctatttccggcttggttgttatgtatttcgtacaacaccaagctcaatccacttagcttcctcatccataataacggcccacttcaggaactaataactaatcttggaaaaatcaatcttatcctggagtgaaatacaaccttaaatatatgcctg

SEQ ID NO: 687182 - DNA, 1544 bp, Homo sapiens
gctgctggcctagtatcaacttcctaatagcactgtactattaagattttcccttaaggcctccccagcttcccatttgcttataagctcttcccttctctgcacccagctcactttttggggatgttggggagagtgagtgtgaataagtcttggagacttcttgtgagtccagtaatacaatatgaagtgtkttgtgtctagttcctagttgtttggtagcagaagggagctttcagtgtatctaaacaggcatattgcagaaaattgggttttacatgtatgtgtctccccttcctagactgtgagctctttgagaaacaaaatatgcctatctccagtacctagcatagtgcctggatagtaatagaccctcaaaaaatatttgttaaaagaatatatgatataataatgctttcctccctcaaaacactaccagagtacccttcgcatattcatagcatatactccttagtctgattgtttttctttgatatttattttctgaatttctacttttatgagagaaattgagggccaatcattggagtttgtttcaggtccaaactacaattccttgtctatcacccagcttcccaccccttggagtagtggttgatggttattactatgaagtttggaggataagtttacttcatgataaagttcagtctgcctaggtacttcagaatccttgggaatgtaattggtttatagattttaaatatctgtattccacacatacatcactgttggtatcctgagtctcctgaagttttctggttcagacactctgatctgtcctgcattccctgtttcccagtaaaataagaaataagaattccctgtaactaagtcctagggattggcagaattccaaggtggtattattgccaggctaatagtgcttaataattaattaggcatattcattagtattattaagtctctccccccagcaccacctgcaatcattatgtgatggcagacagatgtttttcaggtgctcacatggccatcttgtgggtttttctcactcaaatctggcaggctgtgaagatgcctgagatggggagacaggggttgagtgtgggagtggaaagatggttagagcaatgaatgagcacacattttccaaagaagagtcatgtaagccaagcctgttgttaattaacactgagtttgttgagaacgtggtgtccagactgcggcagacagaaggtgcaccccatctgtgactagctccccctagggaggggctggttaagagagaaccactccttccctgggtgccctcccactgcctggtgagcatattccacccccatagggtgggagggtggtgggttccacagtgacatgacacacagttgtctggaagtggggactgtgagcttctgggtgagtcactgttgcatcactcgtacatagacccagggagagcttttctaaactgtgaaactgaagatcttactgcagtaatttggttacattacagcttgctgatcaaaatcaccctgtactgctgaaggtatctggtgtgg

SEQ ID NO: 687183 - DNA, 556 bp, Homo sapiens
gggtctctttcagagagctgcatttcttagtgcttagaagtctctttcttcaagaactgctgctatggtctgaatgtttgtgtctccccaaaattcatatgttcatacctaatccccaatgtgattgtattaaaaggtaaaagtctttgggaggtgattaggtcctaagaacagggcccttatggatgggattagtgccctcataaaagagaccccagagagctccctcaccccttccaccaagtgaagatacagtgagaagtcaccatytatgaaccagaaaacaggccctcaccagacacagaatctgccagaacctcgatattggacttcccagactacaggactgtgagaaataaacttctgttgtttataagccacccagtctaagacattttgttatagcagcctgaattgactaagacaactgcatttttattttccacggatgctgatttcacatgccacagggaagatgtatggcagaatgagctgtggcacaggaaagcttatggcaaaggtcttatgtgatggggatgagagggaagggacagca

SEQ ID NO: 687184 - DNA, 956 bp, Homo sapiens
atgaatggggggtgtgaggagaatgccttctcttccaccctctcaagctccctgtgtgtttggtacagctccccactaatcaggctattgcagctctttcactttttcaggttgaatagcatcatgggcagagaggcagtctgctactatgtctctgtaagcattgatctctgctcaggactgttttaaacttcctgctatcctgaccctcattttggtctaaccctacaaaagagccatgtttccctttatgccagctttgaagctattatcattccattttggaattaaacccaagactataatttcaaggagtaacttttgaattgcctctctccaggctcccttgtttttctccacccctgtatgcacaactggccctgtagttggtcaaatgtatgctgactgttaagagaggcatccctctgagtaactttatcttgggtggaagtggaggctcttcgggtggtgccagtgctagatattcgtcctgggcagctacattccttgtggcttggattagtcaagctgtgtagccagtgtccctgtggacatgggctctctccccgctgacaaggctctccattggctctctccctcatttgggttggttaagccattatctccattagaataaccagcagccatgtttaactcagaggagcaacatgcccctttctgacctcataccggcctgtgctctttaggtgactcagagtgtcataggttgaggttcttagaagtaaagttctakacaaagatttgtgatttaatgacgtagtgtttttcagttcaagaaactatgaggaacagaccaaagccaagagctagggaagggaaaggaggtgagcaaggatgtagtgtcaggataaatctagccttggtctcacctcctgggggcaacagaagaaggatctctagctcaaagggcaatatggagttgtcttgtcttgagg

SEQ ID NO: 687185 - DNA, 640 bp, Homo sapiens
aaccatcaacttcagtaaaacatcctcaaatcctttgaacaaagcaataataggtattttatttttgacctccaaattgtagaaaagttttccatttctttgttattttagatatgtccaataatagcaacaccagtttcaaaaacaagacagaagaaaaagcaaatgagatgcacagaataagaaaggaccttagagctgactttactttcagtttagtaacactggagatgggatgtggttgaggctccccagtctgcctatctatgtgttttaagaagggtgctttctgtrccctccttctttcctggaaagttagctgtgctttgtgaaatagtgtctgaggggcccatggctatgtttagagccattgctttatttgtattttccttttttcagtaactgatgacaggtgcctccatggccatttcagttatttcctccacccagacttggtgaactcctccatatctctctaggccttactcctcgtctgtaggctgagggttgaattgtctttgagtactcttttaagttcaagttctgttgttgaatttacaggcaaaagagcgagcatacaggtaagcacaaaaaaatgggaagttggtgagactcatactaggggcaggagcaaatgaga

SEQ ID NO: 687186 - DNA, 269 bp, Homo sapiens
tggccatatgactgacatctagccattaggatgtgagaaaatgtgatayctgccaatttcaggtttgctcataaaacctcctatatgtgctcctctatgctcttatcctgatccagctgactagcattgagataatcttctaaatcatgtgttaaaaaagtttcagataatatcatcggtgtcctcaaattatcctgccttggacgctgtatgagtgagacacaatagtttgagtcatttttgtgttgaagcccatttgttacagaagg

SEQ ID NO: 687187 - DNA, 662 bp, Homo sapiens
gggcttcaacatgtgaattttgggagtggggagaaacacaatttaatccagacaactaatgttcccttccttattatatgatcattagcatggagagggtgctcattgccatggaacagtagtgctgtgtcctagattttgcttcagtttaaccctctgattcaatttgtcaaacccagactgttcttggcatgcttcacttttatgttcacaagaataaaaacatttttcagaaccccttttttatgttgtttatttctaatgacgccttgttgatctgtacacgttcttttgaattcattgacctatttccttgaactaaatttttactaaatgatcttaactttgttccctctaattaatttcccttctgatgatcatggccctttcaccagcattcatcttttctatatgtttttctaaatttatatttccctattaaaggggttcacttatgattgtctttgacagagttcagttagcagtaaatagtttctgtcataaaagtggagtatgttaacattatattatataggaaaataataacaaagagtgaaaacagtaagaataaagaagaaaccaggctctagttaaaatgataaggacagattttaatcagtagcacactattacaataggaaaakaattcaatgtaaactgaa

SEQ ID NO: 687188 - DNA, 502 bp, Homo sapiens
cgtcagtgcctctcaagccactttagggaggatccatggcagagttttaaggatcttccagggaaaattaatataagagtctgggttttatgaraaaatggaaaaataagacaagcaagaaagaaattaagaaagaaagaggaaaagacagaaataagaagaaagagaaaaaaaataaggagaagaaaaaaaccagaagattattatcccattttacagatgaggaaactgaaactcagatgcccaaagttactaagcaaataagtatcagagctctgtttcaaatccaagataaacaaaattccttcaggagaaaaaactccccccaagaagaatgaattttacagatgtccaaagacgtaaagagacaatcacctgtgtttatgtccttcagctagagagtaaattccaaaattccatgaaaatatatgaggataccccattggatggacattttttaaagtgaaaaggctcaaagccagcaaaatgtgttactgaaact

SEQ ID NO: 687189 - DNA, 1228 bp, Homo sapiens
aggtcatgtccagcatcaggattgtaaggcttggaatgaacagaatgttccatggaattgtctaccttctattcctctgagactgagaacatgaagtaaacagtttgtccttcctccataaagcgttttacaatttccaatagtataatagagtgtaaaagcaatttgggaaaaaaaaaaaacaaaactaatgaaataacccagccctgagagttgtatgacttaacataaaaatgcctttcttttccctgttgtaaacatccaacacaggtgttcttggttgtgacacagccttcttcatggggattcagggacccagactccttacatataactctgtcctctttgggggccttgaaaacctttgcattcagccagtgtttggggaaacagaatggcgggtcagtcatgggaggtttttaagtttctttgtttattttcagctttgtttttgtttttacaaatcaaatatattctgactctgtgcttgaactctccagaaattgagaaattagatctccgtcttgtctggaatttccctgcacttctgtgcaggtacccaaggatcaaggcagtggggatggcagaatgctatctggactgtagaccatcattatgacagctaagattctcattgcttaagcttatgtggggcagtgactcacgcctgtaatccgaacactttgggaggctgaggcgtgcggatcacttgagctcaggagttcaaagccagcctagccaaaaaatgaaagcccatctctccaaaaaatgcaaaaattagctgggtgtgatagtgtgtttctgtagtcccagctacttgggaggctgaggtaggattgcatgagcccaggagttcacggctgcagtgagctaagattgccccactgcactccagcctgggcgacagagtgagactctgtctcaaaacaaaacaaaaagcttatgtggtccatttaaaggtgggtggctttactgctgtcctgtcaaacattggtatggcatctttggagactgttcccaagccacccctctgaatgttcaggacaggtttgtaactgccacgttcttccacttttgttccattggctagaagtcatgcggcccgatcaaaccatagggaagactaggaaatgctgtgcctctctgggcccagaagcagcaaaacaatctctacccaaatcttcctcccgacaaacccaagacctrcacagagtaaatgttatttccc

SEQ ID NO: 687190 - DNA, 641 bp, Homo sapiens
tccccgcctctctttcctaatagcaaaagacccatcctgaatgcaaatattctcacaaagatcttggaagtatggaggaattactctcttagaaaatgtttcttttagaaaaagatggtcggagctgtgacaagatgacatggcaagcagatctccggagggaagagaaagtcccacatctccgggccactgctctgcaggcgaaaacgaggctgtgtgaccgactgagcctgggcagctggacccaccagtgtgggcaagcttctcttctgaagtcagcctgccagtgagcaggcgagaaaggaacacttgtgtacaactcaaaggaatwattaatcaccttggcaattacttcagtctcaaatcagcttcctactgagctccctgacaccgcctctcttaatttcctgggagcagcagttccactttccttcttcaggcggccaccaaccagggaagcaaattaggaatatcttcctatagcccatttgagcagattttattcaaagaaaatgacaatattaataggtaactgatttttcactaatgacaaaagactcccaccaggaacctggtttgtgttcaataatgtaattcaaattttttttttctttttttcatataggtgtttcttccctaga

SEQ ID NO: 687191 - DNA, 641 bp, Homo sapiens
tccccgcctctctttcctaatagcaaaagacccatcctgaatgcaaatattctcacaaagatcttggaagtatggaggaattactctcttagaaaatgtttcttttagaaaaagatggtcggagctgtgacaagatgacatggcaagcagatctccggagggaagagaaagtcccacatctccgggccactgctctgcaggcgaaaacgaggctgtgtgaccgactgagcctgggcagctggacccaccagtgtgggcaagcttctcttctgaagtcagcctgccagtgagcaggcgagaaaggaacacttgtgtacaactcaaaggaataattaatcaccttggcaattacttcagtctcaaatcagcttcctactgagctccctgacaccgcctctcttaatttcctgggagcagcagttccactttccttcttcaggcggccaccaaccagggaagcaaattaggratatcttcctatagcccatttgagcagattttattcaaagaaaatgacaatattaataggtaactgatttttcactaatgacaaaagactcccaccaggaacctggtttgtgttcaataatgtaattcaaattttttttttctttttttcatataggtgtttcttccctaga

SEQ ID NO: 687192 - DNA, 3434 bp, Homo sapiens
cttgattgttattcttatttcctgtaggttaattcccctaattttcagcactgtccacataggacctttgttctctagtttttacaacctcaacgtctactaatatatattaccaactctattctctggtcataggaaacttttgtctttactattgctatgatctgtctaggccctatttcccagcactggtggtttttactggaataactcttcttcttttctgctcctcttatatcaggagaaactcaagttatctgtaaagaatctccaagacagtgtgagcttttgagttgtgactaaatgcttccttacattctccttctctcccacaaaatttattgagcatctattatgttctacacataaagctgggtactgattatattagctagtaaacgttgggacccttattcccaaggagactgcagttatctttccttctcttccttcttccatattgccattgcacttggaccataccagatcaaattgaagctacttatgcccacatctatattcatgtttgattcaactccatagcttccatacctggtacaacattcagtaaagatttgttaagtttttctaaaatcagtcatgtcaagatagacaaggcatgtttcatcttgaattaataataagtaaagtaattcataagcaagataataarcaatgaggttgaaagaattgatggggacaagggttattccagacactcttcccaggcccagcactggctctttgattgaaagaacagtccctgctcacaaaaaagggctccagatgccctggctcaacttcataaactctgctcattccaatcactttgcgttgctgatgactgccttatattattagtgttgactttcaattagtgtcagttttccaaaaataatattttcaggaagcttctattcagattccaaagtggcatgccactgagatgaaaatgttcgaagagattccagccatcctcaaaggacaagctttgataaaagtaaacaagcaaacaatatacatctttcttagtattaaaaaaattaattgtagttatttttcttctcattgggactatgaagctgatgttggtttatttgtttgactctacatgctgattttccaaagtctagatatgatggtgcgaaatgacagtcgcacttagacaaaagaaattttctctaaattggatcaaaaaagaagtctaagcttgttttgattaaagaaacagctgagaattttttttcatttagagtgcctaatcattgttgaaaactcaaggaaaattcaagtgaggatccatatgagtgggaaagagagaagaaaaggtgtgtataatttctatatatacacacacgtatacacacagtatacaaacatgcatatatatatacacatatgtatatgttcatatacatggataaatatgtatctccaagccatggtagaatatgaatgcctttaccaaattgactttaaaaacttattttatgtatttattattattatttttttttttgaggagtttcactcttgtagcccaggctgaagtgcaatggcatgatctcggctcactgcaacctccgcctcctgggttcaagcaattctcctgcctcagcctcccaagtagctggaattacaggcatgcatcactacgcccagctaattttatatttttggtagagacagggtttctccatgttggttaggctggtctcgaactcccgacctcaggtgatccgcccgccttgacctcccaaagtgctgttgattataggcgtgagccaccatgcccagccaattttaaaaacttttaagagaatggaatgaatttaaagctctggataagtcataaggtaactttcttaatacatccaaatacataccttatttttagtcataatattaacttgtaataaaatttgattacacatgagtatgtgtgtgtatgtatacaaaatttgaaattcaaatatcttaaaaattgagatttttatcccctccattatatagattttgtataataaatgttatacaaggccctaaaaaggatgctttatagttatatcatacatattgtttctaagtagtgtatgagactgaattacgaataatagtttatttaaagtgatttccctgaagaacaaatactatcatttacagatatgagcctgtatcagcttaaaagcaggatagggatcgtagttctacccttggccttgacaggctctctgatcttaagcggctcttttagtttctccagtcttccattttctctgcagggtgagatagtcattgcaccgtagtctcttcatcaacttgtgtgaagataaaaatacttgttaacatgcatgaacccttactgcaggctaagcactgtgccacgtacttttatgtctagctttgtcttgccaggatcccctgaaaaatacgtattattatcatacccattttacaatgtagaggatagtgaggtgacacagcaatgacacagcttgaaaagagcagagacaaactttgaaataagatctgttggagtgcagtgtctagactcacaattacaagcccagcctgctttgcaaaggaaaatgcatctgataaaccacttaaaggaattcatattaagcaatgtgcataataagttgtcagcaacccctgtgcccaccatcagctcaatgccaccagaacacagcacacatacacatatgcacacaggtacacattcatgtatttatttaaaagttttttcttttatgggaaaaagagtctccactctagagacatatttggaaccactctcatctgatctgtgatgtctgtagtttgggatgaaattttacccttgctgtagaaagcacaactaaaatttaaaagttaatggagcctgagtattagttactcctgatttcataaatttgcagcatcttataaataagttgactgtgatcctgggctttatttctgaagctaacgattgtctctttgaccagaaacacagagggcagcattcagtgctgtcttttaaggattttaaagagcataatccatgctatttggtgctggataggagtgaagtctacaaggaaattgaactttgcttgctgccccatgtggattctgtgcttccaagccaccagctccagctgttcaaaaaacgacagtttctatgaatgccaagacttataaagtatctccccagagttgtattatctccccctgagcaataagggcagcctttttgagacgtatgtctcctcaattagcttctgtggttctctctgaagagtgtgttcctctagctagaaagaacgattctgcagattacccaataagacagcctcatgagatgtgtgggaggactgaaagagtgtgatgggttggggcatgcttatctttgagcccaaataacagtaacatctctataacaaacattt

SEQ ID NO: 687193 - DNA, 3434 bp, Homo sapiens
cttgattgttattcttatttcctgtaggttaattcccctaattttcagcactgtccacataggacctttgttctctagtttttacaacctcaacgtctactaatatatattaccaactctattctctggtcataggaaacttttgtctttactattgctatgatctgtctaggccctatttcccagcactggtggtttttactggaataactcttcttcttttctgctcctcttatatcaggagaaactcaagttatctgtaaagaatctccaagacagtgtgagcttttgagttgtgactaaatgcttccttacattctccttctctcccacaaaatttattgagcatctattatgttctacacataaagctgggtactgattatattagctagtaaacgttgggacccttattcccaaggagactgcagttatctttccttctcttccttcttccatattgccattgcacttggaccataccagatcaaattgaagctacttatgcccacatctatattcatgtttgattcaactccatagcttccatacctggtacaacattcagtaaagatttgttaagtttttctaaaatcagtcatgtcaagatagacaaggcatgtttcatcttgaattaataataagtaaagtaattcataagcaagataataaacaatraggttgaaagaattgatggggacaagggttattccagacactcttcccaggcccagcactggctctttgattgaaagaacagtccctgctcacaaaaaagggctccagatgccctggctcaacttcataaactctgctcattccaatcactttgcgttgctgatgactgccttatattattagtgttgactttcaattagtgtcagttttccaaaaataatattttcaggaagcttctattcagattccaaagtggcatgccactgagatgaaaatgttcgaagagattccagccatcctcaaaggacaagctttgataaaagtaaacaagcaaacaatatacatctttcttagtattaaaaaaattaattgtagttatttttcttctcattgggactatgaagctgatgttggtttatttgtttgactctacatgctgattttccaaagtctagatatgatggtgcgaaatgacagtcgcacttagacaaaagaaattttctctaaattggatcaaaaaagaagtctaagcttgttttgattaaagaaacagctgagaattttttttcatttagagtgcctaatcattgttgaaaactcaaggaaaattcaagtgaggatccatatgagtgggaaagagagaagaaaaggtgtgtataatttctatatatacacacacgtatacacacagtatacaaacatgcatatatatatacacatatgtatatgttcatatacatggataaatatgtatctccaagccatggtagaatatgaatgcctttaccaaattgactttaaaaacttattttatgtatttattattattatttttttttttgaggagtttcactcttgtagcccaggctgaagtgcaatggcatgatctcggctcactgcaacctccgcctcctgggttcaagcaattctcctgcctcagcctcccaagtagctggaattacaggcatgcatcactacgcccagctaattttatatttttggtagagacagggtttctccatgttggttaggctggtctcgaactcccgacctcaggtgatccgcccgccttgacctcccaaagtgctgttgattataggcgtgagccaccatgcccagccaattttaaaaacttttaagagaatggaatgaatttaaagctctggataagtcataaggtaactttcttaatacatccaaatacataccttatttttagtcataatattaacttgtaataaaatttgattacacatgagtatgtgtgtgtatgtatacaaaatttgaaattcaaatatcttaaaaattgagatttttatcccctccattatatagattttgtataataaatgttatacaaggccctaaaaaggatgctttatagttatatcatacatattgtttctaagtagtgtatgagactgaattacgaataatagtttatttaaagtgatttccctgaagaacaaatactatcatttacagatatgagcctgtatcagcttaaaagcaggatagggatcgtagttctacccttggccttgacaggctctctgatcttaagcggctcttttagtttctccagtcttccattttctctgcagggtgagatagtcattgcaccgtagtctcttcatcaacttgtgtgaagataaaaatacttgttaacatgcatgaacccttactgcaggctaagcactgtgccacgtacttttatgtctagctttgtcttgccaggatcccctgaaaaatacgtattattatcatacccattttacaatgtagaggatagtgaggtgacacagcaatgacacagcttgaaaagagcagagacaaactttgaaataagatctgttggagtgcagtgtctagactcacaattacaagcccagcctgctttgcaaaggaaaatgcatctgataaaccacttaaaggaattcatattaagcaatgtgcataataagttgtcagcaacccctgtgcccaccatcagctcaatgccaccagaacacagcacacatacacatatgcacacaggtacacattcatgtatttatttaaaagttttttcttttatgggaaaaagagtctccactctagagacatatttggaaccactctcatctgatctgtgatgtctgtagtttgggatgaaattttacccttgctgtagaaagcacaactaaaatttaaaagttaatggagcctgagtattagttactcctgatttcataaatttgcagcatcttataaataagttgactgtgatcctgggctttatttctgaagctaacgattgtctctttgaccagaaacacagagggcagcattcagtgctgtcttttaaggattttaaagagcataatccatgctatttggtgctggataggagtgaagtctacaaggaaattgaactttgcttgctgccccatgtggattctgtgcttccaagccaccagctccagctgttcaaaaaacgacagtttctatgaatgccaagacttataaagtatctccccagagttgtattatctccccctgagcaataagggcagcctttttgagacgtatgtctcctcaattagcttctgtggttctctctgaagagtgtgttcctctagctagaaagaacgattctgcagattacccaataagacagcctcatgagatgtgtgggaggactgaaagagtgtgatgggttggggcatgcttatctttgagcccaaataacagtaacatctctataacaaacattt

SEQ ID NO: 687194 - DNA, 3434 bp, Homo sapiens
cttgattgttattcttatttcctgtaggttaattcccctaattttcagcactgtccacataggacctttgttctctagtttttacaacctcaacgtctactaatatatattaccaactctattctctggtcataggaaacttttgtctttactattgctatgatctgtctaggccctatttcccagcactggtggtttttactggaataactcttcttcttttctgctcctcttatatcaggagaaactcaagttatctgtaaagaatctccaagacagtgtgagcttttgagttgtgactaaatgcttccttacattctccttctctcccacaaaatttattgagcatctattatgttctacacataaagctgggtactgattatattagctagtaaacgttgggacccttattcccaaggagactgcagttatctttccttctcttccttcttccatattgccattgcacttggaccataccagatcaaattgaagctacttatgcccacatctatattcatgtttgattcaactccatagcttccatacctggtacaacattcagtaaagatttgttaagtttttctaaaatcagtcatgtcaagatagacaaggcatgtttcatcttgaattaataataagtaaagtaattcataagcaagataataaacaatgaggttgaaagaattgatggggacaagggttattccagacactcttcccaggcccagcactggctctttgattgaaagaacagtccctgctcacaaaaaagggctccagatgccctggctcaacttcataaactctgctcattccaatcactttgcgttgctgatgactgccttatattattagtgttgactttcaattagtgtcagttttccaaaaataatattttcaggaagcttctattcagattccaaagtggcatgccactgagatgaaaatgttcgaagagattccagccatcctcaaaggacaagctttgataaaagtaaacaagcaaacaatatacatctttcttagtattaaaaaaattaattgtagttatttttcttctcattgggactatgaagctgatgttggtttatttgtttgactctacatgctgattttccaaagtctagatatgatggtgcgaaatgacagtcgcacttagacaaaagaaattttctctaaattggatcaaaaaagaagtctaagcttgttttgattaaagaaacagctgagaattttttttcatttagagtgcctaatcattgttgaaaactcaaggaaaattcaagtgaggatccatatgagtgggaaagagagaagaaaaggtgtgtataatttctatatatacacacacgtatacacacagtatacaaacatgcatatatatatacacatatgtatatgttcatatacatggataaatatgtatctccaagccatggtagaatatgaatgcctttaccaaattgactttaaaaacttattttatgtatttattattattatttttttttttgaggagtttcactcttgtagcccaggctgaagtgcaatggcatgatctcggctcactgcaacctccgcctcctgggttcaagcaattctcctgcctcagcctcccaagtagctggaattacaggcatgcatcactacgcccagctaattttatatttttggtagagacagggtttctccatgttggttaggctggtctcgaactcccgacctcaggtgatccgcccgccttgacctcccaaagtgctgttgattataggcgtgagccaccatgcccagccaattttaaaaacttttaagagaatggaatgaatttaaagctctggataagtcataaggtaactttcttaatacatccaaatacataccttatttttagtcataatattaacttgtaataaaatttgattacacatgagtatgtgtgtgtatgtatacaaaatttgaaattcaaatatcttaaaaattgagatttttatcccctccattatatagattttgtataataaatgttatacaaggccctaaaaaggatgctttatagttatatcatacatattgtttctaagtagtgtatgagactgaattacgaataatagtttatttaaagtgatttccctgaagaacaaatactatcatttacagatatgagcctgtatcagcttaaaagcaggatagggatcgtagttctacccttggccttgacaggctctctgatcttaagcggctcttttagtttctccagtcttccattttctctgcagggtgagatagtcattgcaccgtagtctcttcatcaacttgtgtgaagataaaaatacttgttaacatgcatgaacccttactgcaggctaagcactgtgccacgtacttttatgtctagctttgtcttgccaggatcccctgaaaaatacgtattattatcatacccattttacaatgtagaggatagtgaggtgacacagcaatgacacagcttgaaaagagcagagacaaactttgaaataagatctgttggagtgcagtgtctagactcacaattacaagcccagcctgctttgcaaaggaaaatgcatctgataaaccacttaaaggaattcatattaagcaatgtgcataataagttgtcagcaacccctgtgcccaccatcagctcaatgccaccagaacacagcacacatacacatatgcacacaggtacacattcatgtatttatttaaaagttttttcttttatgggaaaaagagtctccactctagagacatatttggaaccactctcatctgatctgtgatgtctgtagtttgggatgaaattttacccttgctgtagaaagcacaactaaaatttaaaagttaatggagcctgagtattagttactcctgatttcataaatttgcagcatcttataaataagttgactgtgatcctgggctttatttctgaagctaacgattgtctctttgaccagaaacacagagggcagcattcagtgctgtcttttaaggattttaaagagcataatccatgctatttggtgctggataggagtgaagtctacaaggaaattgaactttgcttgctgccccatgtggattctgtgcttccaagccaccagctccagctgttcaaaaaacgacagtttctatgaatgccaagacttataaagtatctccccagagttgtattatctccccctgagcaataagggcagcctttttgagacgtatgtctcctcaattagcttctgtggttctctctgaagagtgtgttcctctagctagaaagaacgattctgcagattacccaataagacagcctcatgagatktgtgggaggactgaaagagtgtgatgggttggggcatgcttatctttgagcccaaataacagtaacatctctataacaaacattt

SEQ ID NO: 687195 - DNA, 629 bp, Homo sapiens
gttccttagcgttttaataactattattttttataacaactaaagacatattaggtattgtcacacccattttataaaatatacacacatatatatatgtatttacacccatacgtctgtgtgtatactacatctctctctctctacctatygaatgaacgattgattgatctaacatcaatgaaattctaagccctgagtatattaatagcagaagcaaaatgaaaactcacgtctatcattttgagactatgttgcagaatgaatatcaactcatctaattctcattattagagaaaaacagtgcaaggggattagagagttagtgttactagcaatgtcaggttgcatgtcagatgtattgattttcagtccattttttgtttcttttactgacagaagaatccttcttgaaagtaagtaacttcatgaacaccaagctagtgccttgagaagcttatttactcttcctgacctgattagaacagtagtatctgagtgagaacatagtttaaatgcagcaattcttgcctatcccactctcctgagtcatctcccatctgtggtttctgggcccatctctggaaaataacgttcaatacataaatagaccctgaatggatggggag

SEQ ID NO: 687196 - DNA, 636 bp, Homo sapiens
tcagaattctggatatactatatctctgcctgggcttgtgtcttccctccacactggtccgggaagcatctgctttctcagcactctcctagctggctcccgtggcaatttctactcaaagccttgttacagcaatggtcggactgaaggaggtgcttttctgcaatactcttactatgtccaaatcttaggcagatcttgtgaacccggctctgaaattgtgacattcataaatattcctgcctgttcatcagcaccagggctaggacaggcatgtatttatgctctactccctgaggtgcagctcttccctcctatttccttcttgaaacttcaatgggttttcaaaagtctctaagatgtsggtatttactactttttccctgaagattaaagctttcgttgtttcagagaggtgacaaagtagcatctgggaggaattttgtccttgcttactattacctttccccagccaacaacatggaagctttcttaaatttaccctaatcttcgcatgcatgccttcaagggtttatgcaagaaaaggctgcaactgggaggaaacaccctgaagactgtggtcctcaggagccccgtcctcctttagtagcccgcactgttgccttgaacaattta

SEQ ID NO: 687197 - DNA, 666 bp, Homo sapiens
gtttttgccgcagaatttttactaattccaattattatttctaaacattagtgtgactcaattattctgaaaaatttgctttcaaagtttgtgaattctcaatgatcaaaacacattaacatacaaataatcttagcattcttaacacttcccaaagtaaggtgattattttttcatacctgagtaaawcctaaaaaaaaaagaataccacaaatatggggccagatatttgtaaaatgtaatgtttcatcacaaaatgcagactttcctagctggaggtactcttaggactgaagaatgatataactcattttgtaaaaatttactttgccacctcagtgcatagccagtacctccagtaggggagcaactttctactcagatgatcaaagtgtttggattagggcctctccaagaatttgaaataaagggtaaagctgggagtcaggatcccagaatttaagcaagaactcagggtaaaaggaaggtgtggatgtcaagaacacacaaaggaaccagggagagaggagtttgactctggcctttcctgagtgacatcatcccagctgcttgagctctctgagacacctgtacaatagggatgccaacacttaccccacagggctgccctcaggatgaaggagccaccgcacatgatgtgcttaa

SEQ ID NO: 687198 - DNA, 630 bp, Homo sapiens
tcattccaagtgcgttgttccgagccatgtgtaacattaagtgctttgggcaaggcatggtggctcacacctgtaatcctagcactttgggaggctgaggtgggaaaattgcttgaggccaggaatttgagaccagcctgggcaacatagtgagaccctatcactacaaaaaattttttaaaagattagctacgctcctgcttgagcctagaattgaggctgcagcgagccatgatcatgctactgcactgtagcctgggcaacagagcatgaccctgatgaccctgtttctcaaaaaaaaaaaaaaaaaaaaaaaaaagatamctgctttgaaaggattagaaagttaccttgaaaccagaattgggctcaatgaatagcatgttaactggaaatccaagtcaatatccaaaatggtcctttctagcaaccccactggaaacaaaggccgaacaaatagggaaacttcagcaggttcacaaggggccaggttggcatgtttgggttatcattcagaaactgaaagcctttggttttattatcagacttgttgtgatcgatgtcagagtctacagaggaaaatgtaggtagagaagtggaagcaagagaaaggaaggtggtaaaagcaca

SEQ ID NO: 687199 - DNA, 630 bp, Homo sapiens
tggagtgatgggtatcctaattgtctgaatttgatcattacacattatatgcatgtctcaaaatatcacatagattccataaatatgcacaactattatgtatcaataaaaaagcaaacaacaatttacaaamcctgtacaacattattttatctccattaaatataatctgcatgtgtctcagttttgttttggtccttgaattatctgtttccgtttgttttagaagatggcattgagggcaagttgcccttctgaaaagtgattaagaaactgtacagcatacctaagcctggactttctactaattctcgtatcagaataaatgttttcaggtgcattttcatatactgggcaattggtataactaataatcatgtttttaatggtcgttgggtaaacttatagatgttcacaaaagggaaataaaaagagtaggtacttttgtttttgttttcattatataaaacaaataaaatcagcttacattaagtactatgccatggagatttgagttgaaaattcctttgtgtgaaacttcagtgacctctaatctgatcatagatttggtcataaactctttcatggagataggcccgaagtacacttctaagcctacctttttcatct

SEQ ID NO: 687200 - DNA, 595 bp, Homo sapiens
aagagatgcacaggcttgggggtggtttctagtaatattattattattaaaattaaatgatatagcaaacttatattttgactgctatttattgagtaatgagataagaaagtaggctcaatttgccatcttatgtgtatcaacccattaatgataatttatcccctgagagttccacgttttgatcacattatttgctaattttacttcgaggagcctcagaattctttaaacattgttagtgaatccacaattaaagcagattccagtctgtatttaacacaacccacatttataaacttttcaacatgttgttttgttttaccatttaacatctcctactggcctcaagatcacctaacataaacaaataggtattaaatattgatgacgttcttattgagaaccaggtaatttcacagtaacaataattttcaaatttcgagtttctstctttctcttccttttttttttctgaaccacagaaactttcatgaccattacttacttgaaaagggattgtaagcatggaaaagatgtatgtgatatctcataatttagatttgtatatttttacattatatctagaaatatt

SEQ ID NO: 687201 - DNA, 645 bp, Homo sapiens
taacaataaaattcagagcatttgctctcattatgatttgtgaaatgaggattttgagccttcctgatatgaaacagtagcagatgacacacaagtcacaagttctgtagcaattgagctcaaccttaaaacatcatatttttcatattttctaccttttcaacaggttcagcttatagtttcattttgtaaccatataaaattggggatagtatcactgttaaacacattgcccacctttagccctcagtcccatccaaagttgttaattccctccctccctctctccctcccttccttccttctttctttccttacttccatccttcctacctttctttctctctttctttctttctttctttggagatggactctcgctctgttgcccaggctggagtgcagtggtgygatctcagctcactgcaacctctgcctcccaagttcaagcaattctcctgcttcagccttccgagtagctgggactacaggcacatgccagcacgcttggctaattttttgtattttcagtagagatggggtttcaccttgttagccaggatggtctccatctcctgatctcgtgatccacccgctttagcctcccaaagttctgggattacaggcatgaaccactacgcccgg

SEQ ID NO: 687202 - DNA, 645 bp, Homo sapiens
taacaataaaattcagagcatttgctctcattatgatttgtgaaatgaggattttgagccttcctgatatgaaacagtagcagatgacacacaagtcacaagttctgtagcaattgagctcaaccttaaaacatcatatttttcatattttctaccttttcaacaggttcagcttatagtttcattttgtaaccatataaaattggggatagtatcactgttaaacacattgcccacctttagccctcagtcccatccaaagttgttaattccctccctccctctctccctcccttccttccttctttctttccttacttccatccttcctacctttctttctctctttctttctttctttctttggagatggactctcgctctgttgcccaggctggagtgcagtggtgtgatctcagctcactgcaacctctgcctcccaagttcaagcaattctcctgcytcagccttccgagtagctgggactacaggcacatgccagcacgcttggctaattttttgtattttcagtagagatggggtttcaccttgttagccaggatggtctccatctcctgatctcgtgatccacccgctttagcctcccaaagttctgggattacaggcatgaaccactacgcccgg

SEQ ID NO: 687203 - DNA, 3104 bp, Homo sapiens
gtcctgtctggcacttttcagagccttctggggacaaaatgtaagctacagagcagtgctttcaaaaagggatttccaaggagcagtggatgtcattcttatgttaattttccactgatgaaaacccatgggcagcagtccagcaacccaagccttctgaacaggctgggttctgaaggggatgtttttcctacctctccacttctgccattcttttgtcttatttctcaattgttcagagcttgaggaagaaaggctaatgccattcatagtgcagtctcagattccaaaattattaatcagatgagtgtaatttttagaatcaaatctaataatgctgggatcaaggattattctttaaaaataacagaaaaatatttttaagacatcactttaccaaaatgagaggaaaaggaaataatcttttatattttatttgtaaattaaaattaaacaatgatgttaaagaagtacactgtagtagatctgagttgcaggcattatgcaaccttttacagacctcctgggccactcagttgatctgttagagtctcatctataaaataggaatgataatatgagactgggctgagatcagcatattggataagatagtgtttttaggtatattcaagctaaaaacctacagcttgattatgcatacattatacccattagtatcctgagtacgattgtctaaaagaaataccaayagaataactaatttaaagctttctaaaagccacattaagtaagcaaaataaagcagataaaactaatttattatatattatttgacttgatatattcaaagcattatttttagtattaaattctcataaaaagtataatattctagattagttttaaaattgtctctaaaatatgacatgtattttatatctccagaacatctcaatttggactagacacacttcaggtgttcatggccatatgtggctaatggcttctgtattagcacatagacagagaaattaaggcagctgtggaagaaaattagtactagtttgattggagcaacataggtaatattctcaagttgatgtcatggtttacaactcccatagtcaatcataaagtggctaaattatagaacagtcctaaactttacatctgggtcaaacctgagaggtcatatgatctaacccttttgattttagttgcaagaattatgctcaggagaaaatatgtgacccaccaatgtcacacagggaattggcaaaagggctgaaaccaaaagcaaggcctcttattttccagctatgggcacactgcacaagatggctttgcggtgtctcccttctttggacccagtgaaagcatttaacttacttctgagtgacaagaaagaaaagaagcagtaatagtgtttccacttaatgctggctgccttatatgctgtgttagttctcacattgctttaaagaaatacctgagactgagtaatttataaagaaaagaggtttaattggctcactgttctgcaggctctgtgggaagcatgatgctggcatctgctctgaatctggggaggcctcaggaaactttcaatcatggtggaagaagaaggggaagcaggcatagattacatggccagagcagtagaaagaaagagagaggggaggtgtcacacatttttaggccatcagaactcatgagaactcactcactatgtagtacctatataggggacggtgctaaatcattcatgagaactgtgtccctatggtccagtcacctcccacaatcccccctcctccatccatggggatcacaatttgacatgagatttgggcaggaacacagaaccaaaccatatcacatgcattcacatatcttagtattttgttctgttttaatgacaaattacccttttagaaatgaaaaacacttgagattttttttttcctcctaaaatgggtcattctacagtggatattttgtagcagaggtagcctcacctcatcctcctggaaggcaaacatgataaataccatacttgtataattgaatagaaatgccttttccatgttcaggttttaaaatcttccacctgccaccctcaatattccattaccatcaacttctgcatttcatttatcctgcagattagatttgcaaataagaattgcggattctctcttcattttaaaccaggcttttcaagtactgcattatgttccattgagccaggtttcaagatgtggaaataaaactcaatgagagatagtcataaacactgtctttaacctctagaattatagtgatatgtggcattacaggaattggcaacatgacagaaagtcgtaagatggattatgaggtaaaacatctgatggaaggaaagagtgtaatggtgggttatatgaatgtagtaaatggtactccagaagagatatgtgggaactctgaggtttaatgcagacaggtgcccttagctgggtcaactgggaaatgaaatcctcaaatgaccagaagcctctttctagcaacaccatagtcttaatgcgtgaccttaggcaagtcacttacctgcacggtcctcacttgcctagctttaaaatgatgctcataatcgatacataaccagataatgcttacaaagagctctgagattcttggatgaaaggccctatttacatgtaaagtagtgttatcattcaaatcccccctctgctaaatactctgtaacaggtgtattaaaggagaggaaatgaggaaggagaaaaaggaaaattggctcctgaagggatagaaatctgattatctcaaattgactcattctgaaaagggggaagaggagggtagatctgctgcatttaaccatttccaaacagactttactttgaataagcgaataaacacaatgagaccaatctgtacattttccaatcatgagggaaaaaaaatctgagataagtccactaaacttctgagcataatccccctaaaaaacagtttcaaatacatgcatgtggcttccattaatatgtaccactataaaaatttaaaatacatctatttcaccacttattgacacgtaattttatatatatatatatatatatatatatatatatata

SEQ ID NO: 687204 - DNA, 661 bp, Homo sapiens
tatgagatgacttggagatacaaaataagatataaaattaaaataaatcaggaaataaaagcaaaataaaataaagaagaaccaggataaaaattagtaaccaacatacattcattacattgtaaataatttctagtggagattggaagaaaaggttaacacagaaggcctgacacagcatccttagaaacacctccaaagttgaccttaagctgggttctaggaacttagacttctggagggtttccaaactaagagtagtttactacacctaaattacttgtacagacaaggtggcttatgctgaatacttcctttccttttgggcatctggaatttgggtgcatgctaggcagtgagtgcctacatgaccagcccccaatcataaccttggggcawtgaatctctaatgagcttccctgatcagtattttatatttgtcacaactcatggctggagaaattaagtatgtcttgtatgattccactggtagaataataatatggctgttatttgtggtatgtctactctttatgagggagtgcattaaacaccacataataacagcatctcacttattctccataacaatgctatgtcacaattattagtatgctcattccaggaagagaaaattggggttagaatgtttacataactt

SEQ ID NO: 687205 - DNA, 637 bp, Homo sapiens
ggtccgttgtggggtggggggaggggggagggatagcattaggagatatacttaatgttaaatgacgagttaatgggtgcagcacaccaacatggcacatgtatacatatgtaacaaatctgcacgttgtgcacatgtaccctaaaacttcaagtataataaataaataaataaataaataaataaacaaacatagaggttcattcaacatctaaacataattctttttttgagatagttttgaaagctaaaytaaaaactacttttccaaacttctttgtaactagggttctgaatgtaaagtaggtttcatccatcagatgcatttgcccgaaatctgaagtcagagttgagacagaaagcatttttctactctcttttggctgtgtctatataggcacatgtgagaagaaggttctctgcaaaggtactccttgcctagcttcctggatggttgggagatgcctcttggactcatttctcttttcctggtctgcagataaaggcttatgtgttccatagtttgggtgtctgcaatgggggaagcaatggtggcaggtttttgggtatgggacagctccagagatagcccaggattggtagctccattaaggatcagctggattgtttgaaagtc

SEQ ID NO: 687206 - DNA, 600 bp, Homo sapiens
gggaggctggcaaacacattctttaacctagccatttgttygcctggtcaaaaagaaaaaaaaagtcaaagattttgaagcagtcctcttactgaacatttagggaagcatcccaaaatagtacaaggaaggaggcatgtaaattgaggaactctatttaaacaactgaagctcaagcccaaggacttacaattgggtcttttgagagtgagcatgtggacaacccattgctcagagtacccaatcctctcccctgccagctcacagttggctgcccaccctactcacccacacacattgtttttgtaaactttgtagcttcgtgcacttcttcacaggagccctctcaaatcacagattaaattatcccactccgtattaccctgtcattaacatctataccccttttttatagaacttaacacaatttgtaattcatgcatgtataattattttattaatgtttatctctcttctaaggctttaaaagacatgagcaggatccatgtcttcttttcccatcattgcattttcagtgctaacacaatgcctgatgcatagctgttgactggaaatatctattgagtaaataaacatcga

SEQ ID NO: 687207 - DNA, 619 bp, Homo sapiens
caaaaacaaacaaacaaaaaactgatttggatttgtatttcagtcttctgttttctgttctttaatacccttattaaagaaaccggatgtgaggcggccagcggcggtcaggtgagcgacgcgggagcggtcagcaggtggcgaacccacggccaggcttccgtggcaagcagccctagaggaatggccgtcctgtccctgcgagcccctgggccctggcaggcgatccaggtgggatgcyatggaatatgatgagaagctggcccggttccggcaggcccacctcaaccccttcaacaagcagtctgggccgagacagcatgagctggggccctggggaggaggccccagacatcactcctgaagaggccctgcctgagctgccccctggggagccggagttccgttgccctgaacgcgtgatggatctcggcctgtctgaggaccacttctcccgccctgtgctgcggcaggtgatcgaggagtgcaagcaggtgattctggagctgcccgagcagtcggagaagcagaaggatgccgtggtgtgactcatccacctctggctgaagctccaggagctgaaggaccccaatgaggatgagccaaacatctgagtgct

SEQ ID NO: 687208 - DNA, 600 bp, Homo sapiens
atttgttaagagggtagttttcatggtgtatttgttttaccaccattaaaaaaaagcatttcagaatgcaggtgagagtgatattattcaaggaaaacccttgaagaaaaaccctctgttattctaaaaacacaaatgttatcacaggattccattgctttgcataccgttttgcttctttcacttactggtcattctctaacctttttggtggcttctcatgggaagtgttacacaagaggccaagcacagggctctggggccacatagccaccaaccagctgcacaactctgggttacttcatcctctgtgcttcattttctttatctataaaatggcactgatataaatagtacctaccccagaggattgttgggggggattaaatgagttmaatctggtcgggtgtggtggctcatgcctgtaatcccagcactttgggaggccgaggcgggtggatcacttgaggtcaggagttcaagagcagcctggccaacatggtaaaatcccatctctactaaaaaaatatagaattagccgggtctggtggtgcagacctgtaatcccagctacttgggaggctgaggcaggagaattgc

SEQ ID NO: 687209 - DNA, 600 bp, Homo sapiens
atttgttaagagggtagttttcatggtgtatttgttttaccaccattaaaaaaaagcatttcagaatgcaggtgagagtgatattattcaaggaaaacccttgaagaaaaaccctctgttattctaaaaacacaaatgttatcacaggattccattgctttgcataccgttttgcttctttcacttactggtcattctctaacctttttggtggcttctcatgggaagtgttacacaagaggccaagcacagggctctggggccacatagccaccaaccagctgcacaactctgggttacttcatcctctgtgcttcattttctttatctataaaatggcactgatataaatagtacctaccccagaggattgttgggggggattaaatgagttcaatctggtcgggtgtggtggctcatgcctgtaatcccagcactttgggaggccgaggcgggtggatcacttgaggtcaggagttcaagagcagcctggccaacatggtaaaatcccatctctactaaaaaaatatagaattagcygggtctggtggtgcagacctgtaatcccagctacttgggaggctgaggcaggagaattgc

SEQ ID NO: 687210 - DNA, 619 bp, Homo sapiens
ccagtgctctgctggcctgaggttgtatctcattgaggcaagcaatggatggtagactagccatggaacaaggtattccatgaggtgagaaagtggtgagaaggcttggtaacctctgcacatatcctaggttgactgaaggccatgtgtatgtaccctagggactgcagcaggcccaagccactcacacacccccggcagatgaaacctgtgtgtgtgtgttcacaagacaactgagagagcccggtagaaagcaaaggctgggcaaactaaaaaataatccagattttgaatgcactccccaaaccacacaaagacccatcagctcaaagtggtaggcttattggcttgaggtatttgagcataactgctgactaatctttggttcagcactaatctatacagacacagggcaaaatctaaacagagacttttagaaaatgcaaataaaaagataatcaaaactaaatactmaacaaaaacatctgtggttgcacaccctgggagaggcagaaatcacagatttagtacaggcaagttattaaacaaacaaaacaagaaaaactgctagggggtgggaggaagagtcagaatccacagttgctacaatttattatcc

SEQ ID NO: 687211 - DNA, 566 bp, Homo sapiens
tcctttcttcttctgagccctccaaactattccaacctctgccagttactcagtttcaaagtcatttctacattttcaggcacctttacagtagtgcacccaccccattcctggtaccaatttactgaactactccattctcttgcttctataaagaactgcccaagactgggtaatttataaaggaaagaggtttacttgactcacagttctgcatgactagggaggtctcaggaaacttacaatcatggcagaaagggaagaaaacacttccttcttcacatgatggcaggaaggagaaggaccaagcaaagagagaaaagctctttataaaaccagatctcatgagaactcactcattatcatgagagcagcagcataagggtaaccacttctactattcaacctcctcccactgggttcttcccatgacgtgtgaggattatgggaactacaattcaagatgaaatttgggtgggaacacagccaaaccataccagatactacctgttagatgtaagttctggtctggagtccatcacacstggacacactgaaattattta

SEQ ID NO: 687212 - DNA, 569 bp, Homo sapiens
ctatcaagctctcgttaatgctattatgcctgacatgagaattcactaggcttcctgatgaaaataagacggatacatatctctaagaataatgtacacaaattatatggcaaaaatataaaagttcatacaatgggcaatagaataaatatgaatggccatccaacagatgaaaaatttcttgttaattcaaattacttttgaataggaaaaagtatttgctaaacactttgaatcattatgtatatgtgttgtatctaacacttattaaagcaaagatctacagaaacagcacttcctgaaatttctttagtaaatgaatttaagatcattaattttgtttaaaggacaaaaattgtcttattcatctttatatatcctttgcattatatccaatgcaaaggctaactcaaagttatttaatgaatatggaaagaaggaaaaaaracagccaaagaaagtcaagagggaaagctgagaagagggagagggaaaaacaagtaaaaaatatgaaggtccatgacagatcctaacttagcacatgaggggttattgaaattcaccaacaa

SEQ ID NO: 687213 - DNA, 650 bp, Homo sapiens
tgcagccatataaaggatgagataatgtcttttgcaggaacatggatggagctggaggcaattatccttggcaaacgaatgcaggaacagaaaaccaaatactgtatgttcttacttataagtgggatataaatgttgataacatgtggacacatacaggggaacaacacagtgaggcctattgaaggttgggaggagggagaggatcaggaaaaataactagtgggtactaggcttaatgtctgagtgatgaaatagtctgtrcaaccaacccccatgacacaagtttacctacataacaaacatggacatatactcctgaacataaaataaaagttaaatttaaaaaaaactaaaacttaacatgcaatatttttagtggtacaaatatatttatgtaactgtaaaaaagagagatgtataagaatatatacaaaatgtaataatggttacttccaaacaatatatgaagtttagaagttgagtttttttttaatctgtaaggttttcttttaaaaaagaaaatgtattagtatattgttttacaatttttttaaaatgtacaagaaagttcttatttctactatattggtctgcttctttgtattttttctggcccaacccgaatcagtcttttcaaagtttatcta

SEQ ID NO: 687214 - DNA, 1651 bp, Homo sapiens
gttggcaatgccagcatcagctttctggaaccaggcatctggatcatggaaaaggcagctttttctaggtggtattgtttggctatgtccccacccaaatctcatctcgaattgtagctccgataattccttcatgttgtgagagggacccagtgggagataattgaatcacaggggcggtttctcctatggtgttctcatggcagtgaataagtctcatgagctctgatggttttataaagggaaaaccctttcacstggctctcactctcttgtctgccaccatgggagacatgtctttcacctttcaccatgattgtgaggcctctccagccacatggacctgtgagtccattaaacctctttcttttgcaaatcgtccagtctcaggtatgtctttgtcagcagtgcggaagtggccaattatactatagcagatcagttatgttgtggttttgcacctcattcctggcaggtcaaaacagaatctatctcttccatcctttcaataatatgtgagctatttatgccacttaataattcccttcagcttgaggaagctagagtatattgctttttgtaactagtatccctaactgatattgcaaacttcacataaaaacatcctgttgaagatgaagaactagaagtagaagattctttttccccagggacatatgatatttaaaaaaagctacaggtagctggtctttactgtgtacattatcaatctcttacccaaaatactatagtggtattcactgctataactatttacagtatatacagctgttttcttacggtcttagcaaaaccatcttctcctctgttgtgacttgcatgtgcccccccaaatttcatgtgttggaaactaaattcccaaattcatatgttgaagatatttggaggtggggcctttggaggaagtaatcaagattagataaggtcattaaagttgttctcccatgttgagactggcagctttagaagaaaagaaagagagatgtgagctgacttgcatactcttgccctctcactatgcgatgccctctcaccatgcaatgccctctcaccatgtatgatacagtaataaagcctcaccagatgccaatgccatactcttggacttcctagcctccagaaccataagaaataatttttttctttgtaaattacccagtccatagtattctgttacagcaacagaaaagcaattaagataccgtctcaaacctggttttgtctataccttgtgagaacctcacaactgtaattcttctgtataacacatcaattaaaatagagtctagacaaaatgtcagtattaaagaaatcaggaaaacagggccgggttgataataaggccacaatatttgctgcctctgagaatttggaaaggaatgaatttgaagaagaagctttctgcttgcatatctagttcttattcatatgcacacaagcctaaggggaaaaattcaggctcatcatcctttcaattgcttagaagcatgtagcagctctccaacttacctttcttaacaaaacagctcaggctgcagaatgatcatagttttgaattcagccatggcttttaatttatttattttaggctttgctagattataaagctctggaagctggggttcaaagg

SEQ ID NO: 687215 - DNA, 1651 bp, Homo sapiens
gttggcaatgccagcatcagctttctggaaccaggcatctggatcatggaaaaggcagctttttctaggtggtattgtttggctatgtccccacccaaatctcatctcgaattgtagctccgataattccttcatgttgtgagagggacccagtgggagataattgaatcacaggggcggtttctcctatggtgttctcatggcagtgaataagtctcatgagctctgatggttttataaagggaaaaccctttcacgtggctctcactctcttgtctgccaccatgggagacatgtctttcacctttcaccatgattgtgargcctctccagccacatggacctgtgagtccattaaacctctttcttttgcaaatcgtccagtctcaggtatgtctttgtcagcagtgcggaagtggccaattatactatagcagatcagttatgttgtggttttgcacctcattcctggcaggtcaaaacagaatctatctcttccatcctttcaataatatgtgagctatttatgccacttaataattcccttcagcttgaggaagctagagtatattgctttttgtaactagtatccctaactgatattgcaaacttcacataaaaacatcctgttgaagatgaagaactagaagtagaagattctttttccccagggacatatgatatttaaaaaaagctacaggtagctggtctttactgtgtacattatcaatctcttacccaaaatactatagtggtattcactgctataactatttacagtatatacagctgttttcttacggtcttagcaaaaccatcttctcctctgttgtgacttgcatgtgcccccccaaatttcatgtgttggaaactaaattcccaaattcatatgttgaagatatttggaggtggggcctttggaggaagtaatcaagattagataaggtcattaaagttgttctcccatgttgagactggcagctttagaagaaaagaaagagagatgtgagctgacttgcatactcttgccctctcactatgcgatgccctctcaccatgcaatgccctctcaccatgtatgatacagtaataaagcctcaccagatgccaatgccatactcttggacttcctagcctccagaaccataagaaataatttttttctttgtaaattacccagtccatagtattctgttacagcaacagaaaagcaattaagataccgtctcaaacctggttttgtctataccttgtgagaacctcacaactgtaattcttctgtataacacatcaattaaaatagagtctagacaaaatgtcagtattaaagaaatcaggaaaacagggccgggttgataataaggccacaatatttgctgcctctgagaatttggaaaggaatgaatttgaagaagaagctttctgcttgcatatctagttcttattcatatgcacacaagcctaaggggaaaaattcaggctcatcatcctttcaattgcttagaagcatgtagcagctctccaacttacctttcttaacaaaacagctcaggctgcagaatgatcatagttttgaattcagccatggcttttaatttatttattttaggctttgctagattataaagctctggaagctggggttcaaagg

SEQ ID NO: 687216 - DNA, 1641 bp, Homo sapiens
tgcttagtccctagcttagttaggtccaagttcttgtcaaacaaccaataagaataagggacatggacaccagagaatgagtagaataggatttattaagcaaattgaaagctcttagcaaaaagagggggcctgaaagcaagttgccagaaatggggctgagttctgtgtttttgatatggcagaagtcaggatgttttctgtgggtttgtgacttcatgtttgttattacccatgaatacctaagcaaaaccgagggagggctaacacaacaatactaatgccatgttaatgacattataatgagctgggttaagttaagtacatttaggttgatttattgtgcctgtgcctaagttggaacagtccctttgggcaacatcctggcacaaggggaaattcttaaccacgtttcttcccattagctgcagaggcagtgtaggtgctgtgttgaggttgttcctgtgaacattgcctttctctgtccttctcccgagaccctccctctttgtctgcctatccagcccctaaccacctcctccctcaatggaatgtgttaataccaccaccataattgtaaaataaaatattccagtgaaatagaaggtagtttctcttttctctctctctcattgctattatagttaattctttgttgatgaggtaacagttacactaaacatttggataaattaagattcacatataatcagtgtctttaaaaatcactggaatattgaaatacaaaaatgtgtttaatttgagggattggttaaatgcattgtaggggagaagtgctccaaaccggaaaggtttaaaaacatttatattttcatttaacaaacatgtacttattcttacagactgtacaagaccctaaggaggtctttatattactgaagagctacacatgcctatttttaaaaaaataatattttctttcaaaatatcctttctgaatttgaagtgagtggtttcaatttaatgtggctttatttgtttgtgtactggtatgttcactgcaatttcaaatccttcaagaggtgcttctcagaatccctaacaatggtaattaaaataaccaaagttcatttgacttttctttctttaacttcttttcctcttattcacctgtacatatagcagtgattggccataagttgattttgtagaaaaaaaaaaaacctgaataggaaaaattcttctaaaataattttaaaaactcctctaatttgtgctggtttccatctcgataggattgcttgctgtgtcaaagagaagggaacatgctaggcaatgcactaccacattaaaacttttgtttacattttattagctaaacctttcaactgtcatttaaaagtctcattgggcagggtgtggtggctcaaacatataatcccagaactttgggaggccaaggcaggcagatcacttaaggctgggagttcaagaccagcctggccaacatggagaaacccatctctactaaaaaatacacacamaaaaaattagccaggcttggtggcatgtgcctgcaatcccagctgcttgggaggctgaggtatgagaatcacttggaccagggaggtggagtttgcagtgagccaaagatcatgccactgtactccagcctgggtg

SEQ ID NO: 687217 - DNA, 1641 bp, Homo sapiens
tgcttagtccctagcttagttaggtccaagttcttgtcaaacaaccaataagaataagggacatggacaccagagaatgagtagaataggatttattaagcaaattgaaagctcttagcaaaaagagggggcctgaaagcaagttgccagaaatggggctgagttctgtgtttttgatatggcagaagtcaggatgttttctgtgggtttgtgacttcatgtttgttattacccatgaatacctaagcaaaaccgagggagggctaacacaacaatactaatgccatgttaatgacattataatgagctgggttaagttaagtacatttaggttgatttattgtgcctgtgcctaagttggaacagtccctttgggcaacatcctggcacaaggggaaattcttaaccacgtttcttcccattagctgcagaggcagtgtaggtgctgtgttgaggttgttcctgtgaacattgcctttctctgtccttctcccgagaccctccctctttgtctgcctatccagcccctaaccacctcctccctcaatggaatgtgttaataccaccaccataattgtaaaataaaatattccagtgaaatagaaggtagtttctcttttctctctctctcattgctattatagttaattctttgttgatgaggtaacagttacactaaacatttggataaattaagattcacatataatcagtgtctttaaaaatcactggaatattgaaatacaaaaatgtgtttaatttgagggattggttaaatgcattgtaggggagaagtgctccaaaccggaaaggtttaaaaacatttatattttcatttaacaaacatgtacttattcttacagactgtacaagaccctaaggaggtctttatattactgaagagctacacatgcctatttttaaaaaaataatattttctttcaaaatatcctttctgaatttgaagtgagtggtttcaatttaatgtggctttatttgtttgtgtactggtatgttcactgcaatttcaaatccttcaagaggtgcttctcagaatccctaacaatggtaattaaaataaccaaagttcatttgacttttctttctttaacttcttttcctcttattcacctgtacatatagcagtgattggccataagttgattttgtagaaaaaaaaaaaacctgaataggaaaaattcttctaaaataattttaaaaactcctctaatttgtgctggtttccatctcgataggattgcttgctgtgtcaaagagaagggaacatgctaggcaatgcactaccacattaaaacttttgtttacattttattagctaaacctttcaactgtcatttaaaagtctcattgggcagggtgtggtggctcaaacatataatcccagaactttgggaggccaaggcaggcagatcacttaaggctgggagttcaagaccagcctggccaacatggagaaacccatctctactaaaaaatacacacacaaaaaattagccaggcttggtggcatgtgcctgcaatcccagctgcttgggaggctgaggtatgagaatcrcttggaccagggaggtggagtttgcagtgagccaaagatcatgccactgtactccagcctgggtg

SEQ ID NO: 687218 - DNA, 635 bp, Homo sapiens
ttttatggtagtccaccatttcctactatgatccacattttttttttgcagaagctggggagctgaactgaatagaaatgtggatagcactattatccctkaattttcaaacactttgactgagggtgttaatcccagaatttattttcacgatgtcggtatttttccttatttgctcgcttgattatataggggcagaggcacagtttaaggagcctgcacttgaatcctcttgctataatggctctattcaggtcaagaataaatgtggttttatatcaactgctaatgatatttatcctaattgtacatttggaaacagaaaaaaaaaacatagggtaaagtctccagatgcactggatgcactataaaatgaactcaaataaaaactatatttaccacctggcttctgtaaattctgaataagacagagaactacagtagcattttgtgttctggaaaatgtgtcagttctatgtaattctccttgtaagtccatatttatccatctgaaggactatgtgtctccttgggaacagtttaaaatacttactgcatatatgtgtggtgacatttcaagatctttccttaaggtgtcccagcttcctcttcaatgtactctggattagcaaact

SEQ ID NO: 687219 - DNA, 635 bp, Homo sapiens
ttttatggtagtccaccatttcctactatgatccacattttttttttgcagaagctggggagctgaactgaatagaaatgtggatagcactattatccctgaattttcaaacactttgactgagggtgttaatcccagaatttwttttcacgatgtcggtatttttccttatttgctcgcttgattatataggggcagaggcacagtttaaggagcctgcacttgaatcctcttgctataatggctctattcaggtcaagaataaatgtggttttatatcaactgctaatgatatttatcctaattgtacatttggaaacagaaaaaaaaaacatagggtaaagtctccagatgcactggatgcactataaaatgaactcaaataaaaactatatttaccacctggcttctgtaaattctgaataagacagagaactacagtagcattttgtgttctggaaaatgtgtcagttctatgtaattctccttgtaagtccatatttatccatctgaaggactatgtgtctccttgggaacagtttaaaatacttactgcatatatgtgtggtgacatttcaagatctttccttaaggtgtcccagcttcctcttcaatgtactctggattagcaaact

SEQ ID NO: 687220 - DNA, 635 bp, Homo sapiens
ttttatggtagtccaccatttcctactatgatccacattttttttttgcagaagctggggagctgaactgaatagaaatgtggatagcactattatccctgaattttcaaacactttgactgagggtgttaatcccagaatttattttcasgatgtcggtatttttccttatttgctcgcttgattatataggggcagaggcacagtttaaggagcctgcacttgaatcctcttgctataatggctctattcaggtcaagaataaatgtggttttatatcaactgctaatgatatttatcctaattgtacatttggaaacagaaaaaaaaaacatagggtaaagtctccagatgcactggatgcactataaaatgaactcaaataaaaactatatttaccacctggcttctgtaaattctgaataagacagagaactacagtagcattttgtgttctggaaaatgtgtcagttctatgtaattctccttgtaagtccatatttatccatctgaaggactatgtgtctccttgggaacagtttaaaatacttactgcatatatgtgtggtgacatttcaagatctttccttaaggtgtcccagcttcctcttcaatgtactctggattagcaaact

SEQ ID NO: 687221 - DNA, 635 bp, Homo sapiens
ttttatggtagtccaccatttcctactatgatccacattttttttttgcagaagctggggagctgaactgaatagaaatgtggatagcactattatccctgaattttcaaacactttgactgagggtgttaatcccagaatttattttcacgatgtcggtatttttccttatttgctcgcttgattatataggggcagaggcacagtttaaggagcctgcacttgaatcctcttgctataatggctctattcaggtcaagaataaatgtggttttatatcaactgctaatgatatttatcctaattgtacatttggaaacagaaaaaaaaaacatagggtaaagtctccagatgcacyggatgcactataaaatgaactcaaataaaaactatatttaccacctggcttctgtaaattctgaataagacagagaactacagtagcattttgtgttctggaaaatgtgtcagttctatgtaattctccttgtaagtccatatttatccatctgaaggactatgtgtctccttgggaacagtttaaaatacttactgcatatatgtgtggtgacatttcaagatctttccttaaggtgtcccagcttcctcttcaatgtactctggattagcaaact

SEQ ID NO: 687222 - DNA, 596 bp, Homo sapiens
caggagacccaggctgggtcccagcctcaccagcacccaggacctagcacacagtgtctgtagagtcaatgaacagatgtcccgctgggagtcaggcatgttgctttgtgctctgagcttccctttctcatctataaaatgggggtaaaaacctgacttcccaggtgaagtcaagaggagaaacaatgtaagcacytgaaacccggccccaaagggttaagagaatttgctcactagcaaaattttctgagctgctcttgcaggacagcaagggagaaaagtttgttaccgtgccttccatctgcaacaaaattcgcccatgagctgagactcgcgggaaccaacatggctgactggagtctgtgcagaatagacttgcgtgccccatgagtggcttcttgacgtcagagggccagaaactccacctccagattagatgttgccattttctgaacatgcaacccatgaagaagcatgctagggcagcagcccaagccccagggaccccccagactcccttccttctagccagtcactgcccaaccacgaaactccaaactcagaatctctcccttaaatccatggtggcaaggctg

SEQ ID NO: 687223 - DNA, 596 bp, Homo sapiens
caggagacccaggctgggtcccagcctcaccagcacccaggacctagcacacagtgtctgtagagtcaatgaacagatgtcccgctgggagtcaggcatgttgctttgtgctctgagcttccctttctcatctataaaatgggggtaaaaacctgacttcccaggtgaagtcaagaggagaaacaatgtaagcacctgaaacccggccccaaagggttaagagaatttgctcactagcaaaattttctgagctgctcttgcaggacagcaagggagaaaagtttgttaccrtgccttccatctgcaacaaaattcgcccatgagctgagactcgcgggaaccaacatggctgactggagtctgtgcagaatagacttgcgtgccccatgagtggcttcttgacgtcagagggccagaaactccacctccagattagatgttgccattttctgaacatgcaacccatgaagaagcatgctagggcagcagcccaagccccagggaccccccagactcccttccttctagccagtcactgcccaaccacgaaactccaaactcagaatctctcccttaaatccatggtggcaaggctg

SEQ ID NO: 687224 - DNA, 596 bp, Homo sapiens
caggagacccaggctgggtcccagcctcaccagcacccaggacctagcacacagtgtctgtagagtcaatgaacagatgtcccgctgggagtcaggcatgttgctttgtgctctgagcttccctttctcatctataaaatgggggtaaaaacctgacttcccaggtgaagtcaagaggagaaacaatgtaagcacctgaaacccggccccaaagggttaagagaatttgctcactagcaaaattttctgagctgctcttgcaggacagcaagggagaaaagtttgttaccgtgccttccatctgcaacaaaattcgcccatgagctgagactcgcgggaaccaacatggctgactggagtctgtgcagaatagacttgcgtgccccatgagtggcttyttgacgtcagagggccagaaactccacctccagattagatgttgccattttctgaacatgcaacccatgaagaagcatgctagggcagcagcccaagccccagggaccccccagactcccttccttctagccagtcactgcccaaccacgaaactccaaactcagaatctctcccttaaatccatggtggcaaggctg

SEQ ID NO: 687225 - DNA, 632 bp, Homo sapiens
acttaaatggaaatagtcacatgtggctagtggctactagattgggtagctttctgaaagtccttctacataccttacatctactaactcatttaatcactactaccctaggtctagatgtataatactttattatctatagtttatatttttaaaaaaatgaagacacagggtgattagccacagagtgatttactgagttacataacttgttytgaaactaaggactgatttaggctccccacagcaatgtgcactatttaaggagcaagtcatggttaaggaaaacaccagagacatccaaaaatagttcctgttgctctgtggacaaataaagaagccattgtctacctgttttccctgtgtttttcatccaggttttgttagaagactcattgtcgaagccatcgagttgcagttcctggtattcttccccaacacgcgcatactggtctaaaatgtcaataggagactggtgacggcccccacagctgacactagacgtgacccagtgctcaggaccataggcacctgttgaaagaagacaacacttcaatcctcatggttcaagggtcagggatgaaatgaataaatcttaggaagctgagcactgcatctctcaacatgtcccc

SEQ ID NO: 687226 - DNA, 1124 bp, Homo sapiens
gaagtgcctctaagcagacctcaaacaagctccttgcctcccataagcttagaaagaggatgcttacatagcaaaactgagtaaatatgcacagggctcataaaaagtcgtaagtgatggaacctaaagaaaaagccagtgcttaataaaatcgcagtgtgaagatagattgctaaatctgtcatcctaggaaaatgccaggcaaatacacagaaactgctgaagattttataagattgtttaaggtttagccatgtaaaagaagtaaggtgctgcattttgggagaagataatccatactctatttctgaaatgttgggtttctagttttcaataatagtacatgaaatggtttgagagttatatttaactttattctcctgcattgatccaaaaggtccaataaaatgttagattttattatttgagaagtaatcatttattttgcaaagctaaatagggaactctgttttgccctttcatgaagagatggagtttctgcagctggagcaccatgtgcagctccatgggctttgcaatgtccacccatgtttgatggagaaagagagtaacattttggataacttttgaattgaatggaaagaagtattggtggggtccatgtcttggcttccttactgacttgtcttttttttttttttttttttttttatttttttttttgagacagtcttgctctgttgcccaggctggagtacagtggcgacctatctcagctcactgcaacctctgcctcccaggttcaagcaattctcctgcctcagcctcctgagtagcagggattacaggcacctaccaccatgcctggctgatttttgtatttttagtagagacagggttttaccaggttggccaggctggtctcgaattcctgacgtcaggtgatccacctgcctcgctgggtggatgaagtgctgggattacaggcgtgagccaccgtgcccasgcactgacttgtttttaatgtggttgcattacttacttttctgcaccttctttaactttaaatgaaaaataacctttcctagcaaaatactgagtgcgtaattagtagataggtgagatagcactgctggcagaggtcatgcatgaatgaatgaaac

SEQ ID NO: 687227 - DNA, 624 bp, Homo sapiens
  misc_feature 494, 515, 519, 561: n = A,T,C or G
tacattaagaacaatgttgttcatatctcggttggcaaaattccacttcagcagctatgacaaaatacaggcgtcagaattactatgaattttagtgttgcaaataaggcattcttagtctatgttttgaaaaataatcaatattattgtagcatattacattagaatagtgatagattagaaaatatattattctgtrtaatatctaacacatttaattcttggccaatcctttggaataaatttcttctggagcagtattattaattatgtccgtatcagtcatttgtgctgcttagtattctgtagtgagctagtgaacctcattgaaggaggttcactttccctcgggattataaatttcattagaaactaacagcaattaagctacgtctgagagaagttagtgacatctgtattgaaataatggatccagtaagatatctcccttaacctaccatggttaagcagagagaaggatgatgaggaaacangaactgtgttttggctgtttncttncacacatacatatccaattctatacataatttgatgctgtantatatagaagtaaatgcccttttatatttctgattcaagccagcacatgttttcactatatgg

SEQ ID NO: 687228 - DNA, 632 bp, Homo sapiens
tataaggatacctgaaaatgtggacttgactttggaactaggtaatgagcagagcttacaagagcttggaggactcagaagaagataagaaaatgaaggaaagtttgaaacttcttggaaactgataaatgattatgaccaaaatgcagatcgtgacatggacaatgaagttcatgctgaaaaggtctcaaatagaaatgacagttattgggagctagagcaaaagtcactcttgttatgccttagcaaaacaaaacaacccccccaaaaaaacaaaattaataataataataataaataattaaaataataaaaacagaagccaggaagtgtggctctaaaatcactagtctcacctctgttatgaggctatagaaaataaaataggccaggcgcggtggctcacgcctgtcatcccagcactttgggaggctgagaygggtggatcatctgaggtcgggagtttgagaccagcctgaccaacatggagaaaccccgtctccactaataaagtacaaaataagccgggcatggtgtcgggcaaagtacttggctgcattttgttcataccctaggggatctgtggaagtctgaaataaagggtgatgacttggccgggcacggtggctcac

SEQ ID NO: 687229 - DNA, 1584 bp, Homo sapiens
tgccatttttatatagggacttgagcatctgaggattttggactcttgagcatggaagggttggaaccaattccctgcagataccaagggacaactctatttatttttccttcattactctgttggttagtactctgatgggcttgcctgaactccagactgtggatctaatttaattcctcttaactattcccacactgtcctcaggtcaacagcaatctgagacacactcttctcatggcagattatgggaccataaagcaggtaagtagttaagtttttggctcagaactaatagactgatatttctttctacatttctttcaccaaaataagtcatggctaagagcaacattaatagtgcaaggaaatattctacgcatcttctgccacaaggtaggaggaattgaacagcggaaaacaataacccaagctaacacaccaggacatttaatatgtatagctttcattataatatattcaaatatatattaaataattgtgaatatttgcttctcctggtttaacaaaaggtatgccaaaattcacttattctgacatcatggactctattgcagaaaatttaattaaataaaataataattagataaatattttaattcatcgttttgtttaaaggatatttaattaatagtccataaataaaacagttctaaattaaaacacaagaaacagttcaaaaattataaatcaactctatcgagaatattgtagaagattctctgtatgcccaactcataacatttttttcagtgccaagtcagccaatatccccatttttgtcatatttatactattgttttagtttagagttaagaacctatggattcagttttaaacaatatagtttaactgtgaccctttaaaatgttagacaattaaaaacactctttatacatgtttgtgacctgattttttcactaaataygatattttagatttttccatgttgacatatgcagctacagtctgttgatttacattattgtgtagtatttttgtatgaacataccaatttactttttatattttcattatggcttataggagttcttttccaacgtttatacttcccttattatgcatttttggaagcaaatatcttcttcgatttgtggcttgtctttctaattttaatggtgtctttcaattaataacagttcttaatttctcaaaaattaaaatttttctttattgtagttttgtgtcttttaaaagacattcttaaccagaatacacaaaccatttttcaatattttaaaggtggttttcctttataaattatgtcttcacttcacctgaaattgatcttacttgcagtatgaggtaatgtgcccagcatcattttttttctcacagatgcaaagctgtttcaacaatatttattgagaaattgtttctctatctattgatctgatgtgttcatataatgactgggtatattttaggttttctattttattcctatagtgctactatcttacttttattcaagaaagatattagaagctcattatcaatgtctacaaaactacctgaaggggttattattgggattatttg

SEQ ID NO: 687230 - DNA, 597 bp, Homo sapiens
catcttgttgcttggatacaatgtcattaatattcttgaggtaatgaaaaaatggaagcaagttatttttccctctgcagtaagagttgcatctaatggagaattttactttctgttattttaatgtaaaatatattcagtgttcttcatattatatattacagttaatatatagcttgaccacaaggacctaatattagactggacattttgccagacatgaactcctcattctttattatttcttaaagaatatcttgaaggattttaatatagttaaaatattatactkttaggtaacatttgggaaacattagataagcattgttaagcatttatttatgactgagcttctcagacatcttatgcaataatttgtatgttttctctccaagcagaagatacaataaatggaagatttcaaatttattttcttcctctagcccttatttttttaatttaatcatgtcaggactataaaatgtccctttgggatgcagtaaaatttggtattgggatggatgaggatggggcaatttgcccatgaggaaattgaaaacatctttatgttgtttttctccctaaagagatgagaaa

SEQ ID NO: 687231 - DNA, 596 bp, Homo sapiens
caaaaatctccaataggataggactgtgcctgttctttaatatatcctaaaaattaagtcagtccaagtgctaaactaaactgcatagcactatcagttggcggcctgtctactatgtaaagttttgggggtttttttgtttgttttgagacagagtctcgctctgtcgcccaggctggagtgcagtggtgcgatctcagctcactgccygcctcagcctcccgggttcaagcaattctctgcctcagcctcccaagtagctgggattataggtgcccaccaccaggtccagctaatttttgtattcttagtagagatggggtttcaccatgttggccaagctggtcttgaactcctgacctcgtgatccacccacctcggcctctcaaagtgctgagattacaggcgtgagccactgcgcccagcccttttttttttttttttgagacagtctcactccgtcaccaagtctgaagtgcagtggcactatctcagctcactgtaagctctgcctcccgggttcatgccattctcctgcctcagcctccagagtagctgggactacaggcgcccaccaccacgcctggttaattttt

SEQ ID NO: 687232 - DNA, 665 bp, Homo sapiens
ttgatggccatgtgtctaaatttccctggacctgtgaatcttgtgtataaaggaagaatattttaagggctgcaattagctttctctgctatgaggtatttctggaaatgactgagctatgacaaactatattaaaattaattcccaagacactgcaacataatgatgggtttaagcttattaatggttaagactgtttttctcttacactgaataagcttcatgttattaatattcattttgagttcatcaacgtgtttttttttttagattttctttgtccctccttgtcagtatataagctgtccatgctcattaatggaaccatgctttcttcccttaccagtttttattgttaagttttttaaaataaaatgtatttaagtattaatatacatgaaggaaagttcacaaatcataatttacagcatggtgaagccagtaaaacatacttgtaaacaccacttggatcaagaaatggaacatgtcagtgttctagaagcatttttggtaacctctaaatattactcctttcttctcccaaagataacgattattctgacctttgacaccatggttcaatattgtatgtttttkaattttatatacgcaaaaatcattcaatacacattcctttttgtctgacatttcttgttcaatagtat

SEQ ID NO: 687233 - DNA, 599 bp, Homo sapiens
tatttacctatatgaaaaatgtagaaagaaaaactgatcacacacaaaaatatgattcatctggatcactgttgccagaatatattattacattggggcattacagcatccacttttttttttttttttttttttagagctggaagatgcttcctctttacattagcatttctaaaaacgcaagatgcacaacactggaatgggagataatttttggattgtacagagatcaggcactaaaaaagtactaactcatggccaggcgtggtggctcacacctgtaatcctagcactttgggaggccgaggcgagtggatcacgaggtcaagcattcaagaccagyctggccaacatagtaaaaccccgtctctactaaaagtacaaaaaattagttgggcatggtggtgagagcctataatcccagctacttggaggctgaggcaggagaatagcttgaacctgggaggcagaggttgcagtgagccgagatcacaccactgcactccagcccagacaatagtgcgaggctctgtctcaaaaaacaaacaaacaaacaaacaaaacctaactcacttaagaataagtcactcctctttcac

SEQ ID NO: 687234 - DNA, 2064 bp, Homo sapiens
aggaggaaatttgatgtcagaaaaagacacaaacaaagcaaaaatgcagtgttaacagttattcccacttttatctttctttacatagatctcacatcgcattgcaaggagcttacgctagtagtaaataagaaatttaggggaaacctgcatgctgcatttttagcatacaagaagtacaaaattctggctttatttttttcttcattaatatgcatggtaggccaggcatggtggctcacgcctgtaatcccagcactttgggaggccgaggcgggcagatcacgaggtcaggagatcgagaccatcctggctaacacggtgaaaccccatctctactaaaaatacaaaacaaattagctgggcgtggtggcgggcgcctgtagttccagctactcaggaagctgaggcaggagaatggcgtgaacctgggaggcggagcttgcagtgagctgagattccaccactgcactccagcctgggcaacactgcactccagcctgggcaacagagcaagattctgtctcaaaaaaaaaaaaaaaaatgcatggtaatcttggttcttttcatacctacgtttgaccgttcagcagtctaattttaattaaatcataacaaagtaacaacattgactatattgattgcatcttgggaattcagaatttattttttcacataatttttcctatgactagctggtcttctgtaggcaaacttttatgatccttgaactttttctggaaatgatgcagcaaactataaatataaaatctgcaatggtatactgtatgtacatatctttcaaggaggatagctccactgatgtaaaaacaaaaagatattaaaaactctgattttcaagctagaaaattatttatgcaccattggctttattttaaaatacatacttgcagaaaagttgcaaaaatgtcagcgtttccatacgcccatcactctgattctactaatgttaatattgtacgtaagtatagtatgatcaccaaaccagaaaactgacattggtataacactgttaactaaacaacagaccttattaggggtttaccagtttttccataatgtccaggctgcaatccacaatcttgcattgtttatagcattcatttcttcttactcttcttgagtctgtgccagttcctgagccttcgcctgccttttgtgatcctgacacttttgaaaactactagtcaatcttgttgtagaatattactcaattttctgatgttccctcctttttttttattgatgtcatgcattgttggcaaaataccatagaagagtattatgtccctctcagtgcaccctatcaaagggcacacgaggccagtatgtcttatcactagtgatactaattttgactatttggttaatatggagtctactgagttttcccagcatgatattagtgttttcccacattagctttagacaaagacacataaattcttaatttcctaaatatgatatactcactatactcttttatgcctcagtttccctgcctaaaaattattatactgcaaccctaaccctcatctcaaccagtgtagtaagaattaatgtgctgtcctttggagattcttggataaaactcactgtataactgcaaatgatcactctatctcattttaaagaagaacataaatagaatggttaaaagtagattggcagcatgtactcatttcacacccagaactacagagacatctgttatatatgtgacaggccaggcctgaaatctggttctctgagaaccagttagtgtttgcccgatttggcctaagtcagcctgattaaacaaagaacatatttatcacttgctacctaacaggctattacactaactagatggataaccacccattgataaggacartaaataactttttaaaaactgtcacattcagggtttctgctgttcatataagagggaaaaaagtcccttgacatactaaggattctggatccatgtgctgtaattctgtcatattagtttgtatctgataatgaagtaccccaccattgcagagaatggcaaacttc

SEQ ID NO: 687235 - DNA, 620 bp, Homo sapiens
gtgaggtcaggagttcgagacaagcctggccaacatggtgaaaccccatctctactaaaaatacaaaaactagctgggcatggtgttgcatgcctgtagtcctagctacttggaaggctgaggcaggagaatagcttgaaccttggtggcagagattgcattgaaccaagatcacaccagtgcactccagcctgggtgagagtgagactccatctccaaaaaaaaaaaaaaaaaaaaaaaaagaggaataggaagtagaaataaggagaggataaaagcatttgaaaaaagttacattgtgggtatggraggcagaaaaaaaaaaaggaaataaaagtagttctaaagtcattgttctttggctgggcatagtggctcacgcccataatcccatcactttggaggccgaggcgagcagaccacttgaagtcaggagttcaagaccggcctggccaacattgtgaaaccccatctctactaaaaataaaaaaaaaaattagctgggcatgatggcactcctgtaatcctagctattcaagaggatcaagtgggaggattgcttgaacaagggagacgaaggttgcagtgagccaagatcatgacactgcactcgaccctgg

SEQ ID NO: 687236 - DNA, 627 bp, Homo sapiens
tatcctagaacttaaagtaaaattaaaaaaaaaatgaagtgcataataatcacactttaagtttagagatgttcattacagtggtatttgccaagcaaaacattaaatatgatctgatgatctgattatamaatagagaattcattaaataaattagaagaaaattcagtacagctattacaattattttagagttgcaataatattagaaggtgcttatcttattaaatagaagaattagtttacagcagcatatgatttcaatttcctttttaaaattataaatagctgggcgtggtggctcacgcctataatcccagcactctgggaggcccagacaggtggatcacgaggtcaggagttcaagaccatcctggccaatatggtgaaaccgtgtctctacgaaaaatacaaaaattagccaggtatggtggcactcgccggtagtcccagctactcaggaggctgaggcagaagaaccgcttgaacttgggaggtggaggttgcagtgagccgagatcgtgccaccacactccagcctgggtgacagaaggagactctgtctcaaaaaataaataaataaataaaaattaaaaattaaaaaaaattgttagaaatatgtaaaaa

SEQ ID NO: 687237 - DNA, 627 bp, Homo sapiens
tatcctagaacttaaagtaaaattaaaaaaaaaatgaagtgcataataatcacactttaagtttagagatgttcattacagtggtatttgccaagcaaaacattaaatatgatctgatgatctgattatacaatagagaattcattaaataaattagaagaaaattcagtacagctattacaattattttagagttgcaataatattagaaggtgcttatcttattaaatagaagaattagtttacagcagcatatgatttcaatttcctttttaaaattataaatagctgggcgtggtggctcacgcctataatcccagcactctgggaggcccagacaggtggatcacgaggtcaggagttcaagaccatcctggccaatatggtgaaaccgtgtctctacgaaaaatacaaaaattagccaggtatggtggcactcgcckgtagtcccagctactcaggaggctgaggcagaagaaccgcttgaacttgggaggtggaggttgcagtgagccgagatcgtgccaccacactccagcctgggtgacagaaggagactctgtctcaaaaaataaataaataaataaaaattaaaaattaaaaaaaattgttagaaatatgtaaaaa

SEQ ID NO: 687238 - DNA, 627 bp, Homo sapiens
tatcctagaacttaaagtaaaattaaaaaaaaaatgaagtgcataataatcacactttaagtttagagatgttcattacagtggtatttgccaagcaaaacattaaatatgatctgatgatctgattatacaatagagaattcattaaataaattagaagaaaattcagtacagctattacaattattttagagttgcaataatattagaaggtgcttatcttattaaatagaagaattagtttacagcagcatatgatttcaatttcctttttaaaattataaatagctgggcgtggtggctcacgcctataatcccagcactctgggaggcccagacaggtggatcacgaggtcaggagttcaagaccatcctggccaatatggtgaaaccgtgtctctacgaaaaatacaaaaattagccaggtatggtggcactcgccggtagtcccagctactcaggaggctgaggcagaagaaccgcttgaacttgggaggtggaggttgcagtgagcygagatcgtgccaccacactccagcctgggtgacagaaggagactctgtctcaaaaaataaataaataaataaaaattaaaaattaaaaaaaattgttagaaatatgtaaaaa

SEQ ID NO: 687239 - DNA, 1342 bp, Homo sapiens
ctgtgtctctctgggacaatttgctttccctctctgtttccccttctgtagtacaggtatatgtatgtgctatatatatatatatatatatatatatatatatatayatatacacacacacacacacacacacacagtgccttcatcaaagggctgttgagaagattcaatgtatctatatatataaagcatttagaagagtgcttggcacaaaataagccccataaaatttctcgctgttgttgattatcattttagatgtaagtgtcagtcagaactcctgacacagacatctccctttccacaggacccagaaatgataacagtaggaggctgcttgctccttctagaccttttcccagggactgtgggttatcccttaagagcctctggtaacaggtttctccagattcatcccacggtcccttccagctcaacagcgccacctgccacacagattttacacatccatgtaaagcttgagggatgaaaggaaattgttggtgttaaagggcaagcaggaaagagaacagcaattgatggccaattcaaaaggtgaacttctttaataaagaatgtgttcccacaatggacacaaactctacaaaaggtaccgaaagacttgatgtaaggacaggacaggcagtccctgggagagatggctcaattgggtgacacacatgatagaagggtaaagaaaattaaacaaccagacactatttgctgcctacaaatttagagaaaaaacaaacctgccacaacccaatcctggggaggtgagtgagtaaagagcttttacttatagttggaaactttataaattgaaatactccttcttgaagtagtagtttagcaatctgatgcaatttaggattatttatgtttacatataatttttgaataaatactatattctcgtggttcaaaatgcaggagtataaagacgatatgcactgaaaattctccttcccacccttctcttccagccacccaggtgcctcctcaccgacagccccggttagtggtttctggtgtgaactttcaggaacatttttatgaacatacacaaatatgtacacattcatttcaccctttcttatgcaaattataacatagcttggcacattgatttctttatttcacatgcatcttggagattttcccataccattttataaagaggcccctcttccttttttatggctgaaagtagtacattgcatgctgttatgggttgaactgtgttcccccaaaattcgtatgttgaagtcctaaccccagatacttcctaatgtgaccttatttggaaacagagtcattgcagatgtatttagttaagccg

SEQ ID NO: 687240 - DNA, 1342 bp, Homo sapiens
ctgtgtctctctgggacaatttgctttccctctctgtttccccttctgtagtacaggtatatgtatgtgctatatatatatatatatatatatatatatatatatatayatacacacacacacacacacacacacagtgccttcatcaaagggctgttgagaagattcaatgtatctatatatataaagcatttagaagagtgcttggcacaaaataagccccataaaatttctcgctgttgttgattatcattttagatgtaagtgtcagtcagaactcctgacacagacatctccctttccacaggacccagaaatgataacagtaggaggctgcttgctccttctagaccttttcccagggactgtgggttatcccttaagagcctctggtaacaggtttctccagattcatcccacggtcccttccagctcaacagcgccacctgccacacagattttacacatccatgtaaagcttgagggatgaaaggaaattgttggtgttaaagggcaagcaggaaagagaacagcaattgatggccaattcaaaaggtgaacttctttaataaagaatgtgttcccacaatggacacaaactctacaaaaggtaccgaaagacttgatgtaaggacaggacaggcagtccctgggagagatggctcaattgggtgacacacatgatagaagggtaaagaaaattaaacaaccagacactatttgctgcctacaaatttagagaaaaaacaaacctgccacaacccaatcctggggaggtgagtgagtaaagagcttttacttatagttggaaactttataaattgaaatactccttcttgaagtagtagtttagcaatctgatgcaatttaggattatttatgtttacatataatttttgaataaatactatattctcgtggttcaaaatgcaggagtataaagacgatatgcactgaaaattctccttcccacccttctcttccagccacccaggtgcctcctcaccgacagccccggttagtggtttctggtgtgaactttcaggaacatttttatgaacatacacaaatatgtacacattcatttcaccctttcttatgcaaattataacatagcttggcacattgatttctttatttcacatgcatcttggagattttcccataccattttataaagaggcccctcttccttttttatggctgaaagtagtacattgcatgctgttatgggttgaactgtgttcccccaaaattcgtatgttgaagtcctaaccccagatacttcctaatgtgaccttatttggaaacagagtcattgcagatgtatttagttaagccg

SEQ ID NO: 687241 - DNA, 1342 bp, Homo sapiens
ctgtgtctctctgggacaatttgctttccctctctgtttccccttctgtagtacaggtatatgtatgtgctatatatatatatatatatatatatatatatatatatatayacacacacacacacacacacacacagtgccttcatcaaagggctgttgagaagattcaatgtatctatatatataaagcatttagaagagtgcttggcacaaaataagccccataaaatttctcgctgttgttgattatcattttagatgtaagtgtcagtcagaactcctgacacagacatctccctttccacaggacccagaaatgataacagtaggaggctgcttgctccttctagaccttttcccagggactgtgggttatcccttaagagcctctggtaacaggtttctccagattcatcccacggtcccttccagctcaacagcgccacctgccacacagattttacacatccatgtaaagcttgagggatgaaaggaaattgttggtgttaaagggcaagcaggaaagagaacagcaattgatggccaattcaaaaggtgaacttctttaataaagaatgtgttcccacaatggacacaaactctacaaaaggtaccgaaagacttgatgtaaggacaggacaggcagtccctgggagagatggctcaattgggtgacacacatgatagaagggtaaagaaaattaaacaaccagacactatttgctgcctacaaatttagagaaaaaacaaacctgccacaacccaatcctggggaggtgagtgagtaaagagcttttacttatagttggaaactttataaattgaaatactccttcttgaagtagtagtttagcaatctgatgcaatttaggattatttatgtttacatataatttttgaataaatactatattctcgtggttcaaaatgcaggagtataaagacgatatgcactgaaaattctccttcccacccttctcttccagccacccaggtgcctcctcaccgacagccccggttagtggtttctggtgtgaactttcaggaacatttttatgaacatacacaaatatgtacacattcatttcaccctttcttatgcaaattataacatagcttggcacattgatttctttatttcacatgcatcttggagattttcccataccattttataaagaggcccctcttccttttttatggctgaaagtagtacattgcatgctgttatgggttgaactgtgttcccccaaaattcgtatgttgaagtcctaaccccagatacttcctaatgtgaccttatttggaaacagagtcattgcagatgtatttagttaagccg

SEQ ID NO: 687242 - DNA, 964 bp, Homo sapiens
aggttatcttatggtttctactttctttctacatgagtagaatcctgtctacgagacctcctgtgacctcggagttttaattaaaatttaaattgcccttggccgggcgcggtggctcacgcctgtaatcccagcactttgggaggccgaggcgggcggatcacgaggtcaggagatcaagaccatcctggctaacacggtgaaaccccgtctctactaaaaatacaaaaaagtagccgggcgcggtggcgggcgtctgtagtcccagctactcggaaggctgaggcaggagaatggcgtgaacccgggaggcggagcttgcagtgagccgggatcgcgccaccgcactccagcctgggcaatagagcgagactccatctcaaaacaaaacaaaacaaaacaaatttaaattgccctttcaaaaaactctcaattgaatgactaaaacgaaatacaaaaaaaaaaagcttcattttaacttttgtcttgtgctgttactggagagcttgttgaaaaggaaggatcacagaaaaagtactgatgaaggaagcaaaacacttaaacttmgatgcacttggagagactgacgtcgaagggttagggttgctgctgtgtttttctgctcaaggaccccctataaaacattgtgttcccaggggataatggaccaggagcagctataaacaaacatgctttaaaagccacccaagtagaagagcattctggagagacaagcctgggttattacaagaatgaaagctctgaacaggaaggtgtttaacctcatctaagatcttacaatacagctaaagctagaggagcccatgtttgttagaaagatgtgtggaaagttttaaagttacataagcataagagattggaattggatcatgttcatcaaaagtgtggatttcgatttcagaaaggttagatgttattttccacactaaaattatccagtaaa

SEQ ID NO: 687243 - DNA, 679 bp, Homo sapiens
tttttttaactacaaacatatggacccagtcctaatttatttttatttctttttttgtctgagtttttccttattcatggggcggtagatggtgaatgagttccccaagaggctggtactgctagatgagggcttcctgtktttttcctgctgaagtttcttctgatatcctacaggggatcaggatggcagttgaatgaataaattgctgccaggaaggagggaactcctccaggaagggtttggggatggaaaggggcagcaggacctggccagctaactgcattagagaatgtttgccctgggaacttcttgcttgatattcctctgggtcccaacaagtcttcctacggggcacacagacatttcatgaattctgtcttgtgtccccgcactgatctgtaccaacctcccattaacagtatgtcaacccagccttcgaaaggatgatgggctaccacaaaggtgagctcctgggaaaagaactcgctgatctgcccaaaagcgataagaaccgggcagaccttctcgacaccatcaatacatgcatcaagaagggaaaggtgggttacaccagcaaaaccaatccacgaaccctctccccaatgcacttttttttctgagttttagaatttcatccttaagattagcttttttaataatgtcataattaagtgaa

SEQ ID NO: 687244 - DNA, 601 bp, Homo sapiens
catcatctagtagttgaacaaaataatattgtaaaacatgatttttaaaaatcaactgaattaagtgactttgcttccttgttagtggagacctttattgaaawtttggattctggtggggcgcggtggctcatcatgcctataatcccagcactttgggatgccaagggggggccgatcacttgaggtcaggagttcaagaccagcctggccaacatagtgaaatctcgcctctactaaacataaaaaaattagcgggtgttgtggtgcatgcctgtaatcctagcttctcaggaggctgagacacgagaattgcttgaacccaggaggcagaggttgcagtgagctgagattgtgccattgcactccagcctgggggacagagtgagactctgtctcaaaaaaaaaaacaaaaaaaaaacaaaaaaaaaaaaggaaatctggattctaaacttgcactctgtgggtaggggacactcttctcagtggctggtgatgactgtgatcccacttgtcgagctctgtgggagtcccggcagtcctccgcaactgtcggctggttgttactgtctcagcgcctgccttctgattggttagcaaa

SEQ ID NO: 687245 - DNA, 601 bp, Homo sapiens
catcatctagtagttgaacaaaataatattgtaaaacatgatttttaaaaatcaactgaattaagtgactttgcttccttgttagtggagacctttattgaaaatttggattctggtggggcgcggtggctcatcatgcctrtaatcccagcactttgggatgccaagggggggccgatcacttgaggtcaggagttcaagaccagcctggccaacatagtgaaatctcgcctctactaaacataaaaaaattagcgggtgttgtggtgcatgcctgtaatcctagcttctcaggaggctgagacacgagaattgcttgaacccaggaggcagaggttgcagtgagctgagattgtgccattgcactccagcctgggggacagagtgagactctgtctcaaaaaaaaaaacaaaaaaaaaacaaaaaaaaaaaaggaaatctggattctaaacttgcactctgtgggtaggggacactcttctcagtggctggtgatgactgtgatcccacttgtcgagctctgtgggagtcccggcagtcctccgcaactgtcggctggttgttactgtctcagcgcctgccttctgattggttagcaaa

SEQ ID NO: 687246 - DNA, 601 bp, Homo sapiens
catcatctagtagttgaacaaaataatattgtaaaacatgatttttaaaaatcaactgaattaagtgactttgcttccttgttagtggagacctttattgaaaatttggattctggtggggcgcggtggctcatcatgcctataatcccagcactttgggatgccaagggggggccgatcacttgaggtcaggagttcaagaccagcctggccaacatagtgaaatctcrcctctactaaacataaaaaaattagcgggtgttgtggtgcatgcctgtaatcctagcttctcaggaggctgagacacgagaattgcttgaacccaggaggcagaggttgcagtgagctgagattgtgccattgcactccagcctgggggacagagtgagactctgtctcaaaaaaaaaaacaaaaaaaaaacaaaaaaaaaaaaggaaatctggattctaaacttgcactctgtgggtaggggacactcttctcagtggctggtgatgactgtgatcccacttgtcgagctctgtgggagtcccggcagtcctccgcaactgtcggctggttgttactgtctcagcgcctgccttctgattggttagcaaa

SEQ ID NO: 687247 - DNA, 606 bp, Homo sapiens
aatatcttcaataccccaaaaatatttatcttcccactgaataattttaaaactgaaccctatgtacccccttgtaagtgactcagatatacaaatgcaatgtctgcctctcttttcccatccacctttttaagttgtcaatatatttcataatttactctcttctgattgaatcagttctgtgatctattttctacttctgattcccagtcctttctattccaaatactagggtttttttttttcaaactggtacttaraagtgtggtgagaatatctaaactggcatttaatctttgatcatattatcctaaatctattacatttactctcctactagccagatggtaagttattgcagtactgatattaaagacctttctctcatattctaagtgtctatctttgtatgtaaacaagttcttaaataggtacacaatatgggagatgccaaccatgggaaatatacattattcactttataaaatatttctatattttccaaagattttaccaaaaaatttctttaaagtaaactattgaatgcatttaaacataacttgctttataaaaccttttgtcagagacttgtaaatggaaccatat

SEQ ID NO: 687248 - DNA, 612 bp, Homo sapiens
taaaatattgatcataattctaaaacatcaataccaaatgcattaatttttcacttacagaactacaaagttgcagaatgaggaatatatacaggtcaggggctyaacccctaatgtctagacaaaaggacaattatcttgccatgttttccttttgaactgtattctagattacaggcttaataaagatgaagatataattggtcattgtataaatctcattgctcaatacatagatgtggaattcaattactaaaattaataaatggtgaaaagaaaactttaaataaaatattatgcttcgtattccatattagtgataagaaattctacagtaggtgctaccttacctgtgaaattaaacatttatgaatttctatgccacaaaaagagaaatgaaactatactaaaacactttggcctgtatttgttgcttcctttgtcagcagaatggctctccttcttcctggaccctccactttcctcttccatctgcctctctgtctcctttcatctcctctacttccctggttcattctcctacatttgcaataatgctcacaacttccctactcttatttaccatcatccttcagagtgtaattccactga

SEQ ID NO: 687249 - DNA, 612 bp, Homo sapiens
taaaatattgatcataattctaaaacatcaataccaaatgcattaatttttcacttacagaactacaaagttgcagaatgaggaatatatacaggtcaggggcttaacccctaatgtctagacaaaaggacaattaycttgccatgttttccttttgaactgtattctagattacaggcttaataaagatgaagatataattggtcattgtataaatctcattgctcaatacatagatgtggaattcaattactaaaattaataaatggtgaaaagaaaactttaaataaaatattatgcttcgtattccatattagtgataagaaattctacagtaggtgctaccttacctgtgaaattaaacatttatgaatttctatgccacaaaaagagaaatgaaactatactaaaacactttggcctgtatttgttgcttcctttgtcagcagaatggctctccttcttcctggaccctccactttcctcttccatctgcctctctgtctcctttcatctcctctacttccctggttcattctcctacatttgcaataatgctcacaacttccctactcttatttaccatcatccttcagagtgtaattccactga

SEQ ID NO: 687250 - DNA, 633 bp, Homo sapiens
caggggaatctgcaggtgaggtagtcctcacccccagtgacacagggcaggacctcgcagggctggagatggaggaggccgggtggcaggcacaggcaggcaaagaatgctgccgcagacgagaatgaataaacaggctccttggatgtcagaggctgggggtggggggacactttgaacctcacgcctggctggggatgtttggacaaggcaggcggccagcgggtgtcatcagggctaaaattaacctccacttcccgctcagcccctccccctgggccaggagggaggctggggccccggccatcacttaagtgagcgctgtatgccggacaaagctccttgaagaaatcaatgcacgtggtcctytcaacaaccccgacagctgctatcagtaatggcattgtgatttatccccattttgcaggtgaggaaaccaaggcaccgagaaaaagggaggctgatagccacaaaactcaaaagcagcagagtcaggactcgaacctgggattcagggagtgtgttctcacctggaggtctccctgaaagccaggggagatgaaagagaccctgagcgatgagtccttggcggaggcgggcatgcggcccctcattcactctcccctagggacc

SEQ ID NO: 687251 - DNA, 633 bp, Homo sapiens
caggggaatctgcaggtgaggtagtcctcacccccagtgacacagggcaggacctcgcagggctggagatggaggaggccgggtggcaggcacaggcaggcaaagaatgctgccgcagacgagaatgaataaacaggctccttggatgtcagaggctgggggtggggggacactttgaacctcacgcctggctggggatgtttggacaaggcaggcggccagcgggtgtcatcagggctaaaattaacctccacttcccgctcagcccctccccctgggccaggagggaggctggggccccggccatcacttaagtgagcgctgtatgccggacaaagctccttgaagaaatcaatgcacgtggtcctctcaacaaccccgacagctgctatcagtaatggcattgtgatttatccccattttgcaggtgaggaaaccaaggcaccgagaaaaagggaggctgatagccacaaaactcaaaagcagcagagtcaggactcgaacctgggattcagggagtgtgttctcacctggaggtctccctgaaagccaggggagatgaaagagaccctgagcgatgagtccttggcggaggcgggcatgcggcccctcaytcactctcccctagggacc

SEQ ID NO: 687252 - DNA, 624 bp, Homo sapiens
gagggagggcagagggctgggatgagactggaagggttttcagggtctggccccacaggccttgtcaaggggttgggctttgccctaagaacaagaagaaactagtggctaactgggcaatggcatggttggactcacttttgccagactggatgccgtgtgaggagtacattggtacagacaaggttagaggccaagagattacataaggccagtagccatcatccaggcaagaaatgacagtgactcagagggacatccacaagggttgggattgattagatgcaggtgacgagtgtgagtgaggagtcagccatgactcccaggaccctggcatgtaggccctgctccctgaactgtgggtggaagscaggcacaatagagagaagaataagggtcctcactgggtccctactcaagggtttccactgagtttgcccttgagacaagggaaagctgctgttaaagatgcaagtctaaggaaataactcaactccagtttttcaaaaagtatgttgtaccaatgacccaatgctcttggttcaatgaataaataagtttggaaatgctgtagaccatatatctcccaattagagcttcacaatccaatggggcacatacagc

SEQ ID NO: 687253 - DNA, 602 bp, Homo sapiens
ccatgcccagctaatttttgtatttttagtagagatggagtttcaccatgttggccaggctggtcttgaactcctgacctcagatgatccgcctacctcggcctcccaaagtgctgggattgcagccgtgagccaccatgcccagcctccttccttgttgckggatccagtgaggccaccaggtaagggacaagggtttaaggctttaaatgctgcaataagtaactgcatgtggactgtgataaagctgcaggggttttcttgcttctacggttcctaccagcactcttggcctgcctttcttagatgtgatttcctttattaatttgccagtgtttcacctataaattccaggtatatttgaagggagatatatttctaaaggaagaaactgaagccttgggctcaaaatgacttgaggtttaatggaatatgatcagcttaggcttctaatgtactctccagcgaagaaaagtgtagatgctgagcagggagatatggattcaaatcttgactcatttaatttctaactatgtgtctttagcaagtcaaaacttttctaagccttaatatactgatctgaagaatgctgtcaaatttta

SEQ ID NO: 687254 - DNA, 1045 bp, Homo sapiens
tagcacactttcagattgtggagcttcgaactaagtattgtctttcttcatccctgatgagtatcaatttttcctcttttcttcaaaagacatgttagacctcagcaaatacctgtaaccttgagatattgtcatactgctaatgatagtttagctctatatagaccatctgaaaagatttctttatgatggtcttcccagctgcttcagctgcatacacacaaaatagatgaatcacattactaacaaggatattttcttaacagcatggattgagtaggaggggtagagggagatggcaatgaaaaaaggaacttgattgcttctgtttgaaataactatctgattaaaacaacagcaacaataataacaccaacaaagaggaaaatatactctaccaccaaaaaaaaaaaaaaaaacacaacaattttcactttggatggaccatttcctttgaaatgaaaagaaaaaatgaagcagttacaccatgggtgtccctagcacaagatgtatccaacctataacttctgattactcagaaattcacagaaagtaaattcagataggattaagaaagcccctagggactaacaagtggaagaatatttatttgtttgcaccaaatagttgactgaatactgaataactattagcttaaattgcaataaactcagttatttaactgagatctaacagtttrcatttttcttttttttctcctaagcagcctctgaataacatctctagagtatctcacgaacagaatgactatgatcttcataactgaatagcagctagcaggattgttcagcaattttctaattttttttgtttgttttctaagatgacacttgttagaatttaggaatagacactcacagagatatttttccccttttggaaaagagtaaagggttgctttatctagaaacatgcatgtattttatgatgaagggataaagtttgaaacagaagaccaggttctgactcagaattttgtttcctaatcactggttaatctccacctgcccctttttccacatcc

SEQ ID NO: 687255 - DNA, 891 bp, Homo sapiens
tgccccattttacagatgagacactgacatccaggagataattagtagcttttctacagtcatacatttattgtgccctctgaatcaaccaatcagtccttggttgattcaggattccactccgtctctttcgtatctaaaaacctatgttcttatcttcctcactccatgatgcctctatgtaactctagacagtggttcctgacttcgttttttctgcaaaactgtgacttacaatgaacagtgtatagtgcctatagtcatgagtgcatcatttatacaaatattaatgcacaattgccaatgagctggataaacatatgagagtatattccttctactaactaaagcatgcagaaagtatattttagtgataacttaaaatgtacatcatcctccaaacttggataccttagcttatattaaaatttttttataatacttctgccaactcttgagacatattctaatgtatcagtaaagaccatgaytgacaaccaatattttgcatatttatcataatttcatttttatttttaaagttatatttgatgtatatattactttgagcctttaaaataaattttaaaactgaatgactattgctggcctagactgagagtagactgtttttcatatgtaagcagcatgtgtagtggtaaataagttgatctgcatttttagtgtacctaaacatccagtaaactcccagagtaccaaaagatttttaaatatttgaaaaaaacacagagacatctgtcaggcacaacatatgctagtattgttaagcttggagacctaaatacataataatgaaacactaggatgtttcttttggtcttgtaacattattaaataaattaccaagacactcaaagtgtcattgatgaa

SEQ ID NO: 687256 - DNA, 615 bp, Homo sapiens
tgtatctcctttctcctatacagagaggtgatcaaagacactgaggataacagaagagttcatatggatgacttatttaccatatctcatgatatgaacacagcagtcttagaataataatttcaatgtgattattgataaaatcttggattttttggtagttcatattgttcttaagatgtatctcgtatggatgtagagaagaattgctttgcttataaggcccttggaatagtaccttactgtgttattatacctctaactggatatatatttagatctattgtatattttatttttaatatttatagattacttcttaaaatttaacttaaaaaaccatggaaacaagttgcatattttcaaagaaaaattcactaaaaaagaatattcaaagaagtctagtttttatctatgtcctccgttttatttgatctttgcaaaaactataaataataaatcaatataaatcaaaatttatttattcatcaaaaaacaagtatgtgtgtgtatatatatgggtatgtatgaatatatatgcatatgtacatacatattcacacacaccacttacatsttagtattggttgcgtataaatgttggggttatcatga

SEQ ID NO: 687257 - DNA, 601 bp, Homo sapiens
ctcaaattgccacgggctttggccagttgttacacagtttttctttgttggaaaagcgataaggttaatgactgctatgttttcctaaccatgttcctaatctagcaattttgccccttaaagggtaaaatagattcactatcaacatataaataataatttcccagggaccttcaaacagatgaytaatgcccttgcctttgggtgtctgttcttttaagtgactgataggaacaaaaccaagaccatacaaaaacctttttactgggaatagaaaatgtgaatggtgcataggagactgagatccaaagaagaatgaaagcaaaccaaactcaggaatcagtagcaaacaaatgtagctggcaaatttctacgtcttggaggagataatcttcctgaaatagaatcacagccagttgctttgctaacaaataactgcagtgtttatttgaacactgtatttggattatgctctttttaatgttttaggattggtaaatgtgaaattgcatattaaaggaaacataaagtcacaaacatatctctacacacacttacccatgtctggaaggcctatacagaaatttaatgcttaaaatgt

SEQ ID NO: 687258 - DNA, 603 bp, Homo sapiens
tttctgaggccagcaggcatataggaatcttaaccagctacagggagaagttttgtttttctaggactagacatattttttttttaactggggcagaaaatgctttgggtttttcatgtttaatcacagaatttggagaaaactttaggactttatatggataacatcattattaactatgaaataataaaaagtggtgttctgattcccataatgacwatctaataatgtatgacaaggtgtattgaaagcagttcacattttcaatggttgactttagatagatatatataagatgttttcagagaaaatttatggtatttttttcaaaaattactcgacagtaatttaattagaaatgaaattgtgcttttaaatactatatttatgataccttttaggtacttactcatactcccaacagtcttttctattactacagcaaaatatttgagagatgctcccactttgcatttttctaaacaccagtgtcttatttgttcttcaaaagcaatatttaaaataaattaacttatgttaagtgaattagagtttgaggttaactggaaaggaatactgtgtagagtttcaaataataaaacc

SEQ ID NO: 687259 - DNA, 603 bp, Homo sapiens
tttctgaggccagcaggcatataggaatcttaaccagctacagggagaagttttgtttttctaggactagacatattttttttttaactggggcagaaaatgctttgggtttttcatgtttaatcacagaatttggagaaaactttaggactttatatggataacatcattattaactatgaaataataaaaagtggtgttctgattcccataatgacaatctaataatgtatgacaaggtgtattgaaagcagttcacatttkcaatggttgactttagatagatatatataagatgttttcagagaaaatttatggtatttttttcaaaaattactcgacagtaatttaattagaaatgaaattgtgcttttaaatactatatttatgataccttttaggtacttactcatactcccaacagtcttttctattactacagcaaaatatttgagagatgctcccactttgcatttttctaaacaccagtgtcttatttgttcttcaaaagcaatatttaaaataaattaacttatgttaagtgaattagagtttgaggttaactggaaaggaatactgtgtagagtttcaaataataaaacc

SEQ ID NO: 687260 - DNA, 603 bp, Homo sapiens
tttctgaggccagcaggcatataggaatcttaaccagctacagggagaagttttgtttttctaggactagacatattttttttttaactggggcagaaaatgctttgggtttttcatgtttaatcacagaatttggagaaaactttaggactttatatggataacatcattattaactatgaaataataaaaagtggtgttctgattcccataatgacaatctaataatgtatgacaaggtgtattgaaagcagttcacattttcaatggttgactttagatagatatatataagatgttttcagagaaaatttatggtatttttttcaaaaattactcgacagtaatttaattagaaatgaaattgtgcttttaaatactrtatttatgataccttttaggtacttactcatactcccaacagtcttttctattactacagcaaaatatttgagagatgctcccactttgcatttttctaaacaccagtgtcttatttgttcttcaaaagcaatatttaaaataaattaacttatgttaagtgaattagagtttgaggttaactggaaaggaatactgtgtagagtttcaaataataaaacc

SEQ ID NO: 687261 - DNA, 1183 bp, Homo sapiens
tgctacatgacgagttaatgggtgcagcacaccagcattgtacatgtatatatatgtaactaacctgcacaatgtcgacatgtaccctaaaacttaaagtataataataataaaatttaaaaaaacaacgttttagaaatatttgcataggaagaatagaaacgtattggaatctttcttttagcatgattaatcaggacacaatttctaataattcaggaaaatcactttcaacctcacagctcattattggtgaatattacaaattttgaaattttttctttatttcaaatttgtttgacaaatattctgttgtcaaatttagagaaatctaccaactttctttcatttgtgagctgttgaatatggaagaattttccactgaatagctgtgatatatggaatttacagaataatatgacttgcatttgctattggctcctgtcctttgctaaaatcctgtccccttgccagatcctggtctcagatgagaagggattaacattcttatcttgggaagagaggcagagacatgaaaagaatgagcaggttgggtaagaaaatagcaagcataccctcccaggaaacagggagggtacatggtggattcctctacacccggtatgctcctggaccaggttaagaaaagtatatcaattaatttggacagttctgaaacaatggctctgtccttaaatctcagctagccacagaataaagagtcttttttttttctttttgagaaggagtctcactctgtcacccaggctggagtgcagtggcgtgatcttggctaactgcaacctccgcctcccaggttcaagtgattctcctgcctcagcctcccaagtgctgggattacaggtgcatgccaccacacccagctaattttttttatttttggtagagacagcgttttaccatgttggccaggctggtctcaaactcctgacctcaagtgatccacccgcctcagcctcccraagtattgggaatacaggggtgagccaccgcacccagccgaacccacacttttttaagccattgctgacaacctctaccaggcgtcaaaatactgcagcctggctgaggatgaatttagatacatcccatagtaaggctcaggaattcctggctaactagttacaaagcctcaatatacatttaaaatgttgagtgccac

SEQ ID NO: 687262 - DNA, 600 bp, Homo sapiens
  misc_feature 346: n = A,T,C or G
tatgaatcaaaatgtaagttaattttttttaccttttgtaagagttaagataaattaagagtaaagataaattaagataaaaatgctgtttgttttggaaacttgatatttttgtaagaaaagtaggaaaagtaggtagacaaggagaggaacatttttcaagcagaatgagttgttaccaactaatttctttacacttycccacaggacagtctttgtaatggatatactctgtttacaaaatttggactgtgatctgagattacaaattctgtagttctgtatttaatccttgcatgcatttgttaccttttcaatattgattctgaagtttagaatccaattngtttttctgagaagtgtgatttgagattgattttttgcaaaatgaaaaataaaagatgcaccatacatggggaaatgaatgaaagaagcttacttgctctatatgaatcctaattgtaatagtttatgctaatgtatctttatgacaaagatctgtggtgaactttgactagcattgggagtgaaaatgtttggttctcagtttaaattctaaagagcaaaatgcatctgctaacttctgaatagcaatagtac

SEQ ID NO: 687263 - DNA, 1132 bp, Homo sapiens
tgcctatttttcctaagactctaaacacgcaagtcactgtttaacttcccgggtattatattttactgtctgatgtcttagtcatttccagcatcctgggaataaagttgagagcaggtaagaattattatccctgacatactgccgagcctgtggcttagttataaagaaaaccagctattccctcactgctcattgtctcttccatttgarttagaacgggagtatattgttgtattcaagaactgcttcaggctgggtccggtggctcacgcctataatcccagcactttgggagaccgaggtggatggatcacaaggttaggagttcgagaccatcctggccaatatggtgaaaccctgtctctactaaaaatacaaaaaatagctgggcgtggtggtgcatgcctgtgattcccagctactcgggaggctgaggcaggagaatcacttgaacctgtgaggcagaggttgcagtgagctaagatcatgccactgcaccccagtctggcgacagagctagactccgcctcaaaaaaaaaaaaagaaagaaagaaagaaaagaactgcttcagcatttcaggggtattctgataattataaagttgctcagccaagtaacttttcgtatagctggtttacactgtgaggccatttttttaaggtgtaaaaacaaactaattattatcattaaaaatatgtatttaaaagtcctctttcatacagattaaataacgtcagaccttagaagtgaccagaaattaactaggaaatttggaatgttgcgagggaacaatgaagaagttgtccaatttgactataaattaaactattttgcaattttcctccaaaacaaaaacagaaacaacccccccaaaatactttccaccctgaacaacttcagtaatgctatttttctttgcaccctgactgtccttggtccacattcccagctgctttttatgttccaaatgtctgtttacttccagaagaaacaaacaaaaggaaacactgaagggcacctctttcaacattgaccttcagtgaacatgttggctcatttaattcctcctctccttagaaccaactggatactcaaactctgtaaagggctgtggaggaggcaacagga

SEQ ID NO: 687264 - DNA, 1132 bp, Homo sapiens
tgcctatttttcctaagactctaaacacgcaagtcactgtttaacttcccgggtattatattttactgtctgatgtcttagtcatttccagcatcctgggaataaagttgagagcaggtaagaattattatccctgacatactgccgagcctgtggcttagttataaagaaaaccagctattccctcactgctcattgtctcttccatttgagttagaacgggagtatattgttgtattcaagaactgcttcaggctgggtccggtrgctcacgcctataatcccagcactttgggagaccgaggtggatggatcacaaggttaggagttcgagaccatcctggccaatatggtgaaaccctgtctctactaaaaatacaaaaaatagctgggcgtggtggtgcatgcctgtgattcccagctactcgggaggctgaggcaggagaatcacttgaacctgtgaggcagaggttgcagtgagctaagatcatgccactgcaccccagtctggcgacagagctagactccgcctcaaaaaaaaaaaaagaaagaaagaaagaaaagaactgcttcagcatttcaggggtattctgataattataaagttgctcagccaagtaacttttcgtatagctggtttacactgtgaggccatttttttaaggtgtaaaaacaaactaattattatcattaaaaatatgtatttaaaagtcctctttcatacagattaaataacgtcagaccttagaagtgaccagaaattaactaggaaatttggaatgttgcgagggaacaatgaagaagttgtccaatttgactataaattaaactattttgcaattttcctccaaaacaaaaacagaaacaacccccccaaaatactttccaccctgaacaacttcagtaatgctatttttctttgcaccctgactgtccttggtccacattcccagctgctttttatgttccaaatgtctgtttacttccagaagaaacaaacaaaaggaaacactgaagggcacctctttcaacattgaccttcagtgaacatgttggctcatttaattcctcctctccttagaaccaactggatactcaaactctgtaaagggctgtggaggaggcaacagga

SEQ ID NO: 687265 - DNA, 1132 bp, Homo sapiens
tgcctatttttcctaagactctaaacacgcaagtcactgtttaacttcccgggtattatattttactgtctgatgtcttagtcatttccagcatcctgggaataaagttgagagcaggtaagaattattatccctgacatactgccgagcctgtggcttagttataaagaaaaccagctattccctcactgctcattgtctcttccatttgagttagaacgggagtatattgttgtattcaagaactgcttcaggctgggtccggtggctcacgcctataatcccagcactttgggagaccgaggtggatggatcacaaggttaggagttcgagaccatcctggccaatatggtgaaaccctgtctctactaaaaatacaaaaaatagctgggcgtggtggtgcatgcctgtgattcccagctactcgggaggctgaggcaggagaatcacttgaacctgtgaggcagaggttgcagtgagctaagatcatgccactgcaccccagtctggcgacagagctagactccgcctcaaaaaaaaaaaaaraaagaaagaaagaaaagaactgcttcagcatttcaggggtattctgataattataaagttgctcagccaagtaacttttcgtatagctggtttacactgtgaggccatttttttaaggtgtaaaaacaaactaattattatcattaaaaatatgtatttaaaagtcctctttcatacagattaaataacgtcagaccttagaagtgaccagaaattaactaggaaatttggaatgttgcgagggaacaatgaagaagttgtccaatttgactataaattaaactattttgcaattttcctccaaaacaaaaacagaaacaacccccccaaaatactttccaccctgaacaacttcagtaatgctatttttctttgcaccctgactgtccttggtccacattcccagctgctttttatgttccaaatgtctgtttacttccagaagaaacaaacaaaaggaaacactgaagggcacctctttcaacattgaccttcagtgaacatgttggctcatttaattcctcctctccttagaaccaactggatactcaaactctgtaaagggctgtggaggaggcaacagga

SEQ ID NO: 687266 - DNA, 1132 bp, Homo sapiens
tgcctatttttcctaagactctaaacacgcaagtcactgtttaacttcccgggtattatattttactgtctgatgtcttagtcatttccagcatcctgggaataaagttgagagcaggtaagaattattatccctgacatactgccgagcctgtggcttagttataaagaaaaccagctattccctcactgctcattgtctcttccatttgagttagaacgggagtatattgttgtattcaagaactgcttcaggctgggtccggtggctcacgcctataatcccagcactttgggagaccgaggtggatggatcacaaggttaggagttcgagaccatcctggccaatatggtgaaaccctgtctctactaaaaatacaaaaaatagctgggcgtggtggtgcatgcctgtgattcccagctactcgggaggctgaggcaggagaatcacttgaacctgtgaggcagaggttgcagtgagctaagatcatgccactgcaccccagtctggcgacagagctagactccgcctcaaaaaaaaaaaaagaaagaaagaaagaaaagaactgcttcagcatttcaggggtattctgataattataaagttgctcagccaagtaacttttcgtatagctggtttacactgtgaggccatttttttaaggtgtaaaaacaaactaattattatcattaaaaatatgtatttaaaagtcctctttcatacagattaaataacgtcaraccttagaagtgaccagaaattaactaggaaatttggaatgttgcgagggaacaatgaagaagttgtccaatttgactataaattaaactattttgcaattttcctccaaaacaaaaacagaaacaacccccccaaaatactttccaccctgaacaacttcagtaatgctatttttctttgcaccctgactgtccttggtccacattcccagctgctttttatgttccaaatgtctgtttacttccagaagaaacaaacaaaaggaaacactgaagggcacctctttcaacattgaccttcagtgaacatgttggctcatttaattcctcctctccttagaaccaactggatactcaaactctgtaaagggctgtggaggaggcaacagga

SEQ ID NO: 687267 - DNA, 1132 bp, Homo sapiens
tgcctatttttcctaagactctaaacacgcaagtcactgtttaacttcccgggtattatattttactgtctgatgtcttagtcatttccagcatcctgggaataaagttgagagcaggtaagaattattatccctgacatactgccgagcctgtggcttagttataaagaaaaccagctattccctcactgctcattgtctcttccatttgagttagaacgggagtatattgttgtattcaagaactgcttcaggctgggtccggtggctcacgcctataatcccagcactttgggagaccgaggtggatggatcacaaggttaggagttcgagaccatcctggccaatatggtgaaaccctgtctctactaaaaatacaaaaaatagctgggcgtggtggtgcatgcctgtgattcccagctactcgggaggctgaggcaggagaatcacttgaacctgtgaggcagaggttgcagtgagctaagatcatgccactgcaccccagtctggcgacagagctagactccgcctcaaaaaaaaaaaaagaaagaaagaaagaaaagaactgcttcagcatttcaggggtattctgataattataaagttgctcagccaagtaacttttcgtatagctggtttacactgtgaggccatttttttaaggtgtaaaaacaaactaattattatcattaaaaatatgtatttaaaagtcctctttcatacagattaaataacgtcagaccttagaagtgaccagaaattaactaggaaatttggaatgttgcgagggaacaatgaagaagttgtccaatttgactataaattaaactattttgcaattttcctccaaaacaaaaacaraaacaacccccccaaaatactttccaccctgaacaacttcagtaatgctatttttctttgcaccctgactgtccttggtccacattcccagctgctttttatgttccaaatgtctgtttacttccagaagaaacaaacaaaaggaaacactgaagggcacctctttcaacattgaccttcagtgaacatgttggctcatttaattcctcctctccttagaaccaactggatactcaaactctgtaaagggctgtggaggaggcaacagga

SEQ ID NO: 687268 - DNA, 1175 bp, Homo sapiens
attatctttagaaaactaagacagaaacagaaagtcacataccacatgttttcccttataagtaggggcttaataataaaaacccatggacccatagagggaaacagcagacactgaggcctactggaaaatggagggtgggaggagggagaggatcaggaaaaataatgggtactaggcttagtacctgggtgatgaaataatctgtccaacaaactcctattacatgaattgacctaaataacaaacctacacatgtacccctgaacttaaagtaaaagttagaaaaaaaaaaaaacagaagaaaaaaagtgtaataaaaaaattgttttttttttttttttgagatggagtttcrctttcgttgcctaggctggagagtaatggcgccatctcggctcactgcaacctccgcctcagcctcccaaagtgctggaattacaggcatgacccaccatgcccagctaaaaattttaaaaacataaaaatgaaaaaatctaataaacgagttataggaaaagtgctataggcattcagaggataaaagatatttctgtctggagaggtggggatctacaaaggcttcatagagaaagaaaaacctgacttgtacttgggccgttgagacaacatataaatatacagagtgatcacctgtggttgaatgaacaacatagaatggcctctacccatatctgtgtagcaggattcactactggactctgcactgtgttgaccacagcaaagctgtaaagagcaagcctctgttgatgcttcctaactataacacattggaaactcaacaatcattgatatgaattccacaggtatgtggaaattattcataaacagtaaaattgaaaacaaatgctagtggtttgtattatggctcattatatgttctataacatccacagtttacaaggtataactatgtacctaatagattatcaataaaatttcccctgaatgtattaaaagttggtcatttaattggagctggggatatacactgagaataaagtggcacttgcctagcttagaactagcgtgcaagaaaatttaattgttgactgtttgttgtgacaatgggctccttcagaaactgggattgctgagtcttatgggcccatgcactggtggctaggagaaaggttaactggggccagctgtgg

SEQ ID NO: 687269 - DNA, 653 bp, Homo sapiens
taatgtgggaagggattagaaaagaggagtttcaggaaagacattggaactcaaaaaattatttcattttaagagaaagtccaataaggagggagaatatgtagatgcttggcatacatacccacagtactgtaactctggcttgtcagaaatattttattttctatttgtcctgtatctgcctactgtgtcccaatattccatgggagctgcaagaggaccagttgaagtagtctgatagcccttcgagtgtgggtgggcccacagatgtatcagtgtctggtgggacaatggagccactgggctgaggagaaggatggaacacttgcattgggagtaaggccaactctgtggccttcatccagcagataaaagtgcatcactgtattagtctgttctcatgctgctaataaagacatacctgagactgggtaatttataaagaaaaagaggtttaatgggttcacagttccacatggctggggaggcctcacagtcatggcagaaggtgaagaaagarcaaagacacatcctacatggtggcaggcaagacacaatgagtgccagcaggggaaatgccagatgcttataaaacgatcacatctcgtgagactcactcattatcatgagaacagcatagggaaaaccacccc

SEQ ID NO: 687270 - DNA, 978 bp, Homo sapiens
ttttttttttttttttttttgagacgaagtctctctcttatcccccaggctggagtgcaaaggtgccatctcggctcactgcaacctcygccgcccgagttcaagcgattctcctgcctcagcctcctaagtagctgggattataggcgcctgccaccacgcatggctaatttttgtatttttagtggagacggggtttcaccatgttggccaggctggtctcaaactcctgacctcaggtgatccacccacctcagcctcccaaagtcctgggataacaggcgtgagccaccacgcccagcccagtctggaggtttcagagtagggcatggagtaggaggtggaggatggagaaggggaggggaataatgtagttaagaaggatagagtttcagggagatggaggtattgatcacaaacattcctgcatcatatctttgcccaatttaagtgacaacgtgtaacaattgtgtttggcatatggcccgacacctagtgagacttagtaaatggtaacctatcactagatccaaggacaaatctactggtactattttctatcaaacaagagcctctgcaggaaccagctgcttcatctcttggcattccattatcttccgtttctaaagaaagttactgcaaactgaaagcccagttccacccaggccatttagtcccatactaagactctacttcaaagattatgaaatacctctttgtaattgttttcctgtattctttatttatttaacttgattttcatatcaccttattttaaaaatatatatattaaacaagaaatataattttgtgaaaaaatagaaaaaacatgtaagcaaaaataaagaaaacacaatatgtaaatccagtctttcattgtgtaatatttaggtaattggcaaaatgttaccatttataaatgatgctggtatgaacatccttatctgcaaacctttgcacgtatcctttattatttca

SEQ ID NO: 687271 - DNA, 978 bp, Homo sapiens
ttttttttttttttttttttgagacgaagtctctctcttatcccccaggctggagtgcaaaggtgccatctcggctcactgcaacctccgccgcccgrgttcaagcgattctcctgcctcagcctcctaagtagctgggattataggcgcctgccaccacgcatggctaatttttgtatttttagtggagacggggtttcaccatgttggccaggctggtctcaaactcctgacctcaggtgatccacccacctcagcctcccaaagtcctgggataacaggcgtgagccaccacgcccagcccagtctggaggtttcagagtagggcatggagtaggaggtggaggatggagaaggggaggggaataatgtagttaagaaggatagagtttcagggagatggaggtattgatcacaaacattcctgcatcatatctttgcccaatttaagtgacaacgtgtaacaattgtgtttggcatatggcccgacacctagtgagacttagtaaatggtaacctatcactagatccaaggacaaatctactggtactattttctatcaaacaagagcctctgcaggaaccagctgcttcatctcttggcattccattatcttccgtttctaaagaaagttactgcaaactgaaagcccagttccacccaggccatttagtcccatactaagactctacttcaaagattatgaaatacctctttgtaattgttttcctgtattctttatttatttaacttgattttcatatcaccttattttaaaaatatatatattaaacaagaaatataattttgtgaaaaaatagaaaaaacatgtaagcaaaaataaagaaaacacaatatgtaaatccagtctttcattgtgtaatatttaggtaattggcaaaatgttaccatttataaatgatgctggtatgaacatccttatctgcaaacctttgcacgtatcctttattatttca

SEQ ID NO: 687272 - DNA, 978 bp, Homo sapiens
ttttttttttttttttttttgagacgaagtctctctcttatcccccaggctggagtgcaaaggtgccatctcggctcactgcaacctccgccgcccgagttcaagcgattctcctgcctcagcctcctaagtagctgggattataggcgcctgccaccacgcatggctaatttttgtatttttagtggagacggggtttcaccatgttggccaggctggtctcaaactcctgacctcaggtgatccacccacctcagcctcccaaagtcctgggataacaggcgtgagccaccacgcccagcccagtctggaggtttcagagtagggcatggagtaggaggtggaggatggagaaggggaggggaataatgtagttaagaaggatagagtttcagggagatggaggtattgatcacaaacatycctgcatcatatctttgcccaatttaagtgacaacgtgtaacaattgtgtttggcatatggcccgacacctagtgagacttagtaaatggtaacctatcactagatccaaggacaaatctactggtactattttctatcaaacaagagcctctgcaggaaccagctgcttcatctcttggcattccattatcttccgtttctaaagaaagttactgcaaactgaaagcccagttccacccaggccatttagtcccatactaagactctacttcaaagattatgaaatacctctttgtaattgttttcctgtattctttatttatttaacttgattttcatatcaccttattttaaaaatatatatattaaacaagaaatataattttgtgaaaaaatagaaaaaacatgtaagcaaaaataaagaaaacacaatatgtaaatccagtctttcattgtgtaatatttaggtaattggcaaaatgttaccatttataaatgatgctggtatgaacatccttatctgcaaacctttgcacgtatcctttattatttca

SEQ ID NO: 687273 - DNA, 654 bp, Homo sapiens
actactctatttccaaatagataatatttttgtcagagaatgtattggtattctcataataacaaaatttccccaaaaatggcattatcaacatagtaacatataaattccataagctaggtcacacagctaagaaaaatcaaagctttgaacccaaatattttgtttcctgggacttcccttttaaccaccatacaatagaaatagtgctcaastcatttaatagttttctacagaatacaaagtaggtgttaaattgtgtcatcttttttcattggctggaatcacactttccaagataatttgcttttgtccctcattgatctttattagttatcggtttcaaacactttagatttaatattctttgtttttcagcctttgatgaaacatgaattatctaaaagtacttggatggatcctctgtggtgtatttctatttgaagtaacttcttacaaagttggtactatttttgcagtattcaaaactatttctgtattatgacattgataaatattttatgcagcatatttttacatatattttcttccttaaaaataaatatattttggaacctccctgaccactgtatatgaactctttatactccaagcctacttttatcctcgtagcctaacttatactttttattt

SEQ ID NO: 687274 - DNA, 616 bp, Homo sapiens
ataactattaaggatataaaaattaagttgtttacacctaactgattaacaaacagaactcacatatttcttttggcctaggggtaccgtgtaaatattactaagacactaaaattgctgcaaaatgagaaagtttagaaacctccaggttgaggagttattctaagtgttactaaggctccttagatccttgtgagcctataaaataattaaaaactcccatcatgagaatgtgtcaaaaactgtaattttgagaatattgatccctatgtgtttacttgaaacaaaaaacatattggggcaagttacttagagacaaatttcatctgctgtgggtcaaacatcacctaatatgtaagtgttaaaatggaatattcaggcrttgaagttgtcattgttataagacccttgttacagcaaagaaactgaggtacagagagaattattaacacagcaaagcaatcagaagacgtgactcaatattgtgctttagaggacatatgttgtatcttatcttccaaatggggatggagggcagcacttatgctgtgattaaataaaatctgactttttaccttaaaataattcaattagaagtaatttgagtatcttttcc

SEQ ID NO: 687275 - DNA, 616 bp, Homo sapiens
ataactattaaggatataaaaattaagttgtttacacctaactgattaacaaacagaactcacatatttcttttggcctaggggtaccgtgtaaatattactaagacactaaaattgctgcaaaatgagaaagtttagaaacctccaggttgaggagttattctaagtgttactaaggctccttagatccttgtgagcctataaaataattaaaaactcccatcatgagaatgtgtcaaaaactgtaattttgagaatattgatccctatgtgtttacttgaaacaaaaaacatattggggcaagttacttagagacaaatttcatctgctgtgggtcaaacatcacctaatatgtaagtgttaaaatggaatattcaggcattgaagttgtcattgttataagacccttgttacagcaaagaaactgaggtacagagagaattattaacacagcaaagcaatcagaagacgtgactcartattgtgctttagaggacatatgttgtatcttatcttccaaatggggatggagggcagcacttatgctgtgattaaataaaatctgactttttaccttaaaataattcaattagaagtaatttgagtatcttttcc

SEQ ID NO: 687276 - DNA, 735 bp, Homo sapiens
ctgcccctcgtagctggtgggaatgccgtccatgttataatgcacggtggggaggacagggatcggctccttcgtgacgtccacaccagcgaagatcatggctgtctctgaaatgccgggcaagggcatggccagctgctctggaggtaggtggtgcagctgcaggtagacgtgatctttctcagggccacagcctctggtaagacagaacaccatcacataaggcagagaatggcaacggcagcagacctgagaatacgtcatcttggaagcgtgtgagttkcaacatgttttgatactgaggaaaatttcccctcatgtacggccaccctcccatcaaatcttttctaagcatctactgtgtgccagggacaatcctaggtgctgggacacagctgagaaccagaacaaatactctgcccttactgaactcacactcgtctcagggatcacagcctgcagcggctgtccttggtaaaagcattaggcctctatgccaaatagtcgtccctgcgtatccgtggcaggttgggtccaggacccccacggacaccaaaatccgtggatgctcaagtccctaatataaaatggcagagtatttgcatataacctatgcacatcctcctccatattttaaatcatcctcatttcaagttttacatttaagttgtacagcaactccaggattactcatagtacctaatacaatgtaaatgcaggtaaatagctgctaca

SEQ ID NO: 687277 - DNA, 735 bp, Homo sapiens
ctgcccctcgtagctggtgggaatgccgtccatgttataatgcacggtggggaggacagggatcggctccttcgtgacgtccacaccagcgaagatcatggctgtctctgaaatgccgggcaagggcatggccagctgctctggaggtaggtggtgcagctgcaggtagacgtgatctttctcagggccacagcctctggtaagacagaacaccatcacataaggcagagaatggcaacggcagcagacctgagaatacgtcatcttggaagcgtgtgagttgcaacatgttttgatactgaggaaaatttcccctcatgtacggccaccctcycatcaaatcttttctaagcatctactgtgtgccagggacaatcctaggtgctgggacacagctgagaaccagaacaaatactctgcccttactgaactcacactcgtctcagggatcacagcctgcagcggctgtccttggtaaaagcattaggcctctatgccaaatagtcgtccctgcgtatccgtggcaggttgggtccaggacccccacggacaccaaaatccgtggatgctcaagtccctaatataaaatggcagagtatttgcatataacctatgcacatcctcctccatattttaaatcatcctcatttcaagttttacatttaagttgtacagcaactccaggattactcatagtacctaatacaatgtaaatgcaggtaaatagctgctaca

SEQ ID NO: 687278 - DNA, 735 bp, Homo sapiens
ctgcccctcgtagctggtgggaatgccgtccatgttataatgcacggtggggaggacagggatcggctccttcgtgacgtccacaccagcgaagatcatggctgtctctgaaatgccgggcaagggcatggccagctgctctggaggtaggtggtgcagctgcaggtagacgtgatctttctcagggccacagcctctggtaagacagaacaccatcacataaggcagagaatggcaacggcagcagacctgagaatacgtcatcttggaagcgtgtgagttgcaacatgttttgatactgaggaaaatttcccctcatgtacggccaccctcccatcaaatcttttctaagcatctactgtrtgccagggacaatcctaggtgctgggacacagctgagaaccagaacaaatactctgcccttactgaactcacactcgtctcagggatcacagcctgcagcggctgtccttggtaaaagcattaggcctctatgccaaatagtcgtccctgcgtatccgtggcaggttgggtccaggacccccacggacaccaaaatccgtggatgctcaagtccctaatataaaatggcagagtatttgcatataacctatgcacatcctcctccatattttaaatcatcctcatttcaagttttacatttaagttgtacagcaactccaggattactcatagtacctaatacaatgtaaatgcaggtaaatagctgctaca

SEQ ID NO: 687279 - DNA, 735 bp, Homo sapiens
ctgcccctcgtagctggtgggaatgccgtccatgttataatgcacggtggggaggacagggatcggctccttcgtgacgtccacaccagcgaagatcatggctgtctctgaaatgccgggcaagggcatggccagctgctctggaggtaggtggtgcagctgcaggtagacgtgatctttctcagggccacagcctctggtaagacagaacaccatcacataaggcagagaatggcaacggcagcagacctgagaatacgtcatcttggaagcgtgtgagttgcaacatgttttgatactgaggaaaatttcccctcatgtacggccaccctcccatcaaatcttttctaagcatctactgtgtgccagggacaatccyaggtgctgggacacagctgagaaccagaacaaatactctgcccttactgaactcacactcgtctcagggatcacagcctgcagcggctgtccttggtaaaagcattaggcctctatgccaaatagtcgtccctgcgtatccgtggcaggttgggtccaggacccccacggacaccaaaatccgtggatgctcaagtccctaatataaaatggcagagtatttgcatataacctatgcacatcctcctccatattttaaatcatcctcatttcaagttttacatttaagttgtacagcaactccaggattactcatagtacctaatacaatgtaaatgcaggtaaatagctgctaca

SEQ ID NO: 687280 - DNA, 735 bp, Homo sapiens
ctgcccctcgtagctggtgggaatgccgtccatgttataatgcacggtggggaggacagggatcggctccttcgtgacgtccacaccagcgaagatcatggctgtctctgaaatgccgggcaagggcatggccagctgctctggaggtaggtggtgcagctgcaggtagacgtgatctttctcagggccacagcctctggtaagacagaacaccatcacataaggcagagaatggcaacggcagcagacctgagaatacgtcatcttggaagcgtgtgagttgcaacatgttttgatactgaggaaaatttcccctcatgtacggccaccctcccatcaaatcttttctaagcatctactgtgtgccagggacaatcctaggtgctgggacacagctgagaaccagaacaaawactctgcccttactgaactcacactcgtctcagggatcacagcctgcagcggctgtccttggtaaaagcattaggcctctatgccaaatagtcgtccctgcgtatccgtggcaggttgggtccaggacccccacggacaccaaaatccgtggatgctcaagtccctaatataaaatggcagagtatttgcatataacctatgcacatcctcctccatattttaaatcatcctcatttcaagttttacatttaagttgtacagcaactccaggattactcatagtacctaatacaatgtaaatgcaggtaaatagctgctaca

SEQ ID NO: 687281 - DNA, 1713 bp, Homo sapiens
  misc_feature 1024: n = A,T,C or G
gggtatcaagagaccacacctagaacagcagggatagcagtggggtcgccctggcaggcagcctggcagggtcaggcctagaggaaacacaggcgaatgtgaagtcacagggcctggagagtgaagttgtttttcaagcataatttcagccgtatggtttcttgttctgtgtgagtataactgtgtctgtatttagggactctggcggagcgttttcctcggaaacctgcggcattgggttgggagcctgtcggctgctgccgccgcgcgcttctcccagctccgtccaggctctgcagggacagcagccgcttctcaggagcgacagcagcagggacgcgcttctggctgtggttttgttttgctttggttttgtgcagcgcttccaattcttcctccgaaaataggctctgggagaagcagccctcagggcccttattgtcgtcccatcctctgtcaccaaatctgccctgcctgcctgacttcagcattttcagaggccacgaccgctcttaaggctttccaacttcccttgcagtttggaagtgtcccctgaacagcctgtgttgtgatgtttgatttctgttaatttactgagatgggggagatggtctctctgctctggtgcccctgccctacagagaggtgtgggaatttgggagggtgaggaggagatggacaggttagagaagggtgaggagagaggcctgggattccacttgccctggagagatgggaacgagctgggctcgggaagaggggctatgaaggcccatcggggaggccggactggctgaaaggacagacatggcccaggaggaagcccagcaggggcagctgagccatgggtgcttgctcccgggggccggggcaagctcagccaactaggggtgagaatgacagtcggtggggcctggagactggatgtgatttgggggagctgaggagaagggccaggtgatggggttgggggaatgcaggctcaggagctgcccagggaaagagcagagctgcctacatgcgngaaagggtgggtggggcagggcaagagactcctcaacagacactctgggcgccgtggggcgtggtcctcacctagctgccactgtatctgtgctgcgtggcctggggagagtgtctgggcctctcggggcttccccatctgtgactcgggtgcscagcacaggcctcggcctgcattgagcaggtgcttggcacacacacgtggcagtgccagcctcctcccctggccaggcgggatcatcggcatgtgggcaggtcctctggccttcttacctttcttcatctctgccccaactgggcagaacccatgtccgttcctgagatagagcgtggcatctgaccagcaagcctttcacgtgccctcacctctcctcatactcaccccaccctcccggccgcctgccagccccccatcctcccccagcaaccctagacggacagcagaaaggcgcctccctggggccacgacagggcaccctgtgctgggaccgtctgccagtccttccctaggcctggcccaggcctaaggcagtatctgttaagtggtaaaaagagtcacagatatgcaaaactaatggttcgcattgaccgagggttttctgtgtcagtgctgaactcagggccttactacatgcacgttgttttgttgaatcttcgtcataactgaggaggaaaatgaggcagaatgat

SEQ ID NO: 687282 - DNA, 1713 bp, Homo sapiens
  misc_feature 1024: n = A,T,C or G
gggtatcaagagaccacacctagaacagcagggatagcagtggggtcgccctggcaggcagcctggcagggtcaggcctagaggaaacacaggcgaatgtgaagtcacagggcctggagagtgaagttgtttttcaagcataatttcagccgtatggtttcttgttctgtgtgagtataactgtgtctgtatttagggactctggcggagcgttttcctcggaaacctgcggcattgggttgggagcctgtcggctgctgccgccgcgcgcttctcccagctccgtccaggctctgcagggacagcagccgcttctcaggagcgacagcagcagggacgcgcttctggctgtggttttgttttgctttggttttgtgcagcgcttccaattcttcctccgaaaataggctctgggagaagcagccctcagggcccttattgtcgtcccatcctctgtcaccaaatctgccctgcctgcctgacttcagcattttcagaggccacgaccgctcttaaggctttccaacttcccttgcagtttggaagtgtcccctgaacagcctgtgttgtgatgtttgatttctgttaatttactgagatgggggagatggtctctctgctctggtgcccctgccctacagagaggtgtgggaatttgggagggtgaggaggagatggacaggttagagaagggtgaggagagaggcctgggattccacttgccctggagagatgggaacgagctgggctcgggaagaggggctatgaaggcccatcggggaggccggactggctgaaaggacagacatggcccaggaggaagcccagcaggggcagctgagccatgggtgcttgctcccgggggccggggcaagctcagccaactaggggtgagaatgacagtcggtggggcctggagactggatgtgatttgggggagctgaggagaagggccaggtgatggggttgggggaatgcaggctcaggagctgcccagggaaagagcagagctgcctacatgcgngaaagggtgggtggggcagggcaagagactcctcaacagacactctgggcgccgtggggcgtggtcctcacctagctgccactgtatctgtgctgcgtggcctggggagagtgtctgggcctctcggggcttccccatctgtgactcgggtgcgcagcacaggcctcggcctgcattgagsaggtgcttggcacacacacgtggcagtgccagcctcctcccctggccaggcgggatcatcggcatgtgggcaggtcctctggccttcttacctttcttcatctctgccccaactgggcagaacccatgtccgttcctgagatagagcgtggcatctgaccagcaagcctttcacgtgccctcacctctcctcatactcaccccaccctcccggccgcctgccagccccccatcctcccccagcaaccctagacggacagcagaaaggcgcctccctggggccacgacagggcaccctgtgctgggaccgtctgccagtccttccctaggcctggcccaggcctaaggcagtatctgttaagtggtaaaaagagtcacagatatgcaaaactaatggttcgcattgaccgagggttttctgtgtcagtgctgaactcagggccttactacatgcacgttgttttgttgaatcttcgtcataactgaggaggaaaatgaggcagaatgat

SEQ ID NO: 687283 - DNA, 1549 bp, Homo sapiens
ggaacaattgttagagaaaggggagctgtttttctgagcatcattcttcacaaccaagcccgtttcaaggagccttggtcaaattggacattttttttctttaattgaatttctagctttgaaaattaaatgtgcatacattgaaagcatatgtgcccatatcacatatgcatctggctatgctgagagagaatatgaactcctccacccagggttgagaaagaggactttggttggctcctgcttccagcatgtcctagctctttaatcttagtttttttttttatctctccaagcctaatttttctcaaatataacgtttaaataatctcattatatattcatgagttgttgtgaggattgcatgagataattatccaaggcatctagcacagtgtctggcacattagtgctccataaatattaactgctcttatagatgtaagtttgattctaaatacagtcttcatttacctccctatagtttggcttgtattcttctaatgggatgaatcaacagaaggctaagtggtttttccaacatctttaatgagttaaaagcacttttggcgttagaactcaggtttcaaaccatctatgccatgggccaggagccagaaattatttctggccacagttcagattctaggagaaaaaccggagtgactgcagtcttaacatcctttgttgaagtcaagaactgtacactgatgctgatgctgacatttgtatcacttatgactcataggcacggacaggggtgaggatggtccagttaaattcagatggccagatccagctgaggaaggcaaacctgaaattagatcttttccatctagggtaaaagtggggctaggaaggccagacagaatgaaaaatcggtgatttttgcaagatgtatattcatcatcagtgatctaacagacatggcatagcaacaaggacatctgattgccagaccacacccagtcaccaggtttcttggcacagctctatctgaggctctccttagttcacattaagggcatctgtcagaagagcttggataaaaatggcaggactcagggtcacaggggagagctgacaaggggaggatctcagtcttgaggctgctgggctgcagacttggggacagactcagcttcctaatccatttcctagaattcatgagtgaggaagatgggtagagactactattgaggactgagcctcaacagacttatagaacgatgacatgatgctgatttttcccttattccagtattattccttattctcagaacatgaaaggaggctgggtttcaggttagaaagaggggactggatggaggactggtttttttttttttattttattttaggttctgggatacatgtgcaggatgtgcaggtttgtttcataggtaaatgtgtgccatggtggtttgctgcacccatcaacccatcacctaggtrttatgcccagcatgcattagctatttatcctgatgctctccctctcctgtcacttccctgcccccgcaccatggaggactattaaatgctcccc

SEQ ID NO: 687284 - DNA, 594 bp, Homo sapiens
tatagtagctttatacactatttcctctagaaacaaatccagcactgtaccattatatggtttacgtttatgtagcaagtatcttatatgcatttatctcctttaatttcyactataatattgtaggggatcatatccccatttactggcaaaggaaactaaggctcagagaagttaagtaaaagcaaagctggtttttagttcatgactgcctatctatctaacttcagagtctttttgccacttttaataatatgtctgtgtgtgtgtgtgtaaaatttctttttggagagatcgttttattgttcaatagaaatataatacaaatcacaaattcaagctgcatatatgattgtatattctactgtagccaccttttaaaatgccaaaagaaacaggtgaaattaactctaatgatgtattttattataccagtatattgcaaatagtataattttaccatgcaatccacataaaaattattagtaaggtattttgctttctttatattattcttcaaaatttggtgtgtattttacagttcattttgatgtggactagcgtgtttcaagtgctcattagctatgagtggct

SEQ ID NO: 687285 - DNA, 594 bp, Homo sapiens
tatagtagctttatacactatttcctctagaaacaaatccagcactgtaccattatatggtttacgtttatgtagcaagtatcttatatgcatttatctcctttaatttccactataatattgtaggggatcatatccccatttactggcaaaggaaactaaggctcagagaagttaagtaaaagcaaagctggtttttagttcatgactgcctatctatctaacttcagagtctttttgccacttttaataatatgtctgtgtgtgtgtgtgtaaaatttctttttggagagatcgttttattgttcaatagaaatataatacaaatcacaaattcaagctgcatatatgattgtatattctactgtagccacmttttaaaatgccaaaagaaacaggtgaaattaactctaatgatgtattttattataccagtatattgcaaatagtataattttaccatgcaatccacataaaaattattagtaaggtattttgctttctttatattattcttcaaaatttggtgtgtattttacagttcattttgatgtggactagcgtgtttcaagtgctcattagctatgagtggct

SEQ ID NO: 687286 - DNA, 2340 bp, Homo sapiens
atttttttacaccctctccctttgactagaactttgcttaattctgtttgaattatgctatataatcctatgtcattaatttactaattaaagttattgttattcagtgattattcaactgtcggtgaaagtctttgatttattgtattacctactcttgactgctagctgagaacaagtacrtattctatctttagtgttcaggatagaaatagtcaatttgttctcttatttttaatccctaaagtaagcatttctttaaatatacaaaaacctgagtaggactgaattggatacctatgtaggtgacagtaaatacagttaaaccagggtcctgtcgctttatttgcttctatctgttttgtcatcttgaaactatgcagcaatttctggcctgtagccttgggcatctggctgctgaggtcattaggccattgactataccatcacttagttttcagaatctttgaaatgtgatttgcaactggatttggacagaggattgtgtgctgggtcaggagtctgagcagcctttcctagcctgtgttcccagaacgtgtgggtccctggagatagtaacaaatgttccattttggcaatgctatactgtgtctccctcctccttgcacataagcatattaagcgttttgagaagccctgcgggaaagaaaactctttattccagtgtttctcaaattgatttgaccacagaaaaccatttttccccctagtaacacctatcagtatatcacagaatatcaattttctgcacagtagagttggagaaagagcagttgttttttctctgctttttattttataccaaatagaggtgaattatataactttataaataattattattaaatatatttaaaatttttatcttcatcaaatgaaaggtctctgtccagttacaggctagtttatagctgattgaccacagaaataggccacagatgaagtgaatatttttgtttaggatctattttgtaatagattccatcccagaaccagttagattaaagctaacatgacaaatgtttaaagctaaaattgacaaatgaagatgattttaaaaaaccagacccagctattaatttcctctaactatattacattttcagatacctgaaatgtggccaggggaatgattctacaacttctactgtgttgtcaaagatgccaactgatgactcctctcacgtgtattttaaattatggagatgtatttaacagacactgtcaactttaatctgcacatagaaattcttaattgtcccaaccccctttgtttcagcttgtttttcaggctttctaatgcattcaccttgcttcttcctattctctctcctccctctctgtgctccttaaaaacatccactaggctggcaattaggggctgagcacagatgcatcctttaatttaatttcacattccatcatttgaaacatgacccagtgtgtctgcttatggccttcagagtgctgggaaatcaatatgttaatttacctccatctttccaaatcatctttgcaagcaagcacctgtgaaatgagaggcttgcacaggggagggagtgattctgtgtaagagacagccccaagtacctgtattctccccctccccctctttgttaatgagctatattctaaagtatattagtaaattgactgttcagaactttgaatactttgttttcctgatgaaaacttgtttatggtcattaggattctaagccagcccttaaaatcccatggactgccagtgtatctaaagcactctccaaacagtacattgaggctgcaatagtacaagtgtagctccagtcccactctatcttactggaatgatatttccattcgtgtagcctatggttgcatttctttttatcatccaggtcatattcttgactcatagttagcttgtggtaaaaagaaatctccaaagttttttctacatcaaaggctccaaagttaagtctacacctccccacttgcttaggcctgtgcatattaataatgttttacatattaagacaagtgtgtccctgttacattccattcttttggattttgtcttactgttcaagttgagtgctttattaatcttcattaagtcacttcttaacacattaattcagttgtgtcacattcatattgggttgagtttatttctgtctatataaactgtagatagaactattgggcatggcaactttaagagctttggttttcagagcattttcataggaaaacatgatctcatttgagcctccctcagaccttaggaggtggagtgagcctgttaatgatcttaatgaattccatttctatgga

SEQ ID NO: 687287 - DNA, 2253 bp, Homo sapiens
ctatgggtaggtggttaggttggtgtagtttgggggcaacagcaaggctctcaaaatayatgtgggagggggcagctgcatgtttgtacctctgcgtttgcactaatagaatcttcttgttagaaatattgtagttaagacaactttttggaattctagaatatatcttaatatttatttaatgaatttaatgcttaattttataaaacagacatggccggggatttttaagacaattggtaagcttattctatagtctggaattctgttttataaatttctgtcaagggagggactcaaataactcatctgtgtctagcaacccatgaattaacgtagggctcttattgaggacctatctgcacaggccctgctgtcttcccatcctcctgccagctgagtgccaggtcatctccatggctgcgtgcagccttacatggaggctattttggggtgacaagaatcttcccgagatctgaattgggtgattggcctggagttatataactctgaaggaaatgaagatgctgcattttgtattttagttctgggcaccgatggggaggagatcttaaatcgatttgaataaaatctagacagtgaataatcctgttgaatgctttagaactgaatttttgagatagagatgaacaaggcaggcttgtgtgatgataaagaacgggccaacatgatgtgctgctttacagagtggatgtaagtgaaaaattcaaggcttggagcaggccgtgattcctctacttaacgttttacgattttggcatcttgcattctataatattttaacccagtttcatctcgtttcaggcatggttttctaaaactatgtctatatcaggtgaaaacatgaactctaaagactgtaacatggtgcatttttctttttaaaaaagcttgctttatgatgaaattctctcagttgtgcttctaggtgacatttccattcagaaatgtcttgaaaataaatgaagatgttacgagaattacagtggacaaaatgctgcatctgacccatcctgactggctaatctagcccaattactgatctcatctgtattatcacactctcagatgtgctaggtgcctcccccaacctccccacggcacacacacaaatgcctggattttttaaaatcagaaattctctttgttctccatcacacattattcctgtttaaggttttcaacttgaaaaacttcaagccatcttggattttaaagtaatggtagatttttcttctggaacatttatcttatgtggagaagcacttactgtaaattggtgaatacagagcttactccctttacctgatgcaatagatttgatgaagtttctatattccaactcaacatcactatggctttttgcttgtgttgctgcgtttgtaaacattcaataaaagtctacttgtctataactcttgggattagaaatgcttaattccttgtatttgtatacatctaccttgtatttgtatacatctacaattccttgtatttgtatacatctaccatactggtgatttaggggcactgtgagagcaagaattatttttaaaattatcaaagaaaggtcaaattctgtccctaatgatttccatatttagctcactttatttgggggcaaaaaatcagcttcagagcagccaaatgccagacttgaagcccagcttcccctttccctagtgctcccctgtggcaagtgacttcacctttctcagcttcattctacccatctttctcttatcaataatcatatccagcttatagatttcttgtgagagttgaacaagaaataaatgtacatgtctggtgcataatttgtactcagtacctgttgcctgctatccacaacagcaatgaaaacaataataataccttggaaatagtctgcatggagcatgtgctgtaatttttgttagccaaataatgggaaaacccattactcaatcactacaccttttattatacagttaacatatgtagattagcacacatgtgcatacacacatccacacatactgcacctgaaattttttttttaattttaattttttagagcctttaagtgaaccatgatgcacctgaaatttttaaggagaggttctagaatttaaatccttttgtacatgtacacatatactcgcaaggtcaatacttcctcacatcttctgaaaggtaggaagaaacatgggcacataactttgctatatggggtactgtctcaaacttgca

SEQ ID NO: 687288 - DNA, 1300 bp, Homo sapiens
  misc_feature 628, 637, 665, 666, 667, 668, 669, 670, 671, 672, 673, 674,675, 676, 677, 678, 679, 680, 681, 682, 683, 684, 685, 686,687, 688, 689, 690, 691, 692, 693, 694, 695, 696, 697, 698,699, 700, 701, 702, 703, 704, 705, 706, 707, 708, 709: n = A,T,C or G
  misc_feature 710, 711, 712, 713, 714, 715, 716, 717, 718, 719, 720, 721,722, 723, 724, 725, 726, 727, 728, 729, 730, 731, 732, 733,734, 735, 736, 737, 738, 739, 740, 741, 742, 743, 744, 745,746, 747, 748, 749, 750, 751, 752, 753, 754, 755, 756: n = A,T,C or G
  misc_feature 757, 758, 759, 760, 761, 762, 763, 764: n = A,T,C or G
aacacagactcaatactttgtgtcatgtgaagggtcctcaggtacctcccattgccttgagtagaaagtggggcggaggtggggtagaggagatctctccrggggagagaactgcttgtcttgcaagagaacaaaaggtacagggctgtctttgaaatatgcacttccaggtccagggtttatgctgctatgcacaaagattgatcaagtacttcaaaatgagtaagtagtgtctcgaagatctttctacacttccagcctgctcatgtgagaaatgagaaaataaatggacatacacgctggccaaaagtgtgggaaaatcaatagtagtgccaaatcagaaggctagctcaaccttcagtgtctttcttgaagtagaaagccccaaacagttagaagctatgaaagactccaggtctgattcttccctctaagaagcacaccgcagggtacttgttcctaagccagctcgagggtgggtgttgagagggagacggcttcagaatgaatctttttctaactccacaacttctttccttcattctgaggtgcactcctcacctacccctcaaagtcccatatccaggaatctctgtgccaaaatggattgtaactgacgagacttgtntagatctgngtgtgtgcccagaagctctttatatatnnnnnnnnnnnnnnnnnnnnnnnnnnnnnnnnnnnnnnnnnnnnnnnnnnnnnnnnnnnnnnnnnnnnnnnnnnnnnnnnnnnnnnnnnnnnnnnnnnnntttattttactgcaacctccacttcctgggttcaagcaattctcatgcctcacctcccaagtggctagggctacaggtgtatgccaccatacttggataattttgtatttttagtagagacagggtttcactatgttgtccaggctggtcttgaactctcagcctcaagcgatccgcccgcctcagccttccaaagtgctggggttacaggcatgagccactgtgcctgccgtaattccttcttattaaatttactttcactagtttagacagtgctccataaccatgcttacaaagcgcaaaaacattgtgtttgtatttgagtctcctccatggctggcccatcaattccttaaggccttgactatgtctcttaagttgccttgggaaaccgtagtcagtggaaaacctcatgctgatgggctcctcaccaaaagcacacagttcctttggcaccaggaggatcttcattccatggagaatttttaggctataaacaagtctcattcttttagagacactctagctttaaaaaa

SEQ ID NO: 687289 - DNA, 1300 bp, Homo sapiens
  misc_feature 628, 637, 665, 666, 667, 668, 669, 670, 671, 672, 673, 674,675, 676, 677, 678, 679, 680, 681, 682, 683, 684, 685, 686,687, 688, 689, 690, 691, 692, 693, 694, 695, 696, 697, 698,699, 700, 701, 702, 703, 704, 705, 706, 707, 708, 709: n = A,T,C or G
  misc_feature 710, 711, 712, 713, 714, 715, 716, 717, 718, 719, 720, 721,722, 723, 724, 725, 726, 727, 728, 729, 730, 731, 732, 733,734, 735, 736, 737, 738, 739, 740, 741, 742, 743, 744, 745,746, 747, 748, 749, 750, 751, 752, 753, 754, 755, 756: n = A,T,C or G
  misc_feature 757, 758, 759, 760, 761, 762, 763, 764: n = A,T,C or G
aacacagactcaatactttgtgtcatgtgaagggtcctcaggtacctcccattgccttgagtagaaagtggggcggaggtggggtagaggagatctctccgggggagagaactgcttgtcttgcaagagaacaaaaggtacagggctstctttgaaatatgcacttccaggtccagggtttatgctgctatgcacaaagattgatcaagtacttcaaaatgagtaagtagtgtctcgaagatctttctacacttccagcctgctcatgtgagaaatgagaaaataaatggacatacacgctggccaaaagtgtgggaaaatcaatagtagtgccaaatcagaaggctagctcaaccttcagtgtctttcttgaagtagaaagccccaaacagttagaagctatgaaagactccaggtctgattcttccctctaagaagcacaccgcagggtacttgttcctaagccagctcgagggtgggtgttgagagggagacggcttcagaatgaatctttttctaactccacaacttctttccttcattctgaggtgcactcctcacctacccctcaaagtcccatatccaggaatctctgtgccaaaatggattgtaactgacgagacttgtntagatctgngtgtgtgcccagaagctctttatatatnnnnnnnnnnnnnnnnnnnnnnnnnnnnnnnnnnnnnnnnnnnnnnnnnnnnnnnnnnnnnnnnnnnnnnnnnnnnnnnnnnnnnnnnnnnnnnnnnnnntttattttactgcaacctccacttcctgggttcaagcaattctcatgcctcacctcccaagtggctagggctacaggtgtatgccaccatacttggataattttgtatttttagtagagacagggtttcactatgttgtccaggctggtcttgaactctcagcctcaagcgatccgcccgcctcagccttccaaagtgctggggttacaggcatgagccactgtgcctgccgtaattccttcttattaaatttactttcactagtttagacagtgctccataaccatgcttacaaagcgcaaaaacattgtgtttgtatttgagtctcctccatggctggcccatcaattccttaaggccttgactatgtctcttaagttgccttgggaaaccgtagtcagtggaaaacctcatgctgatgggctcctcaccaaaagcacacagttcctttggcaccaggaggatcttcattccatggagaatttttaggctataaacaagtctcattcttttagagacactctagctttaaaaaa

SEQ ID NO: 687290 - DNA, 1832 bp, Homo sapiens
gccacactagctgctgggaatagtcctggctcatagtaaaccttcaataaatacttgattaataaatgaataaatcaaccaggccaactgaacttttaatatatcatttggtaaacttagcccaaggtttacttagcccaagttataacggcttggcccaagttataaacttagcccaggttagaatggctattagcctgctcaacttacctaattgatctgatctaagtccagcccatgggtactttcgccccacggaggaattacaagactcggacaaataagactttttccacaggaagttcctctggtattcactcagcccctgtaatgcaaagtacacttttgagtacagtccaattaatgaatgatgttttaaagcagacatcggtgaaaaataatttctgaacctcccaaaagagacttaagactgaaaattaaacacagacgagctccttaataagagctaatattcacccagccctgtgctaagcagttcacacgtgttatatcctttaatccacaacaccacttgaggcagatgctaccaggaattccaggctcagaggttaccctttcactgattatctgattccaaagcatgagttcttgtcggataactaatgacaatctaaattctcatcattctagatttatcgcaggttttcaccgagtacacaatattatgtaccatgcctaggaccttttgctatttgataaagtcaacaaaaggcaaactccccttccattctgaatacacgcctttaagataaatgagtcaggagatgtgggacgctgtggccacctgtgaagttgcagggtgctagtccctgacagctaccagctacctggaacttttaacatacgctaagaatgcacaacgatgaaaaacgtgtatttctttatacgctgtctttactaagaacccatttctcaagcctttaaaagccacatacactaaagttttaaaggtaatgggggttaaatgctaagctaaatgggccacaggtgtcccaatctgaagtcgcctttagttctcttcgcaaagggacctcctcccatctccactcctcttgagtccccctaagtaaatgtgtctcgcaccatctgactcttcgacacactgcagcttgcaaatgtgagtgagcggagagggaactaggttaagaggcggcgggcagattctggggcccctcgagcaggccctggggctggcagcttccgccgggcagagggctgcagcgcagaaaagcagcgtgacctcggcgctccacacctccccggccatggctccccccagccacattccggcccggggaccccagcctcaccttgaagcgcaccggcatgtcgcccggcgccggagcccccgctactccgacagttaactggagaaaaagctccgagggggcggggcgataacagtgttccctagcaaagcctcggcccggcgtccccgactacgcgccggcgcactccgcgcttcccgcctagaggcctgtcggtctgtttttccccgccctttttggagcctagggaccaatagagactcgcagagtgccttacctccattaggatttgaccaatgagtggccgaaagggagccgcctacctcccttgccaaatycctggggctgatagagatggcgggcggaaggccggccaataaggctcccggaaccgggctgggcgggaccccgggggtgccttcctgggttgggtggaccggtccctggttcgccgggtcctgcgcagcaatgcgtctgcttgctggtggaattcgccagccgccagcctcgctggcccaggtgcttgacagcatcaaaggtcaa

SEQ ID NO: 687291 - DNA, 1108 bp, Homo sapiens
tccttccacagagacccccttaccccaactctctctccttccccctacccctaagctagcaggaagaagtgtcttggcagcagtgttatcaggagtcatttgggatcatagagtatttgcttttgctttgactgagtcacatcttgagtttatagtggtgaatggggtctggaacttaagtgtacagaagccgcattggtttgtcttcggaaaaaaggcaactcaggttgcgtaagatgagaaaggtgttgggaaaaacatctagmtgtggaaatggatccattgagtctaagttgttgaggggaggggatggcatggagagaaattagaagagaaagtgggaaatgggaaggcttaaagtcggtggtgggtcggcagactgttgccctgttgatgtcatgggaagccacaaaatcggaggcgtgtgaacttgatgccgctgaacatttgaaactatgaaaaaaagtttgagtggagtgggcccagtaaaaggccctaggacttactgaagagggcttaattttcacatgagatgttttatgtacatttcttgttctaagcatgcaattttctggagatacgattgaggttttattccttacagaatttgcataaactactccgctctttccacaaatgcaaacctcagtaggatttcccaaagatgaagagaggtctcttgtaagggaagtgactggattctggcgtccaagggaattcaagagctcaggaaatctaggtcactgttgaaatctaggtcattgtgggcaaaattactaagagctttaattccaggtgaattgtactgtacctccatgggtgtggaggttcataaagtttcagcacaacattaagatagttatgcttgttattgttttatagcatattgaaggtgatgacctgcatatccagaggaatgtgcaaaagctgaaggacacagtgaaaaaggtaggactgataactgtcaatgctaagtcatgcaataggagagacaaatgttgtttttctttcctttctttcttcccatcactttgtgatttttcacttgattctcctaccaccagggcgattactttggtgtctgtgtatgtagatatatctatatatc

SEQ ID NO: 687292 - DNA, 983 bp, Homo sapiens
aagccacctcatggttaaatatggcttttgaactgatacttcaatacttgactgaaaataaaatacaatacagacgagaagaataaagggatgaagaatcttgacatctccctttttaagaaatactggaaatcatacacacacagatgtacaccccccccacacacacacacacaaccttctccttctgcttcatcagtagaacatatcagtaagccaagccaaaataatattgtaactggatgctacaatttattccagttcacataatagtggtagctgaaggcatttaccactatatatgtgtgtataatcatatatgtgtgtgtataatatgtgtgtatatctacaatgaaaataaaatggaataaatacattctatattcgcattttggttatgagtatagcaaaaaccacagtatctgaggataaagtattgcttcaagtcaaaatattattttccaaaaagaagaggcaattcagtgtcaagcacttcaaatttgttaactgtaaaccataatattttgaagcaaattaaaaaawtaactaatagaaactgaaaaatattcttgagaaaaattcttgtgattcagtactagaggagaaagattaaaaataataagaatggagaagtaataaccatattttaaacccatatttggaggtatggttgacatataaaaaatatatacatatttaatatatacatcatgatgagtttcaagataagcatacgcccaagaaaccatcacttccatcaaggccatcacctcccaacatttcctcaaacccctttattagtatcattattatattttagaacttatttgtggtaagaacctttaaggtaagatctatcctctttttaacgtgtaggttaagtatacagtaccctgtcgttagctataggcactatattgtatagtaaatctactaaatttacttaatcttgaatacatgaacatttgtataatatatttaat

SEQ ID NO: 687293 - DNA, 1657 bp, Homo sapiens
tgtccaactggagtcttatttttttgagacagagtttcactcttgttgcccaggctggagtgcaatggcgcgatctcggctcactgcaacctccgcctcccaggttcaagtgattctcctgcctcagcctcccaagtagctgggatcgcaggcatgtgccaccacgcctggctaattttgtatttttagtagagacagggtttctctatgttggtcaggctggtcttgaactcccgacctcaagtgatccgcctgcctcggcctcccaaagtgctgggattacaggcatgagccactgcacccgacctggagtcttaaatgaaggagtgaaggcacaagggaatgagttgcacagggatgggctgaactaggaaggaaaataccaacctagagtgcagtgccactggggtgggggtggtgaaactttactgccatggaaataaccagggcaaaagattggtgtgaggcagaaggctaattcaagttgggatttttttttttttttttttgagacggagtctcgctgtcacccaggctggagtgcagtggcgtgatctcggctcatggcaaccttcgcctcctgggttcaagtgatcctcctgcctcagtctcctgagtacctgggactacaggtgcatgccatcacgcctggctaatttttgtatttttagtagagacagggtttcgccatgttggccaggctggtctccaactcctgacctcaagtaatttgctgccctcggcctcccaaagtgtttggattacaggcatcagctactgcgcatggcctgagttggaatttttaaaagtagatatattagccagcctgcctctgcatgggatgagtgcggcactggttcttggtaggtttttagaaaaataagatataaatgtgtaatataaagaaaaagattaacatttttttaaaaagtagatttattaaaaaacagttgaaggtctgagtgttgagaggcaaatggggtctctgggggatcctgtcctgcagcaggcctgactttcagatgactgtgcttataaggcagatcagtgccttcctggttgccttagttctttccatttcagacaccacatttggatcctggggcagctgctcaactctacccaactctaccatggctacctgggattggagaacatgtgagtattagctacttttacagtcaaatagggatcttgtagaagaaacaggtagacagacccaccagtctctcattctgacctagcaagctggtgaagtcactgtcggtcctagttcccttgtttgttgggctgcaggcccattccaacacagcccaactcccccccmcccccctttttttttttttgagatggggcctcactatatcgcccaggctggtctcaaactcctaggttcaaaggatcttctagcctcagtctcctgagtagctgggactacagtgcgtgccaccatgccttttttttttttttaatgagacagggtctcactatgttacctaggctagtctcaagcaaccctcctgcctcagcctcccaagtagctgggactacaggcacaagccactgcacccagctccaactcctttctttatgcaaatacaaaaggcaaaccttggtgcgacacttagtccttagtagcaaccctggctcatcctcc

SEQ ID NO: 687294 - DNA, 676 bp, Homo sapiens
ctgcactccagcctaggcaacgagagcaaaactctgccttaaaaaaaaaagaaagaaagaaaattcttaggcactgcagtagaggtacaagaaaatggagattgcctcaagtgctggcacagcaggaatttcaaagcctcagatatggataataaccgcaggtgacgtggccttctgagtaacaaaatgctttatatggaggtaaaagttgtatctgggtgctaagcagtgagcccacagttctacatgctttggatctggtggacatcttactctctgtgagttctcaagaatcattaaattcggagtatacctccatgaggtacaaaagaggcaggcaacagggagcctccctgcctccttgtctcatttatatcttgcactgctctwctccagcttcaggaataagtcaaagtaaaaggaactataaactgtgtccaggttgtctcttgaaccctgacaggctccaacttctggctacagcagtgtctaatatgaaagcaaacagaccttgcttcaatcaaaaccacaaaacatctgcattctagtctctcaccacagagcaatcttgaccaccctgccatccagctcctatgtctcagaaatatgcctcaaatatgtttttctgtaggttcctgagttatcccttccatgggcagggcacaggctttgaaaa

SEQ ID NO: 687295 - DNA, 622 bp, Homo sapiens
cagctcaagagtaaaagaaataggaccttctctatttttccttcattcaagtgagtgttgatttttgagcccctgttccaccaggctcatgcaatttgactcagtcagcttcagcactcccctttctccagaggagagtcctttacagttctggggagcttacatattccaacatgttaaggggaggggattcacgtctgctgagatatccccgtttcctaccccgctggatacctcatgcctccatcccatgcttgggacataggaattagctgttctgtgctgtaggaatctccatgaagctgtacttggctctgcctgcctgggccctccctgtagccatgccctgtctggcgccacaatgacttcatttaacttgaagggactgctagataagcccaatgtgtgtttgcacgggagtcaagaccactgagtggaaataattctgtggctgccaccgatgctgtttgcattgccgagagccacagttctaccccctacttcccagcagtggccccgctgcgcctgccagagttgttaccatctctgtgccctttctcttgyttattgcacagtaggttacacagtcttgtgcttctccatcttgccatgtcatctcttc

SEQ ID NO: 687296 - DNA, 608 bp, Homo sapiens
ccatcatgtgttcaatacctcagtgaaattagccaactgcatattacarcagagctctgatgtgccaatctcccttgaaagcattaagctgtctctgttatgcgttctccacaccctccgcccccttttactgcccattaatgatctttcatttgcatcacagaacaatgaagtcctttggccaattatgtgaaattataggtgctctgtagatgtcctctgtcacctgtttaccgtctttgctgaagcggtgggctggagtggattcatattttaaacattacttgacttctgcccatttctggatggaagtggtacaattttagctggcacaatgagcccctgcctttggcttaataaactggctcatgcccagactggatgaaactataaagtcagtcttgacagatccctttaagggttcctttcagctcataaaccaggaagggaataggacatctcagaacataacaacaaacttgccccttctatcccaggagacttttggcatgcctcctctgggatgcttctcttaccataaaaccattattccaacttcattgatttggaaaaaaaagtttgtacttttgaacacgagtaaatgtatc

SEQ ID NO: 687297 - DNA, 324 bp, Homo sapiens
taacaggyggataatgagctcatagatcctccggttggggcagggctgaagagcagacccccaatgccatcatagtccactccccctctcctcttgcatcctgcagtaatgggatgcaactcccattgcgagcttttggatgtttttatagacaactcagccttccttattcctgtcagtcaacctttaaagtaagagcagaatggttaattacttatctggcaatcaggatggggaattgtggtggtttgttcaaatcatgtaataaatgctgtaatcctacctgctgaagtgtaggtatctacccgccccccccgcccggcc

SEQ ID NO: 687298 - DNA, 1480 bp, Homo sapiens
attcatgaaaatgaaaacagtttatgcaagcaaccagctctgggatgcctcatcgtcctttgcaaaattatccaaatcatgatgaaataggctttatttttatggattaaacagagaagaatgtctaatgaattgtctagaaattgaaatacgcaccttttatgaatagggacatttcataagaccattctgtattgtgagttaggaattcagatcagttgaagcattaaaaaaatcaaaccttctgcagctcattaaagcataaacctaatttttagaatttatccgactaatatagtaagacctccacctgcttagaataatattaatacttggcctcatttacctccaagagggggataggcccctgaccaatcttcccatttcaccgaggacagacacttcccttgaatcaggtggaggttttccagtcatatttgcaacactgtttaatgctcaattgccctatttctttcctctgtgaagtgaatacaataacttaaatgaaggttgtttgaaactcctactattgggtaggagtttgcaacctggttactatgatcagagctataatttttttgtttattataattaggttttttgcaagactaaaattgtgcttcttttaaagtgctgaagaatttccaggcttgtcagcactaatacgtattctaattgcaaaaacagacacgaatatcaacccaggtgcatagacctcatagtgtcaatcaaatctcatcagaaactacttgtcttgcaggaggaaggggatccctaaaatcttttttttttaagggaaattttttatcaatttgtattctttatgtcctttcatattgccgtttaccataaatgaaaaccatgagaggaacttttaataataatacacatctgattatgcttttatgaatatacagaacattaaatttcaaaaggctttgcttgagtcccaaatgcaatttctaaaacattaactagcctactcagaatcaggtagaaatggtgcaaatgagctctttttatcacaggcattatttcttgaataaactctyttttgtttcctaaacttcaaaaaaactgtaattttattttcaacattcatgaaggataagtcaaatcctgtcagtgagtgagtccaacggtttccatgaaaggaggatgtggtcactttcatgaagaagccaactgaggaaggctttttcttggttcaatcatttgatgtaatgattcagatgaaagcacgtaagttagcctttctttatacctgcttcataaagtttgagactgctaaattaccaagataggacagtaacataagattatcttcttcatagcatacatcactatttaaaattattttatatatttacttatctgttattttctgtcttgcccactaggatatattgtccatgagatcttgtcctgtgaagtctttcctggcacatagtaagtgctcaataattgttgcataaaggtg

SEQ ID NO: 687299 - DNA, 605 bp, Homo sapiens
ccgcgcccggcccagccagcagatcttaatgaagagagctaattgcagagttttctaataacgggtttttaccgtatagtcagactcagccccttttccatgttacattttctgctgaatatctacattactgcctttaataggcagtgcaaagccttaatgagatgatttattttgaagtgagttttaaaaattcctgggtatttagactctggcttattttttgccacytaattggtaggagtgagtagacaggtattgctaatggtactttaaatgactatcaggatctgaaggatgaattgtattaattattcaaattggaaatatttctttgagattttaaaaatcatattgaaagtcaatggtagattgaatcaatacgcaaatttacttcacatatttttcagttcaagtctaataaataatgtccaactcttttggcattgtgtacatttatagagacatgtcaatgtcttcatgtcttttattattacttattaaagtaaagctgatggtgatatcaaaatgtcacctatgtttgtttgtttttttctcttggtatacatttgaagcctttctggccaacatccctcaatgtacct

SEQ ID NO: 687300 - DNA, 605 bp, Homo sapiens
ccgcgcccggcccagccagcagatcttaatgaagagagctaattgcagagttttctaataacgggtttttaccgtatagtcagactcagccccttttccatgttacattttctgctgaatatctacattactgcctttaataggcagtgcaaagccttaatgagatgatttattttgaagtgagttttaaaaattcctgggtatttagactctggcttattttttgccacttaattggtaggagtgagtagacaggtattgctaatggtactttaaatgactatcaggatctgaaggatgaattgtattaattattcaaattggaaatatttctttgagattttaaaaatcatattgaaagtcaatggtagattgaatcaatacgcaaatttacttyacatatttttcagttcaagtctaataaataatgtccaactcttttggcattgtgtacatttatagagacatgtcaatgtcttcatgtcttttattattacttattaaagtaaagctgatggtgatatcaaaatgtcacctatgtttgtttgtttttttctcttggtatacatttgaagcctttctggccaacatccctcaatgtacct

SEQ ID NO: 687301 - DNA, 597 bp, Homo sapiens
tcaactctttttgaaagtcctaagacccactctaaaccagttaatcatacaacccattgttgagtatcatttatgtgactaatttctgtcttccttttcatacgatttcatgacgttatatcttactgcatccaagttttatctgtagctgtgtgtgctggcagataaaacattaaataaaatatgtggcaagatctaagtctgttgccrtcatttatgtgggtctttttcagtgaagtcattaacatttctttcaacatgttagccatacacttttatttattataacttaataaattcaccgatttcagccattgagtcacatttcttcagcctatggaacacattttatagagctattattctcagagtaataagttcatagagaattgggatgggcagttgaaacatgggttacttaacaccaggagacagaaaagcatgaagagctaactcgtatgcctctgagtgtgtggtcacactgaacatgaggggtaccaagggcacatctccccttgcgcgattcgtctcctttctgggggacctggagaaggggaggtaggtgaggaggctggtatggctatacaatgtttccca

SEQ ID NO: 687302 - DNA, 597 bp, Homo sapiens
tcaactctttttgaaagtcctaagacccactctaaaccagttaatcatacaacccattgttgagtatcatttatgtgactaatttctgtcttccttttcatacgatttcatgacgttatatcttactgcatccaagttttatctgtagctgtgtgtgctggcagataaaacattaaataaaatatgtggcaagatctaagtctgttgccgtcatttatgtgggtctttttcagtgaagtcattaacatttctttcaacatgttagccatacacttttatttattataacttaataaattcaccgatttsagccattgagtcacatttcttcagcctatggaacacattttatagagctattattctcagagtaataagttcatagagaattgggatgggcagttgaaacatgggttacttaacaccaggagacagaaaagcatgaagagctaactcgtatgcctctgagtgtgtggtcacactgaacatgaggggtaccaagggcacatctccccttgcgcgattcgtctcctttctgggggacctggagaaggggaggtaggtgaggaggctggtatggctatacaatgtttccca

SEQ ID NO: 687303 - DNA, 1971 bp, Homo sapiens
agctgctggtggcaaaagcaagcagttccaagagaggaatacagagctcaaagcagggaggaggacrtgactgctgcctcattttaatctctctttgggcctgataattaaaaggacttgcatttctcagataagagttcttttctttcctcaaataaaattgtctcttaggaaagttatgccagttgccagaaagagaagccaagactacttctgcttttggaaacttacaaggtcaaatggaagcctgcaaacctgaataaccaaaggtcatgaggcctaatatggtagaaagtcactggcctgaaatcagtcatttctagtaatctccggactagtttcctattttcacattcatgattcagtgctttggggatgttttcttgtgcctgcaacttttactttaagccctcacataatagcaataacacggtttattaagtctatcactatgttaagcgttcacatttatatcttctgcaattgtccaggaacccttcatggtaagcaaaggtatctctactttaataagatagaacctgagatatatagagaaaataatttcacaaagtcacaaagctagcaagtgacagaaccagagctgttttctttgaattcaggctctatgtccttataccaaagcccctctcaagagtatttgttagattctcaagtctagccaaacaaccttctgcaaacccaaatgataatagagtaccattcttttttttttttttttttttttttgagatggagtctcgctctgtcgcccaggctggagtgcagtggcgcaatctgggctcactgcaagctccacctcccgggttcatgccattctcctgcctcagcctccggagtagctgggactacaggcgcccgccaccacgcccagctaaagtttcatatttttagtagagatggggtttcaccatgttagctaggatggtctcaatctcctgacctcgtgatccacccaccccagcctcccaaagtgctgggattacaggtagagtacctttcttataggataagtgtgtgtgtgcctgtgtgtgtgcatgtgtgtatgttactcatttgatgggtaccacagagttttttgagtcaaaatgtgactggcaaaatgctcttaattgaagaaaaccacagatgaaccatgtacagtctgagactctttcaagcaactgaaacagctcttgtcctcccttataagatctctgacaataaacctaccaatgtcttgcattcacaaaatgtgctttttttttttagaacgttggtatgaattgtatctcagtgaaattagaaccatgtccctcctcaattatgagatttggttggtgaccaccggtttattgtattgataatgaaatctcacaattaacttcttttctgatcaggaacccacccgattggcaaacattgaaaaggtggatggcattaagacttgccaaggatgtggagcaacctagagacacacgttgttgagggagtatccattgccacaaccacctttgaatacaatatttattattttcattcaaataacagaaaatatacatactctaccactcaaatttgcctctcttagttttgtatcttggagtagacttgtagaatcggaaggcaccatacatagatatttactgaaatattgttttaatctgtctaatcaaatgaacaaaaataattcagagtacattatccacagaatggatcaataaatcatggatatgcacccaatggaataccatagagtagagaaaaagaatacattgcagctgtgagaaacaatgtacatgaaaatcaggaacataatactgcatgaaagaagtaaggctgcatgagagtacatgcaacatgcttccatttatataaaatgcaaaaaggcgcaaacctaaccaatttagaaacattctggagcatgggaagttgcatttacatactcagatgtagtttctacaaatccgaaat

SEQ ID NO: 687304 - DNA, 1971 bp, Homo sapiens
agctgctggtggcaaaagcaagcagttccaagagaggaatacagagctcaaagcagggaggaggacgtgactgctgcctcattttaatctctctttgggcctgataattaaaaggacttgcatttctcagataagagttcttttctttcctcaaataaaattgtctcttaggaaagttatgccagttgccagaaagagaagccaagactacttctgcttttggaaacttacaaggtcaaatggaagcctgcaaacctgaataaccaaaggtcatgaggcctaatatggtagaaagtcactggcctgaaatcagtcatttctagtaatctccggactagtttcctattttcacattcatgattcagtgctttggggatgttttcttgtgcctgcaacttttactttaagccctcacataatagcaataacacggtttattaagtctatcactatgttaakcgttcacatttatatcttctgcaattgtccaggaacccttcatggtaagcaaaggtatctctactttaataagatagaacctgagatatatagagaaaataatttcacaaagtcacaaagctagcaagtgacagaaccagagctgttttctttgaattcaggctctatgtccttataccaaagcccctctcaagagtatttgttagattctcaagtctagccaaacaaccttctgcaaacccaaatgataatagagtaccattcttttttttttttttttttttttttgagatggagtctcgctctgtcgcccaggctggagtgcagtggcgcaatctgggctcactgcaagctccacctcccgggttcatgccattctcctgcctcagcctccggagtagctgggactacaggcgcccgccaccacgcccagctaaagtttcatatttttagtagagatggggtttcaccatgttagctaggatggtctcaatctcctgacctcgtgatccacccaccccagcctcccaaagtgctgggattacaggtagagtacctttcttataggataagtgtgtgtgtgcctgtgtgtgtgcatgtgtgtatgttactcatttgatgggtaccacagagttttttgagtcaaaatgtgactggcaaaatgctcttaattgaagaaaaccacagatgaaccatgtacagtctgagactctttcaagcaactgaaacagctcttgtcctcccttataagatctctgacaataaacctaccaatgtcttgcattcacaaaatgtgctttttttttttagaacgttggtatgaattgtatctcagtgaaattagaaccatgtccctcctcaattatgagatttggttggtgaccaccggtttattgtattgataatgaaatctcacaattaacttcttttctgatcaggaacccacccgattggcaaacattgaaaaggtggatggcattaagacttgccaaggatgtggagcaacctagagacacacgttgttgagggagtatccattgccacaaccacctttgaatacaatatttattattttcattcaaataacagaaaatatacatactctaccactcaaatttgcctctcttagttttgtatcttggagtagacttgtagaatcggaaggcaccatacatagatatttactgaaatattgttttaatctgtctaatcaaatgaacaaaaataattcagagtacattatccacagaatggatcaataaatcatggatatgcacccaatggaataccatagagtagagaaaaagaatacattgcagctgtgagaaacaatgtacatgaaaatcaggaacataatactgcatgaaagaagtaaggctgcatgagagtacatgcaacatgcttccatttatataaaatgcaaaaaggcgcaaacctaaccaatttagaaacattctggagcatgggaagttgcatttacatactcagatgtagtttctacaaatccgaaat

SEQ ID NO: 687305 - DNA, 601 bp, Homo sapiens
cagaaggcatacacacaaccaccaacaaaaacaggtctaggtgggtattttgcaggggagactcacagggctttcctgcagtaccatctcctctctttataaaaatttagaatcttgttctgattagtccaaacccacaaccatgcccttctcccattttatctgtttccccccctatttgggaataaatcttatggtttaaattactttgacaggtaaatgcmagtccagcatcagcaaacctggtgggttgccataagctactggcaaagtgcaaccaccaggggcgcccgaaacctgtggaggcggagattgtgagtttgtcaaaaacaaggacacccttaaagcaggcgcattgctgggtgtgaagcaggggagggggctttaaaaaggccgtaccttggtcgggctcggtgttcacacctgtaatcctagcactttgggaggccgaggcgggcggatcacaaggtcaggagatagagaccatcctggctaacacggtgaaaccccgtctctaccaaaaatacaaaaaatcagcggggtgtggtggcgggcgcctgtagtcccagctactcaggagactgaggcaggagaatggcgt

SEQ ID NO: 687306 - DNA, 1310 bp, Homo sapiens
ctctgcctcctggtttcaagcgattcttccgcctcagcctcccaagtagctgagattacaagcgcctgccactacgcccggttaatttttgtattttaatagagacggggtttcaccatgttggtcaggctggtctcaaactcctgacctcaggtgatccgcccacgctcagcctcccaaagtgctgggattacaggtgtgagccaccgtgcccggcttgggttttctttcttctttcccacaaaggtcagtaggaaactgtttgcaacaggaaatgccctggtctccaggtgctgctccaagaattggctgacccattgccatgtgtcattcaagtgacagtgttgagggactaaatatgtcattccacggttaaagttggctacaacaaatttggcaagaattaaagtgtaaacatttcggggaacattgtacaattaaagcatcagaaataaatggcaaaacagtttgctgctcctatagtcaaccaaatgaaagtttaaaacaataaagaaacattaaagtttcaggccaggtcactactattaaaggtttgtccatttcacttagaactcagtttctctagctcagtattattgatattttgtacctgataatttttttgtagcaggggactgactgtcctgagtgtagtaggactttgcaggccctcacctctgtcracaagatgccatttgactttgatgaaaataggctaccatggccgcagttgcccttggattccaaggcagcggaacatgagcaaaagcttggagccctgtcacttgagatggtcctcagtgataaagaaacaaattatttctggccaggcgcggtggctcacgcctgtaatctcagcactttgggaggccgaggcgggtggatcacgaggtcaagagatggagaccatcctggccaacagggtgaaaccccgtctctactaaaaacacaaaaattagctgggtgtggtggcgtgtggctgtagtcccagctacgcaggaggctgaggcaggagaatggcgtgaacccgggaggtggaggttgcagtgagctgagattgcaccactgcactccagcctgggcgacagagactctgtctcaaaataaataaataaataataatggtaaattctatcatgtatattttacaacttttacaaaggcataaaacttcataagaaaataccttctttggaggcaacctctgcaaaagacaatgtggctttgagggaacagggcatggtactgctgagacccagcagcggtgccagtggccaggctcctgcaagcccatctgtaccccgatccca

SEQ ID NO: 687307 - DNA, 613 bp, Homo sapiens
tagaagttatttctcctttcttccaatgtaggattttttttttttgagagggtctctgtcacccaggctggagtgcagtgacacaaacacagctcactacatccttgacctcttgggttcagatgatcctcccgcctcagcctccttagtagctgggacgacaggcacattccaccggcccggctaatttctttttaaagtttttgtagagatagggctctcactatgttgcccagactggtcttgaactcctgagctcaagcgattctctcaccttggcctcccagagtgttgggattacaagcgcgagccaccacacccagcccagtgwaggaatgtttaattcctccacttgctatcaaagaaaactgctaactttcttatttcctaatttctctttttctatttgcttctccttaggttcagctcttgggtgctatctccttagttttgagaatatgaaggtttgtttagaaaaaaaaaagcagaaaaaattcactggaagatttcacatttgtatgtatctttatgaaatgtgacagtgaagtgttagggtagagatatttgatctgattaccattaggataaaatcaaatctccttaccatgtctta

SEQ ID NO: 687308 - DNA, 638 bp, Homo sapiens
ggataaggcaacaatgagtacctcactgcatacttttagtaggttacagcatgcagatagtgatacatttaactaagtaactatatatagttcatactatgggcttaatcattttagaagaatcttattttaaaattytctgcaatttgagcaatgaagtgcaggttgggtggtgcagttggatgagctgctccctacaaatgggcttggaaaggtcagcacctatctggtgggaaatcatatttttcctgactatttgagacagtcagggtgggggccagttgggctgtagaagattgtctcccttcaatgtctgtgaaagagcttctaaggagagtgagaagcctttggcatgcagcaaaatctttacattggagagaacatagagtcattggaaattaaaagccacttctagaacactaggaacaagcaaaatagaactgctgagttgcagatttttgtttttaagttgaggatatctgaaaatttttgaggtaagctaaacactctctggccttccgacttccatcttcccacggcagccaatcagacctcagagtgccctgtgagcttctgtaagctgctaagaaaccacctaggagctgaccacttcctcatccaaataagcctgcttgctc

SEQ ID NO: 687309 - DNA, 638 bp, Homo sapiens
ggataaggcaacaatgagtacctcactgcatacttttagtaggttacagcatgcagatagtgatacatttaactaagtaactatatatagttcatactatgggcttaatcattttagaagaatcttattttaaaattttctgcaatttgagcaatgaagtgcaggttgggtggtgcagttggatgagctgctccctacaaatgggcttggaaaggtcagcacctatctggtgggaaatcatatttttcctgactatttgagacagtcagggtgggggccagttgggctgtagaagattgtctcccttcaatgtctgtgaaagagcttctaaggagagtgagaagcctttggcatgcagcaaaatctttacattggagagaacatagagtcattggaaattaaaagccacttctagaacactaggaacaagcaaaatagaactgctgagttgcagatttttgtttttaagttgaggatatctgaaaatttttgaggtaagctaaacactctctggccttccgacttccatcttcccacggcagccaatcagacctcagagtgccctgtgagcttctgtaagctgctaagaaaccacctaggagctgaccactycctcatccaaataagcctgcttgctc

SEQ ID NO: 687310 - DNA, 1616 bp, Homo sapiens
ctctagtcatcctacgatgcaatagaatgacagaacttattcctccttgtcaacagtacctttggacccattgactaatctcttccccactccactctcccctccctttcccatcctctggtaaccactattctactctctacttctatgagaccaacttttagattccacatatgagtgggatcatgcagtgtttgtctttctgttcctggattatttcactctcagtagtggctctccactcctagaagcctctttccactcctagaggtcacccttcactcctagaggtcgctctccacactagaggacaccttccactcctagaggttgcccttcactcctagaggtcactctccactcctacaggccaacttccactcctagaggcaacttttcattcccagggattaccctccactaccagaggtcactctccacttctgaaggccaccctccactcttagaggccagcattcatttctggaggccaccctccactcttagaggcgacgcttcacttctggaggctaccctccactcttagaggctgctcttcactcttagaggccactgttcactcctggaggccactctccattcttagagtctgccctccactccaagaggttgcccttcacactttgtggcttttctcagctaccaaaggctgcccttatttccttgccccataactttcttagccattaccaacctcattgagccagcaagaaaaatctccagaatgagagttctacaagacagagtcttatataggaagataattgtaagagtgacatctcctcacctttgctatattctctcggtaggaagcatgcactcaaagagagtagatcctacaaaggtgtgaacactgggagctgtggatcattcaggggttgacttagagtctgtctgtaatagatcccgtgggtaagatctacatacactatktatggcacaactgtatagctaaaaaggaaatatgttcaaaataggtggtcctgaaaatagaaaaccataagtaagaacttttaaatattttgtcccatggcccaaatgaacatccctcagaaccacattaacttagagttagttttcaggagggtattcttaattatagcagtaatctaaaataaataactggcagataaaacagaaacaagtacccctcaacaaaatccaacattattcctctctctctctcttttttttttagacggagtcttgctctgtagcccaggctggagtgcagtggggcaatcttggctcacagcaacctccatctcccgggttcaagcaattttcctgcctcagtctcctgagcaaatggaattacaggcacatgccaccacacctggctaatttttgtatttttagtagaaactgggtttcaccatgttggccaggctggcctcaaactcttgacctcaggtgatccaggtacctcggcctcccaaagtgctgggatttcaggtgtgagccaccatgcctagcctattatttctcttttgacacacagatatattccaaagtatatgtaagcatctgtataattgctataacaatttcacagttatttattatgaagttaatgttaattaatttattctgct

SEQ ID NO: 687311 - DNA, 1616 bp, Homo sapiens
ctctagtcatcctacgatgcaatagaatgacagaacttattcctccttgtcaacagtacctttggacccattgactaatctcttccccactccactctcccctccctttcccatcctctggtaaccactattctactctctacttctatgagaccaacttttagattccacatatgagtgggatcatgcagtgtttgtctttctgttcctggattatttcactctcagtagtggctctccactcctagaagcctctttccactcctagaggtcacccttcactcctagaggtcgctctccacactagaggacaccttccactcctagaggttgcccttcactcctagaggtcactctccactcctacaggccaacttccactcctagaggcaacttttcattcccagggattaccctccactaccagaggtcactctccacttctgaaggccaccctccactcttagaggccagcattcatttctggaggccaccctccactcttagaggcgacgcttcacttctggaggctaccctccactcttagaggctgctcttcactcttagaggccactgttcactcctggaggccactctccattcttagagtctgccctccactccaagaggttgcccttcacactttgtggcttttctcagctaccaaaggctgcccttatttccttgccccataactttcttagccattaccaacctcattgagccagcaagaaaaatctccagaatgagagttctacaagacagagtcttatataggaagataattgtaagagtgacatctcctcacctttgctatattctctcggtaggaagcatgcactcaaagagagtagatcctacaaaggtgtgaacactgggagctgtggatcattcaggggttgacttagagtctgtctgtaatagatcccgtgggtaagatctacatacactatttatggcacaactgtatagctaaaaaggaaatatgttcaaaataggtggtcctgaaaatagaaaaccataagtaagaacttttaaatattttgtcccatggcccaaatgaacatccctcagaaccacattaacttagagttagttttcaggagggtattcttaattatagcagtaatctaaaataaataactkgcagataaaacagaaacaagtacccctcaacaaaatccaacattattcctctctctctctcttttttttttagacggagtcttgctctgtagcccaggctggagtgcagtggggcaatcttggctcacagcaacctccatctcccgggttcaagcaattttcctgcctcagtctcctgagcaaatggaattacaggcacatgccaccacacctggctaatttttgtatttttagtagaaactgggtttcaccatgttggccaggctggcctcaaactcttgacctcaggtgatccaggtacctcggcctcccaaagtgctgggatttcaggtgtgagccaccatgcctagcctattatttctcttttgacacacagatatattccaaagtatatgtaagcatctgtataattgctataacaatttcacagttatttattatgaagttaatgttaattaatttattctgct

SEQ ID NO: 687312 - DNA, 1784 bp, Homo sapiens
tcaacaactatttttgagtgttttggatgggtcagacattgcgctaagtgaaaaataggaaggtaagaaaaagaagactctgaagatgattccctccccaaaactgagctactagctattactcagtggtctgaagtgacacttaatatacatccatccctccttccatctatccattcagtacttactgaacacctaccttgtgccaggcattgcattatataatggttatgaacaagtccaggaaagaaaaatatagggaaaagggaaaatgaaggggaaaaatgctgtcttcattctcatagctttgggagtgccttgtttctagaactcccatttctttcctggtggtctggccataaggcacagtacatggtggtaaaccaccagactgctggaattgagtagagattcttagtcatccatatgaggagaggaccttctatttaacttctaaatgtgtgccctgatttggcatattttaagcagagcaaaacattataccataaaggtatctaacatgattcctatgtagagattttaatattgtctagaaatacaggcacaagaaaaataagctctgagcaaagccaaaaggtactgaaaataatagaacatactttgaacattaaaaatcttgtatctggtttagttggtaaattagtttgagacatataattctattgccttccaaggaaagccctgatcttttaaaattaagatctgcctagactttataagaataaatcctgaccactttctgtgctttctgaaaaacaactaggtaatagaatgactaccactgagaagtattttgctttatggcagctgtcttttcattattattttatgagagcttgtctagatattatatatcctttactatctacatttagttcttttttagatgcccggggttatgtcagtttctttggatctaattggatctcaaaactccatcacttcaatactttccaaaagttcttaggcaggtaggcttacctccaaaaacatttaacatgactaatgcatgctgctggtcatttctattaaaacaaaaaaattaaaaggtatttttagagacttatgaacgccatcaacaattatttcaagtataagctagtttgtatatgccaagggtgagactttaaatgcctataaaatctgtctgtaaaaaaggaattttatgagagcaggcacattttactttcaactttaaggatctgagcctgctttggacttggtgttctatgaactatgagctaactaagttacgggaaagcagcctgcacccacggtaagatgaaaaggcagaatcctgggcctgtgcattttaattatagctctactgcctgcatcattgaccaagtttgggtatttgtttctgtacagaaaataagatttgaggcccacacagtggctcacacctgtaatcccaacactttgggaggctgaggcaggaggatcgcttgagtccaggatttttaagaccagcctgggcaacagaatgagtctctgtctctattctttaaaaataaaaataaaaaaataataaatatataaaataaaataaaatttgaataaccatttacttatttcccattgaaaatgctttttagttatgaaactattttaaacatgcttattttttgctgatgagaaacaggaattgaaattgggaaaagtataaaatactacataagtgaccaatatrgatatttccatgattattatctcaaattaacatattggtaagagaagccttcaccgtcctgggcactcga

SEQ ID NO: 687313 - DNA, 1955 bp, Homo sapiens
ttctgctacaaagaacattatagacaattaagaaaacttgaaaagaaactgagaattaaatgatcaagtgtattgatgttaactttccgattatgaagtagttatataaaatgtcctgacttgtgggaatacccacataccagatgtgatggcataatgtcagcaatttactctcaaatggcccacagggggaaagctgtttttcctaaaatgtggaaattttctccaattttaagactgtttcccaaaagttaatctaataaagaaatgaaacaataaataaaaaagcaaaaagccttaggcaaaccttatttttccacaaggaaagatctaaataaatcagtgcttaaaattaaaattatctaagtttgattgcactataacaatcgtaatacatccaaacattgacaatgaccacagtaccagtataccaaaatgatgtctatctaaacttaaatctatcactatgtataaagataaaattataaaatacaaacaagccatcaattggctccactaaattactaatggcaacttgattatttggctgtttaaacagcaaacatttgggcagttcgagtatgtaaaactcagtaatactggttttcatttgcaaaatccacttaaaagttagctgaagaggccaagaaacattatttaaaatactatataaattttcatcagacatgtataatatagaatatttccctttagtaaaaatgttcacatcatatatttaatgggaaacaaaatatcatgtgaatagcccaaataaaattgccttatctttcagagtatgtattttcttcttaaaatctgtgcatattcttttgttacttccaaaactggatcttgattcagattttccttgtgtgtaaatcctagaggagaagctatataggatccaggttcatatttagtagcagctgaaaaaaaaagcaagaattatattattattattattgttattattttaagatagggtctcactctttcacctatgctggagtgccatggtgtgatcacaggtcactgcagtcttgtcctcccaggcttaagcaattctcctgcctcagccccaagtacttggaactgcaggcatgagccactgtgcctggcaagcttttgtattttttataggggcagggtttcgtcatgttggcacaggctgctctcaaactcctgggctccagtgatctgcctgcctcaggctcccaaagtgctgggactacaaacgtgagccaacatgcctggccaaagaattatattctatatatttcatagttaactaagtgcaaatcagtaaaaaagagttgagagctttttcagtgttaacaagaatgaaaagtatgtatgactacaatgctaacttattattagataagaatctgcccatagttgcacactaaattaatgatcaytgtggttgtgtatcacagcttctggttttctcattcttcattcatttattcaacaaccacatgctaaggtactagactatgccctggagttacaagatgaagatgatacagtccacccctcagcaatcatatgctataacctgaaaaagcagacaaataggcaatttccataccaagtcatagataccctgacaggtataaaacagggcactattggaatgcaagagggacacctatcccagttttgtctcgatactgtaggcttttcggtggaggcatggttagtggatacctgaaggatgagaaaaaaaggttggcagatagagcaaagaagcaagtgcaaagagctggaggagaaggacgagcactgtggaattctgtgcagtccagtttggctggatcctagagcaaaggggcagagtaaagtaagtggtgagagataagcctgagtaacttgacaagaaccaaatgaatgtgggtgtttatattacatgttaaggaatttggaactttttctgagggcaaaagtaaacc

SEQ ID NO: 687314 - DNA, 1955 bp, Homo sapiens
ttctgctacaaagaacattatagacaattaagaaaacttgaaaagaaactgagaattaaatgatcaagtgtattgatgttaactttccgattatgaagtagttatataaaatgtcctgacttgtgggaatacccacataccagatgtgatggcataatgtcagcaatttactctcaaatggcccacagggggaaagctgtttttcctaaaatgtggaaattttctccaattttaagactgtttcccaaaagttaatctaataaagaaatgaaacaataaataaaaaagcaaaaagccttaggcaaaccttatttttccacaaggaaagatctaaataaatcagtgcttaaaattaaaattatctaagtttgattgcactataacaatcgtaatacatccaaacattgacaatgaccacagtaccagtataccaaaatgatgtctatctaaacttaaatctatcactatgtataaagataaaattataaaatacaaacaagccatcaattggctccactaaattactaatggcaacttgattatttggctgtttaaacagcaaacatttgggcagttcgagtatgtaaaactcagtaatactggttttcatttgcaaaatccacttaaaagttagctgaagaggccaagaaacattatttaaaatactatataaattttcatcagacatgtataatatagaatatttccctttagtaaaaatgttcacatcatatatttaatgggaaacaaaatatcatgtgaatagcccaaataaaattgccttatctttcagagtatgtattttcttcttaaaatctgtgcatattcttttgttacttccaaaactggatcttgattcagattttccttgtgtgtaaatcctagaggagaagctatataggatccaggttcatatttagtagcagctgaaaaaaaaagcaagaattatattattattattattgttattattttaagatagggtctcactctttcacctatgctggagtgccatggtgtgatcacaggtcactgcagtcttgtcctcccaggcttaagcaattctcctgcctcagccccaagtacttggaactgcaggcatgagccactgtgcctggcaagcttttgtattttttataggggcagggtttcgtcatgttggcacaggctgctctcaaactcctgggctccagtgatctgcctgcctcaggctcccaaagtgctgggactacaaacgtgagccaacatgcctggccaaagaattatattctatatatttcatagttaactaagtgcaaatcagtaaaaaagagttgagagctttttcagtgttaacaagaatgaaaagtatgtatgactacaatgctaacttattattagataagaatctgcccatagttgcacactaaattaatgatcattgtggttgtgtatcacagcttctggttttctcattcttcattcatttattcaacaaccrcatgctaaggtactagactatgccctggagttacaagatgaagatgatacagtccacccctcagcaatcatatgctataacctgaaaaagcagacaaataggcaatttccataccaagtcatagataccctgacaggtataaaacagggcactattggaatgcaagagggacacctatcccagttttgtctcgatactgtaggcttttcggtggaggcatggttagtggatacctgaaggatgagaaaaaaaggttggcagatagagcaaagaagcaagtgcaaagagctggaggagaaggacgagcactgtggaattctgtgcagtccagtttggctggatcctagagcaaaggggcagagtaaagtaagtggtgagagataagcctgagtaacttgacaagaaccaaatgaatgtgggtgtttatattacatgttaaggaatttggaactttttctgagggcaaaagtaaacc

SEQ ID NO: 687315 - DNA, 1955 bp, Homo sapiens
ttctgctacaaagaacattatagacaattaagaaaacttgaaaagaaactgagaattaaatgatcaagtgtattgatgttaactttccgattatgaagtagttatataaaatgtcctgacttgtgggaatacccacataccagatgtgatggcataatgtcagcaatttactctcaaatggcccacagggggaaagctgtttttcctaaaatgtggaaattttctccaattttaagactgtttcccaaaagttaatctaataaagaaatgaaacaataaataaaaaagcaaaaagccttaggcaaaccttatttttccacaaggaaagatctaaataaatcagtgcttaaaattaaaattatctaagtttgattgcactataacaatcgtaatacatccaaacattgacaatgaccacagtaccagtataccaaaatgatgtctatctaaacttaaatctatcactatgtataaagataaaattataaaatacaaacaagccatcaattggctccactaaattactaatggcaacttgattatttggctgtttaaacagcaaacatttgggcagttcgagtatgtaaaactcagtaatactggttttcatttgcaaaatccacttaaaagttagctgaagaggccaagaaacattatttaaaatactatataaattttcatcagacatgtataatatagaatatttccctttagtaaaaatgttcacatcatatatttaatgggaaacaaaatatcatgtgaatagcccaaataaaattgccttatctttcagagtatgtattttcttcttaaaatctgtgcatattcttttgttacttccaaaactggatcttgattcagattttccttgtgtgtaaatcctagaggagaagctatataggatccaggttcatatttagtagcagctgaaaaaaaaagcaagaattatattattattattattgttattattttaagatagggtctcactctttcacctatgctggagtgccatggtgtgatcacaggtcactgcagtcttgtcctcccaggcttaagcaattctcctgcctcagccccaagtacttggaactgcaggcatgagccactgtgcctggcaagcttttgtattttttataggggcagggtttcgtcatgttggcacaggctgctctcaaactcctgggctccagtgatctgcctgcctcaggctcccaaagtgctgggactacaaacgtgagccaacatgcctggccaaagaattatattctatatatttcatagttaactaagtgcaaatcagtaaaaaagagttgagagctttttcagtgttaacaagaatgaaaagtatgtatgactacaatgctaacttattattagataagaatctgcccatagttgcacactaaattaatgatcattgtggttgtgtatcacagcttctggttttctcattcttcattcatttattcaacaaccacatgctaaggtactagactatgccctggagttacaagatgaagatgatacagtccacccctcagcaatcatatgctataacctgaaaaagcagacaaataggcaatttccataccaagtcatagataccctgacaggtataaaacagggcactattggaatgcaagagggayacctatcccagttttgtctcgatactgtaggcttttcggtggaggcatggttagtggatacctgaaggatgagaaaaaaaggttggcagatagagcaaagaagcaagtgcaaagagctggaggagaaggacgagcactgtggaattctgtgcagtccagtttggctggatcctagagcaaaggggcagagtaaagtaagtggtgagagataagcctgagtaacttgacaagaaccaaatgaatgtgggtgtttatattacatgttaaggaatttggaactttttctgagggcaaaagtaaacc

SEQ ID NO: 687316 - DNA, 1047 bp, Homo sapiens
  misc_feature 653, 654, 655, 656, 657, 658, 659, 660, 661, 662, 663, 664,665, 666, 667, 668, 669, 670, 671, 672, 673, 674, 675, 676,677, 678, 679, 680, 681, 682, 683, 684, 685, 686, 687, 688,689, 690, 691, 692, 693, 694, 695, 696, 697, 698, 699: n = A,T,C or G
  misc_feature 700, 701, 702, 703, 704, 705, 706, 707, 708, 709, 710, 711,712, 713, 714, 715, 716, 717, 718, 719, 720, 721, 722, 723,724, 725, 726, 727, 728, 729, 730, 731, 732, 733, 734, 735,736, 737, 738, 739, 740, 741, 742, 743, 744, 745, 746: n = A,T,C or G
  misc_feature 747, 748, 749, 750, 751, 752: n = A,T,C or G
tggcactttaggggctttggatcaatcattttaatcttttttggctttagcccagttatcwatagagagtgagctaaagtagattcttatactgtatatcctccagctataaacttttatggctattgaatgtgaaatttgggaagcatctcatttccagaattccaccctagctcagcagtttcactctgctttttgtgttgtggcagacttgtatttcagcagtaagcaccttcacctttttgatatcccaggattcaaatgaaaaaaaaaaaaaaaaaaaaaaaaaaaaaacaaaagttagtgggggaaaagaatagcttagtgcagaaaagggaaagcttcctttcttttcctgaaaccccacagtgttgtatcctctcagtctggctgtttaatatgaaagtcaagtggcaaagacagaagaagacaagctttgtgtctttatcttcttatttccatgtttgtgccagtcaaatgaggtaaaaattcataatacatagtaaagggtggttgggaataaaagcacaaaattaagaagggccctgcttgaaattttggaaaattctgtctcattcattgaaacagaaatgaagctgactttacaaaaatgttgatgataaaattataataattataattatatgatgatnnnnnnnnnnnnnnnnnnnnnnnnnnnnnnnnnnnnnnnnnnnnnnnnnnnnnnnnnnnnnnnnnnnnnnnnnnnnnnnnnnnnnnnnnnnnnnnnnnnngaattcaacaccatggacaacgggattcactgggctgccattctgaccgttgcaaccgcaaccctttctctaagcagctgggatcacagcctcttccattcttccttcttgtatatcatgtcatggagcagatgctacacacagaaacccaacagttctttccaggcttcaacctgtaaaacccgactccactctgagtattccaggcccacacatcaatgacagtgccttgaaaacagaacaaagttcccctgtagtgtccacaccaggttgggggctgtcacacccctactaa

SEQ ID NO: 687317 - DNA, 1047 bp, Homo sapiens
  misc_feature 653, 654, 655, 656, 657, 658, 659, 660, 661, 662, 663, 664,665, 666, 667, 668, 669, 670, 671, 672, 673, 674, 675, 676,677, 678, 679, 680, 681, 682, 683, 684, 685, 686, 687, 688,689, 690, 691, 692, 693, 694, 695, 696, 697, 698, 699: n = A,T,C or G
  misc_feature 700, 701, 702, 703, 704, 705, 706, 707, 708, 709, 710, 711,712, 713, 714, 715, 716, 717, 718, 719, 720, 721, 722, 723,724, 725, 726, 727, 728, 729, 730, 731, 732, 733, 734, 735,736, 737, 738, 739, 740, 741, 742, 743, 744, 745, 746: n = A,T,C or G
  misc_feature 747, 748, 749, 750, 751, 752: n = A,T,C or G
tggcactttaggggctttggatcaatcattttaatcttttttggctttagcccagttatctatagagagtgagctaaagtagattcttatactgtatatcctccagctataaacttttatggctattgaatgtgaaatttgggaagcatctcatttccagaattccaccctagctcagcagtttcactctgctttttgtgttgtggcagacttgtatttcagcagtaagcaccttcacctttttgatatcycaggattcaaatgaaaaaaaaaaaaaaaaaaaaaaaaaaaaaacaaaagttagtgggggaaaagaatagcttagtgcagaaaagggaaagcttcctttcttttcctgaaaccccacagtgttgtatcctctcagtctggctgtttaatatgaaagtcaagtggcaaagacagaagaagacaagctttgtgtctttatcttcttatttccatgtttgtgccagtcaaatgaggtaaaaattcataatacatagtaaagggtggttgggaataaaagcacaaaattaagaagggccctgcttgaaattttggaaaattctgtctcattcattgaaacagaaatgaagctgactttacaaaaatgttgatgataaaattataataattataattatatgatgatnnnnnnnnnnnnnnnnnnnnnnnnnnnnnnnnnnnnnnnnnnnnnnnnnnnnnnnnnnnnnnnnnnnnnnnnnnnnnnnnnnnnnnnnnnnnnnnnnnnngaattcaacaccatggacaacgggattcactgggctgccattctgaccgttgcaaccgcaaccctttctctaagcagctgggatcacagcctcttccattcttccttcttgtatatcatgtcatggagcagatgctacacacagaaacccaacagttctttccaggcttcaacctgtaaaacccgactccactctgagtattccaggcccacacatcaatgacagtgccttgaaaacagaacaaagttcccctgtagtgtccacaccaggttgggggctgtcacacccctactaa

SEQ ID NO: 687318 - DNA, 1047 bp, Homo sapiens
  misc_feature 653, 654, 655, 656, 657, 658, 659, 660, 661, 662, 663, 664,665, 666, 667, 668, 669, 670, 671, 672, 673, 674, 675, 676,677, 678, 679, 680, 681, 682, 683, 684, 685, 686, 687, 688,689, 690, 691, 692, 693, 694, 695, 696, 697, 698, 699: n = A,T,C or G
  misc_feature 700, 701, 702, 703, 704, 705, 706, 707, 708, 709, 710, 711,712, 713, 714, 715, 716, 717, 718, 719, 720, 721, 722, 723,724, 725, 726, 727, 728, 729, 730, 731, 732, 733, 734, 735,736, 737, 738, 739, 740, 741, 742, 743, 744, 745, 746: n = A,T,C or G
  misc_feature 747, 748, 749, 750, 751, 752: n = A,T,C or G
tggcactttaggggctttggatcaatcattttaatcttttttggctttagcccagttatctatagagagtgagctaaagtagattcttatactgtatatcctccagctataaacttttatggctattgaatgtgaaatttgggaagcatctcatttccagaattccaccctagctcagcagtttcactctgctttttgtgttgtggcagacttgtatttcagcagtaagcaccttcacctttttgatatcccaggattcaaatgaaaaaaaaaaaaaaaaaaaaaaaaaaaaracaaaagttagtgggggaaaagaatagcttagtgcagaaaagggaaagcttcctttcttttcctgaaaccccacagtgttgtatcctctcagtctggctgtttaatatgaaagtcaagtggcaaagacagaagaagacaagctttgtgtctttatcttcttatttccatgtttgtgccagtcaaatgaggtaaaaattcataatacatagtaaagggtggttgggaataaaagcacaaaattaagaagggccctgcttgaaattttggaaaattctgtctcattcattgaaacagaaatgaagctgactttacaaaaatgttgatgataaaattataataattataattatatgatgatnnnnnnnnnnnnnnnnnnnnnnnnnnnnnnnnnnnnnnnnnnnnnnnnnnnnnnnnnnnnnnnnnnnnnnnnnnnnnnnnnnnnnnnnnnnnnnnnnnnngaattcaacaccatggacaacgggattcactgggctgccattctgaccgttgcaaccgcaaccctttctctaagcagctgggatcacagcctcttccattcttccttcttgtatatcatgtcatggagcagatgctacacacagaaacccaacagttctttccaggcttcaacctgtaaaacccgactccactctgagtattccaggcccacacatcaatgacagtgccttgaaaacagaacaaagttcccctgtagtgtccacaccaggttgggggctgtcacacccctactaa

SEQ ID NO: 687319 - DNA, 1047 bp, Homo sapiens
  misc_feature 653, 654, 655, 656, 657, 658, 659, 660, 661, 662, 663, 664,665, 666, 667, 668, 669, 670, 671, 672, 673, 674, 675, 676,677, 678, 679, 680, 681, 682, 683, 684, 685, 686, 687, 688,689, 690, 691, 692, 693, 694, 695, 696, 697, 698, 699: n = A,T,C or G
  misc_feature 700, 701, 702, 703, 704, 705, 706, 707, 708, 709, 710, 711,712, 713, 714, 715, 716, 717, 718, 719, 720, 721, 722, 723,724, 725, 726, 727, 728, 729, 730, 731, 732, 733, 734, 735,736, 737, 738, 739, 740, 741, 742, 743, 744, 745, 746: n = A,T,C or G
  misc_feature 747, 748, 749, 750, 751, 752: n = A,T,C or G
tggcactttaggggctttggatcaatcattttaatcttttttggctttagcccagttatctatagagagtgagctaaagtagattcttatactgtatatcctccagctataaacttttatggctattgaatgtgaaatttgggaagcatctcatttccagaattccaccctagctcagcagtttcactctgctttttgtgttgtggcagacttgtatttcagcagtaagcaccttcacctttttgatatcccaggattcaaatgaaaaaaaaaaaaaaaaaaaaaaaaaaaaaacaaaagttagtgggggaaaagaatagcttagtgcagaaaagggaaagcttcctttcttttcctgaaaccccacagtgttgtatcctctcartctggctgtttaatatgaaagtcaagtggcaaagacagaagaagacaagctttgtgtctttatcttcttatttccatgtttgtgccagtcaaatgaggtaaaaattcataatacatagtaaagggtggttgggaataaaagcacaaaattaagaagggccctgcttgaaattttggaaaattctgtctcattcattgaaacagaaatgaagctgactttacaaaaatgttgatgataaaattataataattataattatatgatgatnnnnnnnnnnnnnnnnnnnnnnnnnnnnnnnnnnnnnnnnnnnnnnnnnnnnnnnnnnnnnnnnnnnnnnnnnnnnnnnnnnnnnnnnnnnnnnnnnnnngaattcaacaccatggacaacgggattcactgggctgccattctgaccgttgcaaccgcaaccctttctctaagcagctgggatcacagcctcttccattcttccttcttgtatatcatgtcatggagcagatgctacacacagaaacccaacagttctttccaggcttcaacctgtaaaacccgactccactctgagtattccaggcccacacatcaatgacagtgccttgaaaacagaacaaagttcccctgtagtgtccacaccaggttgggggctgtcacacccctactaa

SEQ ID NO: 687320 - DNA, 1047 bp, Homo sapiens
  misc_feature 653, 654, 655, 656, 657, 658, 659, 660, 661, 662, 663, 664,665, 666, 667, 668, 669, 670, 671, 672, 673, 674, 675, 676,677, 678, 679, 680, 681, 682, 683, 684, 685, 686, 687, 688,689, 690, 691, 692, 693, 694, 695, 696, 697, 698, 699: n = A,T,C or G
  misc_feature 700, 701, 702, 703, 704, 705, 706, 707, 708, 709, 710, 711,712, 713, 714, 715, 716, 717, 718, 719, 720, 721, 722, 723,724, 725, 726, 727, 728, 729, 730, 731, 732, 733, 734, 735,736, 737, 738, 739, 740, 741, 742, 743, 744, 745, 746: n = A,T,C or G
  misc_feature 747, 748, 749, 750, 751, 752: n = A,T,C or G
tggcactttaggggctttggatcaatcattttaatcttttttggctttagcccagttatctatagagagtgagctaaagtagattcttatactgtatatcctccagctataaacttttatggctattgaatgtgaaatttgggaagcatctcatttccagaattccaccctagctcagcagtttcactctgctttttgtgttgtggcagacttgtatttcagcagtaagcaccttcacctttttgatatcccaggattcaaatgaaaaaaaaaaaaaaaaaaaaaaaaaaaaaacaaaagttagtgggggaaaagaatagcttagtgcagaaaagggaaagcttcctttcttttcctgaaaccccacagtgttgtatcctctcagtctggctgtttaatatgaaagtcaagtggcaaagacagaagaagacamgctttgtgtctttatcttcttatttccatgtttgtgccagtcaaatgaggtaaaaattcataatacatagtaaagggtggttgggaataaaagcacaaaattaagaagggccctgcttgaaattttggaaaattctgtctcattcattgaaacagaaatgaagctgactttacaaaaatgttgatgataaaattataataattataattatatgatgatnnnnnnnnnnnnnnnnnnnnnnnnnnnnnnnnnnnnnnnnnnnnnnnnnnnnnnnnnnnnnnnnnnnnnnnnnnnnnnnnnnnnnnnnnnnnnnnnnnnngaattcaacaccatggacaacgggattcactgggctgccattctgaccgttgcaaccgcaaccctttctctaagcagctgggatcacagcctcttccattcttccttcttgtatatcatgtcatggagcagatgctacacacagaaacccaacagttctttccaggcttcaacctgtaaaacccgactccactctgagtattccaggcccacacatcaatgacagtgccttgaaaacagaacaaagttcccctgtagtgtccacaccaggttgggggctgtcacacccctactaa

SEQ ID NO: 687321 - DNA, 1047 bp, Homo sapiens
  misc_feature 653, 654, 655, 656, 657, 658, 659, 660, 661, 662, 663, 664,665, 666, 667, 668, 669, 670, 671, 672, 673, 674, 675, 676,677, 678, 679, 680, 681, 682, 683, 684, 685, 686, 687, 688,689, 690, 691, 692, 693, 694, 695, 696, 697, 698, 699: n = A,T,C or G
  misc_feature 700, 701, 702, 703, 704, 705, 706, 707, 708, 709, 710, 711,712, 713, 714, 715, 716, 717, 718, 719, 720, 721, 722, 723,724, 725, 726, 727, 728, 729, 730, 731, 732, 733, 734, 735,736, 737, 738, 739, 740, 741, 742, 743, 744, 745, 746: n = A,T,C or G
  misc_feature 747, 748, 749, 750, 751, 752: n = A,T,C or G
tggcactttaggggctttggatcaatcattttaatcttttttggctttagcccagttatctatagagagtgagctaaagtagattcttatactgtatatcctccagctataaacttttatggctattgaatgtgaaatttgggaagcatctcatttccagaattccaccctagctcagcagtttcactctgctttttgtgttgtggcagacttgtatttcagcagtaagcaccttcacctttttgatatcccaggattcaaatgaaaaaaaaaaaaaaaaaaaaaaaaaaaaaacaaaagttagtgggggaaaagaatagcttagtgcagaaaagggaaagcttcctttcttttcctgaaaccccacagtgttgtatcctctcagtctggctgtttaatatgaaagtcaagtggcaaagacagaagaagacaagctttgtgtctttatcttcttatttccatgtttgtgccagtcaaatgaggtaaaaattcataatacatagtaaagggtggttgggaataaaagcacaaaattaagaagggccctgsttgaaattttggaaaattctgtctcattcattgaaacagaaatgaagctgactttacaaaaatgttgatgataaaattataataattataattatatgatgatnnnnnnnnnnnnnnnnnnnnnnnnnnnnnnnnnnnnnnnnnnnnnnnnnnnnnnnnnnnnnnnnnnnnnnnnnnnnnnnnnnnnnnnnnnnnnnnnnnnngaattcaacaccatggacaacgggattcactgggctgccattctgaccgttgcaaccgcaaccctttctctaagcagctgggatcacagcctcttccattcttccttcttgtatatcatgtcatggagcagatgctacacacagaaacccaacagttctttccaggcttcaacctgtaaaacccgactccactctgagtattccaggcccacacatcaatgacagtgccttgaaaacagaacaaagttcccctgtagtgtccacaccaggttgggggctgtcacacccctactaa

SEQ ID NO: 687322 - DNA, 667 bp, Homo sapiens
atagataatgggatggagagaactgggaagcaaatgcgatgtcatgtaccctgtagacacacaaagttaattattgatgacattatgataaaaaaagaatatgagaaaataaagcaagttagaaaaaattaagggaagactgtagaataaattattatggtaaaacaaagattaagaaacagtttgaaaaggatataaggtgatttgggggaaagaaaaagagaagcatatgtggttcaagaaaacacatagcaaaattcccaagaaggggagaatagaaaagaaggaaatactgaagaaatgcacactattgtggaaattgtttgactaaactgagacaagcaacaaacgaatatttggaatttcattctatacacttaaatgaattccattattggaatgaataaaaaaggtccatctagtaattgaacaaatttcatataaattgacccaaaatataaagataacaggcactttgaacacttctgggtgtctgtggtggcaaatactctgccagcaaggactgtacatctgatayttcagagatccctggagtcaatctgggaggcatgctccttgttccacactggtcagttctccatcaggccactgcattctgtttggagcctcatagtgacatgtgaaagggagaaactggaaaaggtaa

SEQ ID NO: 687323 - DNA, 623 bp, Homo sapiens
tgacaataattatgccctttgataaaagattttatttttgaaatcacctgaagcaataaccttaaatggatacaaagagttatgtacagaatgtcttttatagtgtgatataatgtcttataacaggaaaatgaatagctaaagtcatttcatagctaaaaaatcctatgcagctactaaagmggtgtttactaagcattatcataaactgttggtagaagtgagaattactacaaatttattgaacagcagtttgataatttttaatgtttttaatttataaagaaaacaggtttatttggctcgcagttctgcaggttgtacacaaagcataatgccagcatctgctcctggcaagggcctcaggaagcttgtaataatggtacaaggtgaaagggaaatagcatatcacatggcaagagaggggagaggtgccaggctcttttaaaccagctcttggtgtgaattgatacagtgagaactctctcattacagtgaagacaacaccaagccattcatgacagatctatccctaaacacttcccactaggcccacctccaacattggaggtcacatttcagcataagatttggaggggtcagatcctaggcaaaaagaacaa

SEQ ID NO: 687324 - DNA, 623 bp, Homo sapiens
tgacaataattatgccctttgataaaagattttatttttgaaatcacctgaagcaataaccttaaatggatacaaagagttatgtacagaatgtcttttatagtgtgatataatgtcttataacaggaaaatgaatagctaaagtcatttcatagctaaaaaatcctatgcagctactaaagcggtgtttactaagcattatcataaactgttggtagaagtgagaattactacaaatttattgaacagcagtttgataatttttaatgtttttaatttataaagaaaacaggtttatttggctcgcagttctgcaggttgtacacaaagcataatgccagcatctgctcctggcaagggcctcaggaagcttgtaataatggtacaaggtgaaagggaaatagcatatcacatggcaagagaggggagaggtgccaggctcttttaaaccagctcttggtgtgaattgatacagtgagaactctctcattacagtgaagacaacaccaagccattcatgasagatctatccctaaacacttcccactaggcccacctccaacattggaggtcacatttcagcataagatttggaggggtcagatcctaggcaaaaagaacaa

SEQ ID NO: 687325 - DNA, 1410 bp, Homo sapiens
agggcactgaaaatatgacagtgatttatatgacagtcataaataataataaactttgaattataacctgtggttggttatcactcatattttgactgacatgctttaaaaaaaaatwaggcggtatagtaagggagaaaatacggcggatgagtacattttgagtggataggtgaacaaatggatgaaatattcatttactgagtaattattatctgctagacacatgtcggacaatttctcattatctaattgaaacctcatcaggtttcccccattttgtagagaaggaaactaatgtaagagatgtgacttgtccacaactacccacctagtaaaaggtaggactggaatttgtatctgttttcttctggctccaaaaatcacaggtagaaataaaaaccacttaatctaagaactggtatttattttaaaataactattgttggataggcgtccgtgcatcccccgagtctttgacagtttctgccctcagggaaggattttggaggaaaaatatgtcttacagggcaaaccttgcccagttggtgataagttgaatgtgaaagggaagcatctctatttcagtttagttctgaatcagattggatgttgaaaaagaaaaatgatgcagggaaaaccagggtaatacaaataaagtttagctaataatagtattataccaatgttaatttattagttttgaaaattgtgctatggttatatgaaatgctaacattaggggaagctgagtgaagggtacatgggaactctcagttatatttttgtaacttttctgtaactctaaaattatttcaaaataaaacgcttttaaaaaagttaaaaaaacctccctgagaagagtggtacaaaaaaatttggctggaaagagggatgaagacctttcatcttcagtttttatcatctagctatcatacaagaatatgcagacaacaaagttctactcaggaagtggtttatgtccaacatctgttttaatacattttccttgtttctgttattttattctgcttaccagttgaagtgatggcaacatgaagaatagtgactgaaatagcataatcccaaacccattcttccacaactggaacaaaaaacaatccacaaacaaagtaggtgacctctgttgaaactaaaagaactgcaaatacaaggaagaatataattattgaggactagagcaatgaacattctgaaatacaactagtaacaagaccaggaaagcttactttgagaataaattttggtaagaattttttaaatgttccatttcctaacaatcctcaaatttggataaaacaattaacatattttatcttttaacaattttaagatttatagaaaaccacaatatatcatttctgtttcacattctttgtgtttaacatt

SEQ ID NO: 687326 - DNA, 1410 bp, Homo sapiens
agggcactgaaaatatgacagtgatttatatgacagtcataaataataataaactttgaattataacctgtggttggttatcactcatattttgactgacatgctttaaaaaaaaattaggcggtatagtaagggagaaaatacggcggatgagtacattttgagtggataggtgaacaaatggatgaaatattcatttactgagtaattattatctgctagacacatgtcrgacaatttctcattatctaattgaaacctcatcaggtttcccccattttgtagagaaggaaactaatgtaagagatgtgacttgtccacaactacccacctagtaaaaggtaggactggaatttgtatctgttttcttctggctccaaaaatcacaggtagaaataaaaaccacttaatctaagaactggtatttattttaaaataactattgttggataggcgtccgtgcatcccccgagtctttgacagtttctgccctcagggaaggattttggaggaaaaatatgtcttacagggcaaaccttgcccagttggtgataagttgaatgtgaaagggaagcatctctatttcagtttagttctgaatcagattggatgttgaaaaagaaaaatgatgcagggaaaaccagggtaatacaaataaagtttagctaataatagtattataccaatgttaatttattagttttgaaaattgtgctatggttatatgaaatgctaacattaggggaagctgagtgaagggtacatgggaactctcagttatatttttgtaacttttctgtaactctaaaattatttcaaaataaaacgcttttaaaaaagttaaaaaaacctccctgagaagagtggtacaaaaaaatttggctggaaagagggatgaagacctttcatcttcagtttttatcatctagctatcatacaagaatatgcagacaacaaagttctactcaggaagtggtttatgtccaacatctgttttaatacattttccttgtttctgttattttattctgcttaccagttgaagtgatggcaacatgaagaatagtgactgaaatagcataatcccaaacccattcttccacaactggaacaaaaaacaatccacaaacaaagtaggtgacctctgttgaaactaaaagaactgcaaatacaaggaagaatataattattgaggactagagcaatgaacattctgaaatacaactagtaacaagaccaggaaagcttactttgagaataaattttggtaagaattttttaaatgttccatttcctaacaatcctcaaatttggataaaacaattaacatattttatcttttaacaattttaagatttatagaaaaccacaatatatcatttctgtttcacattctttgtgtttaacatt

SEQ ID NO: 687327 - DNA, 1288 bp, Homo sapiens
catcagagatccataagcagtagaacagagttaaaacaagaagatattatacaatatgggaagaaagaaaattgagttgactactaaagaaagctggacatcgggatgtatatttttggagattaggtacccaaattaccctttaaagcagaattaaaaaatactacataaaataaaacatttacatatttttaaatggcattgatgggttggcaaaaaaaaaaaaagccatgtctaaaaagaaaccaggaaccataaaagataatgtggtatgtacttttgttctgagaacttctgctgaatcctggaatactggctttccattttgacagcttcttgggacatggagaatactaatgaaaactcagggtccatcgatggtaggaagcctaacaggatacccctacacaaagctgaagatgtgtaaaggtgaaagaaagaaggaaacactagagacatttgcctgcattaacaataatgctagataaggccaggtgcagcggctcatgtctgtaattctagcactttgggaggccaaggtgagtggatcaactgaacccaggagtgtgagaccagcctggacaatatggtgaaacctcacctctacaaaaaatataaaaattagctgggcatggtggtgtgcatctgtagtcccagctacttggagggaggcctgccaaggcaggaggatggcttgagccaggaaggtcaaggctgctgtgattgcaccactgcactccagcctgggtgacagagagcctatctctaaataaataaaaatttaaaaataacagcaatgctagataagtggtggaagaaagtaaaaacttttttgaaaatataacagtaatgcccgataagtgacrgaaaaaagtaaaaacttccttgaaaatatataagcacaagttcgccctcaatgggtctgaaaaaaacttgagaatttagcctagaatgttcctggctagttgtgcacccaggggactggcagaaacaaggaatttagtttccatctaggcctcaaccacattctatctacagacataattccaaggaagatatttgcagtcaaaaatcaacacccaaggatgtcataagtaagaaagcaatagaccccaaaaccataaacattgggattctcaggcagaatatacaaccatatttaatgtgattaaagaaataaaagagaaccttgaaaacacaggtaatgtggattttaaaaataactactagaaatagaacttttagaaactattaataattaaaattcaaaactctgtgggaagattaa

SEQ ID NO: 687328 - DNA, 2186 bp, Homo sapiens
tgatgaagagaattttcatattcacagacattttgtagaggacagttaaacccagccagcaatgataattgagtaacatcggttgctcatgtttttacttattcacaagtcactgtttaccaaaattattcaatggccctcccatcctggaccagacaaaaatcactctttgtcctagctaaaggaaagatccactccaggattttaaaaacaatacaccattttactccagagattacgagttacgttttaatggcaaaggaagcactttatgtgactatttgaacagtaccacctgttgaaacttgtaatgttattgcctgagactcttcagaattcaagatttaaactttcctctagtcgtgtgagagctgatgtgagcactgccaaagatacaccaatgagatcctctgtcctcaaaactcagatatttcgagccctgcttcggggaggaacagctctggacactggcagcttcccgacaccagcagctgaggcacgttatgtcaacaagatggaacctgcctgatctcactttgccaggtacactggaacccaaaccacagcaggatgaccatttgatgtgtgtggttacttgggagtaatagcagcatccttgcagtgtgtctggatggaaaacagctgtcagatttgaaggcacttgtagataaggtcattctaggtgtgtgtgtagtgactgcttttgttcatttcttgttggttacgtagagcaagggttgaaattgtttccccccccccacccccacccaaaattacatgtataagagacttttctgagtgggacaaattcaaggggggaaaaatcatgttactccctgttattcagggaaatctaataatttggccctagaaaagtggtattcactatataagtctacagtgatcctgatggagattgccctggaatttttatttttctaggatagggcgggccactgactgtggtttgttcctttatttaatctattcatcctgctcctaccagrtggctcagaaaacatagataccactaattttaagggaagtgacttgtattctttaagttcataattgacaatttcatgggaaataaagaggagataatggaaaatgatagagccaatcacaatgataaaaatggagagggtaaaaagacatttaatttatcttaaataaatgagaaaatgaataggaaaaacagatgccattaattcttctttcaggtcccttatggtaatagaaataagaaggagaggaaacccaaaacataatgttgtttatctatctagttatctatctatctatccatctatctatctatctatctatctttgattctgttcataattcaccttgtcaagtgccaaggactctcttgccttcaaatttagacaagagcaagttttcatcctttttttcatgtttttgagcatttttaaatgataactgaattatgagtcattgccgagtttttggcatgattgtaccaaaagcgcataacatgttttctacctgttgatgaagttattgcctgcatgtagaactccaggaacaatttggcttcctgcccatgaaattacttctcatcattcaggtttcaatttaatgccagtgtgtgtactataagatgtatgtttaatcctacaaatgagttgcatatgcatttcaatttccgaaaacctgggctgaattttaaaagaaagcatttgggatctattgtattaaaggtgcttctgagctaagtgcattctaaatacactgtacaatcaaaaataatgctggactttgggcactatgctaaattttttaaaaaaggaaaaaaatacacaaatgatacctttttgaacttgcttttcctgagaactgaaaagatatatcatggacttttttttttcagttaccctttgttttttccccttccaatttgccttctgtcatcttctgcccactagcctagtaagtcaaaacaactctaaaaggaaagtgtcttgaataggaagcttattcagaaagcatttgtagtagaggcagaatctactccaagaagaaaccagtaaggtacttttaaaacttcatttcttggtgtaaagattctgttgctggatgaagatctatataaaatatattacaatgtactccaaatttaacaaattaaaactactgccacacaaaattttttttaagtg

SEQ ID NO: 687329 - DNA, 586 bp, Homo sapiens
ttttttttttgagacagagtctcactctgttgcccaggctggagtgcagtggcacaatctcggctcactgcaagctccacctcccgggttcatgccattctcctgcctcagcctcccaagtagctgggactacaggcatccaccactacacctggctattttttttgtatttttaatagagacggggtttcacygtgttagccaggatggtcttgatctcctgaccttgtgatccgcccgccttggcctgccaaagtgctgggattgcaggcgtgagccaccgtgcccggccagatactaatatctttcaagatttagaaaagagtattttagttaaataaatagttcagaagtatgaaacaatatgataaaatatacctaacattcatggctttttgccgagggacagcagaatcagccaaatagaggaaggtatactatgtagctcatgaaaattcaacttcttggcctctttctttcacgaatctcaagtctccatttctctcattctaaataaatattgttccctgttgaattctatagtcttaattttgtctccttcttcttaaagagggttgccaaatat

SEQ ID NO: 687330 - DNA, 624 bp, Homo sapiens
tgcctcagcctcctgagtagcttcgattacaggcacctgccaccacgccttgctaatttttgtatttttagtagagacagggtttcagcatgttgaccagactggtcccaaactcctgacctcaggtgattcgctcacctcagcctccccaagtgctaggattacaggcgtgagccaccattcccaaccctgttctgcctatttacttcttcaagctccatgacagccattctgagttgtcatgttgtrtccattttttttttcactgtagaagaccagcatatgccaccccaaagtaagccattttggcataaggattattttgagctgaagatatttgcgatttaccagatggcagaaagaagcctttcttggagcttcccttaactgactaaaagcagaaacttctgagaaatgtggaccaccataaatcccgtctcccagggaagttttatggccatgaagaagatgggaagtgagtgctgagatggatttaaataaaccttactctattacttatatttatataccttcccacagttcaccatccttgggagcttaaacctctttcctttgtctggtcatgtttctacaaagtcatagcttttgttaagataatatatt

SEQ ID NO: 687331 - DNA, 1315 bp, Homo sapiens
taccctgttttaccctgtaggctgtttttcccaaatcctatgtgaaatgcagtcacctagtcagttgaaatcagttcctgacaaacccgagccacctacagatgaacctgagtgaactttctgtattaccatgttaaggttttcaccccaggaggagctatagcttcattaccgtaacatgtgacctgtgtgctggcacaatgactcactgcatctatacaactgggacccctccactacatgctgtgatgaatgcttttccctctccattgtccattaaaccctcctgtcacttttgcttggagagacactgctttggagaatactcccagtgctctccttacttgtgccaagcaataagagtccttttgttcaaaacctgcaattcttgtggagtgttattgttastcagcaggccaacaaacaccagtttttcaggtaatcatatcaataaaatatgctagaattcagtttaaattattaggaaagtaagattacaaaaggtataggtttggtaatttgccgttggcaataaagacatatttgaggtgttacacattttgatagtggtatttttaaaaatatttatttatttacttatttttagagaggaggtcttgctctgtcacccagactagagtgcaatgaagcaatcactgcagacttgaactgctgggctcaagcaatcctcccacctctgattcatgagtagctaggactacaggcatatgccagcacatctagcttttagcgtaatttttaaagtaaaatcatatatatttaattctgactcaccatttttaagatgtttgtgttagtccattttcatactgctgaaaaagacatacccatgactgggaagaaaaagaggtttaattgtacttacagtcccacatggctggagaggcctcagaatcatggagggaagtgaaagacacttcttacatggtggcagcaagagaaactgaggaagatgcaaaagcacaaacccctaataaaaccaccagatcagctgggtgcagtggctgacgcctgtaatcccagcaatttgggaggccaaggcgggcggacataaggtcaggagtttgagaccagcctgaccaacatggtgaaactccgtcgctaataaaaaatacagaaattagccaggtgtggtggcatgtgcctgtaatcccagctactcaggaggctaaggcaggagaatgacttgaacctgggaggcagaggttgcagtgagcctagatcgcgccacggcactccggcctggcaacagagccagactccgtctcaaaaaaaaaaaaaaaacaacaaaaaa

SEQ ID NO: 687332 - DNA, 1315 bp, Homo sapiens
taccctgttttaccctgtaggctgtttttcccaaatcctatgtgaaatgcagtcacctagtcagttgaaatcagttcctgacaaacccgagccacctacagatgaacctgagtgaactttctgtattaccatgttaaggttttcaccccaggaggagctatagcttcattaccgtaacatgtgacctgtgtgctggcacaatgactcactgcatctatacaactgggacccctccactacatgctgtgatgaatgcttttccctctccattgtccattaaaccctcctgtcacttttgcttggagagacactgctttggagaatactcccagtgctctccttacttgtgccaagcaataagagtccttttgttcaaaacctgcaattcttgtggagtgttattgttagtcagcaggccaacaaacaccagtttttcaggtaatcatatcaataaaatatgctagaattcagtttaaattattaggaaagtaagattacaaaaggtataggtttggtaatttgccgttggcaataaagacatatttgaggtgttacacattttgatagtggtatttttaaaaatatttatttatttacttatttttagagaggaggtcttgctctgtcacccagactagagtgcaatgaagcaatcactgcagacttgaactgctgggctcaagcaatcctcccacctctgattcatgagtagctaggactacaggcatatgccagcacatctagcttttagcgtaatttttaaagtaaaatcatatatatttaattctgactcaccatttttaagatgtttgtgttagtccattttcatactgctgaaaaagacatacccatgactgggaagaaaaagaggtttaattgtacttacagtcccacatggctggagaggcctcagaatcatggagggaagtgaaagacacttcttacatggtggcagcaagagaaactgaggaagatgcaaaagcacaaacccctaataaaaccaccagatcagctgggtgcagtggctgacgcctgtaatcccagcaatttgggaggccaaggcrggcggacataaggtcaggagtttgagaccagcctgaccaacatggtgaaactccgtcgctaataaaaaatacagaaattagccaggtgtggtggcatgtgcctgtaatcccagctactcaggaggctaaggcaggagaatgacttgaacctgggaggcagaggttgcagtgagcctagatcgcgccacggcactccggcctggcaacagagccagactccgtctcaaaaaaaaaaaaaaaacaacaaaaaa

SEQ ID NO: 687333 - DNA, 1315 bp, Homo sapiens
taccctgttttaccctgtaggctgtttttcccaaatcctatgtgaaatgcagtcacctagtcagttgaaatcagttcctgacaaacccgagccacctacagatgaacctgagtgaactttctgtattaccatgttaaggttttcaccccaggaggagctatagcttcattaccgtaacatgtgacctgtgtgctggcacaatgactcactgcatctatacaactgggacccctccactacatgctgtgatgaatgcttttccctctccattgtccattaaaccctcctgtcacttttgcttggagagacactgctttggagaatactcccagtgctctccttacttgtgccaagcaataagagtccttttgttcaaaacctgcaattcttgtggagtgttattgttagtcagcaggccaacaaacaccagtttttcaggtaatcatatcaataaaatatgctagaattcagtttaaattattaggaaagtaagattacaaaaggtataggtttggtaatttgccgttggcaataaagacatatttgaggtgttacacattttgatagtggtatttttaaaaatatttatttatttacttatttttagagaggaggtcttgctctgtcacccagactagagtgcaatgaagcaatcactgcagacttgaactgctgggctcaagcaatcctcccacctctgattcatgagtagctaggactacaggcatatgccagcacatctagcttttagcgtaatttttaaagtaaaatcatatatatttaattctgactcaccatttttaagatgtttgtgttagtccattttcatactgctgaaaaagacatacccatgactgggaagaaaaagaggtttaattgtacttacagtcccacatggctggagaggcctcagaatcatggagggaagtgaaagacacttcttacatggtggcagcaagagaaactgaggaagatgcaaaagcacaaacccctaataaaaccaccagatcagctgggtgcagtggctgacgcctgtaatcccagcaatttgggaggccaaggcgggcggacataaggtcaggagtttgagaccagcctgaccaacatggtgaaactccgtcgctaataaaaaatacagaaattagccaggtgtggtggcatgtgcctgtaatcccagctactcaggaggctaaggcaggagaatgacttgaacctgggaggcagaggttgcagtgagcctagatcgcgccacrgcactccggcctggcaacagagccagactccgtctcaaaaaaaaaaaaaaaacaacaaaaaa

SEQ ID NO: 687334 - DNA, 1315 bp, Homo sapiens
taccctgttttaccctgtaggctgtttttcccaaatcctatgtgaaatgcagtcacctagtcagttgaaatcagttcctgacaaacccgagccacctacagatgaacctgagtgaactttctgtattaccatgttaaggttttcaccccaggaggagctatagcttcattaccgtaacatgtgacctgtgtgctggcacaatgactcactgcatctatacaactgggacccctccactacatgctgtgatgaatgcttttccctctccattgtccattaaaccctcctgtcacttttgcttggagagacactgctttggagaatactcccagtgctctccttacttgtgccaagcaataagagtccttttgttcaaaacctgcaattcttgtggagtgttattgttagtcagcaggccaacaaacaccagtttttcaggtaatcatatcaataaaatatgctagaattcagtttaaattattaggaaagtaagattacaaaaggtataggtttggtaatttgccgttggcaataaagacatatttgaggtgttacacattttgatagtggtatttttaaaaatatttatttatttacttatttttagagaggaggtcttgctctgtcacccagactagagtgcaatgaagcaatcactgcagacttgaactgctgggctcaagcaatcctcccacctctgattcatgagtagctaggactacaggcatatgccagcacatctagcttttagcgtaatttttaaagtaaaatcatatatatttaattctgactcaccatttttaagatgtttgtgttagtccattttcatactgctgaaaaagacatacccatgactgggaagaaaaagaggtttaattgtacttacagtcccacatggctggagaggcctcagaatcatggagggaagtgaaagacacttcttacatggtggcagcaagagaaactgaggaagatgcaaaagcacaaacccctaataaaaccaccagatcagctgggtgcagtggctgacgcctgtaatcccagcaatttgggaggccaaggcgggcggacataaggtcaggagtttgagaccagcctgaccaacatggtgaaactccgtcgctaataaaaaatacagaaattagccaggtgtggtggcatgtgcctgtaatcccagctactcaggaggctaaggcaggagaatgacttgaacctgggaggcagaggttgcagtgagcctagatcgcgccacggcactccggcctggcaacagagccagactccgtctcaaaaaaaaaaaaaaaacaacaamaaa

SEQ ID NO: 687335 - DNA, 1978 bp, Homo sapiens
  misc_feature 613, 614, 615, 616, 617, 618, 619, 620, 621, 622, 623, 624,625, 626, 627, 628, 629, 630, 631, 632, 633, 634, 635, 636,637, 638, 639, 640, 641, 642, 643, 644, 645, 646, 647, 648,649, 650, 651, 652, 653, 654, 655, 656, 657, 658, 659: n = A,T,C or G
  misc_feature 660, 661, 662, 663, 664, 665, 666, 667, 668, 669, 670, 671,672, 673, 674, 675, 676, 677, 678, 679, 680, 681, 682, 683,684, 685, 686, 687, 688, 689, 690, 691, 692, 693, 694, 695,696, 697, 698, 699, 700, 701, 702, 703, 704, 705, 706: n = A,T,C or G
  misc_feature 707, 708, 709, 710, 711, 712: n = A,T,C or G
attctgcagttgaaaaaatataatacccctatatactgctacagagcaaatgtcagggtagatagttgagagaaaaagaaaatttaaaaaattacgtgtagtatgctactatttcccaaagaaataggagtatataaataaatgcatatattttcccatattaaaattagaagaaatttttttttttttgagatggggtcttgctctgtcacccaggctagagtgcaatggtgtgatctcggctaactgtaacctccaccttccaggttcaatcgattatcctgcctcagcctcctgagtagctggaactacaggtgcggaccaccatggctggctaatttttgtacttttagtagagacagggtttcaccatgttggccaggctggtcttgaactcctgacctcaagtgatccacccaccttggcctcccaaagtgctgggattacaggcttgagccaccatgcccggccaataatttttaaaacataaaaaaagtacaatttactgtgagggagagaagaaacaaggtgcaggagacaaggttaaaatctacctgcctggaagtctctggttttcaccatgacacgtgtatacctatgtaacaaacctgcnnnnnnnnnnnnnnnnnnnnnnnnnnnnnnnnnnnnnnnnnnnnnnnnnnnnnnnnnnnnnnnnnnnnnnnnnnnnnnnnnnnnnnnnnnnnnnnnnnnnatatatatatatatatatatatatttatttttttttttttttttttttttttgagacagagtctcactctgtcgcccaggctggagtgcagtggcatgatcttggctcactgcaaccccccacctttttggttcaagcaattcccctgcctcagcctcccacgtagctgggattacaggcgcatgccaccatgaccagctaatttttttgtatttctagtagagacagggtttcaccatgttggccagactagtctcgaactcctgaccccaggcaatcctcctgcctcggcctcccaaagtgctaggattacaggcgtgagccaccatacccggcctaatattatattcttaagattcactcacactgttgtcattgtttattaattttgactgctacataatattctactttgtgaatgtgccacattttgttcatcttgtttcctcttatggatgctggattgcttccaggtttttgctattataaacagtgttgttacgaacattcttgtatgtgtctcctctggtgtatatataagtattcctctggggatgtgtcctgtggtttaattggtggtcacagtgtatgtgaatagtcaactgtatgtttgttttacatttaacagttttctgttttttgcagtttttccaaagtattcgacataccatatttcattaattcttttttttttttttttttgagacagagtctcacactgttgcctgggctgtatgatcatggctcactgcaacctctgcttgccgggttcaagtgattctcctgcctcagcctcctgagtagctgggattacaggcacccgccaacacgcccagctaattttttgtatttttagtatagatgggttttcaccatgttggccaggctggtctcgaactcctgacctcatgattcacccgcctcggcctctcaaagtgctgggattacaggtgtgaaccaccgtgcctggcctcatatttcattaattctaacatgcactttttacccacattttaagttctctgtaataggaatattcttgaaatcaatgacatctcatggtttaattgttggtaatttttctgagtgatacataaaatygttggttgcctcaaaactgacaatgtcttagatttgataaatatctctttccacacatgcatttcatttaccccctacttcatcagtttacaaagtattacattctataattaatgtaagtacaactggcataatcaagtgtggggaagaagacagctggccctt

SEQ ID NO: 687336 - DNA, 2680 bp, Homo sapiens
tgtcggatagtattttagggtttcctcaatctattgagatggttttatgatttttaatgtattaatatggtgaaatatgtgctttacacacaagtggtgtgtcatttggttatctcatttggttgtctttttataaggtgtgattcattttgctaatattttatttaatgttcttgaatctgtattaatgagcaagcagtatgttaactgtcctctttccaactgccagtgtttggatttggtataaaggtcatgctaaccttaaaaagtgagctgacaaagactcctcccatccatgtcttggatcattggtaaaagattgagacaatttgtacctgaaaagcttggtaggacttatggccaaaattatctcagtatatatttttttcttcagaagatttataacttgcttcaattttgctatgctttatttcttctagtggcagttttaatgttatatttttatgacttttgaaatgttttttaaatttttgctatctgcttgttgatagctctgtcatattattcaattcagattatttatgttctctttatatttaaaatattatttgttytatttttatttttcttgataaatcttgctgactgttaaataaaacctaaaccaggctctgtggcttatgcctataatcccaacattttgagaagtcaaggcaggaggattgcttgaggccatgagtttgagaccagcctgggcaacataatgagacccccatgtctacaaaaagtgaaaaaaataaaactaactgggcatgatggcgtgggcctgttgtcctagctacttgagaagctgaggtgggaggatcccttgagcccaagagttcaaggttgcaaaaagttatgattgtgccactgcactccagccttggcaacatcatgagaccctgtctcaaaaaaatgaaaataaaacagatttttccatcttttgcttctttaatggtctggcacatctctaaatgttgatatgtagtgtacttattatataattctaggaattttgtttctattatagtttattatttaaaccataagtttttagttttttaaaatttcaaaatatgcagggtttctaagtttagatattttattttagcttcaatttagttatgtcgaacaaacatgaagtctgtaatgcatatgctgtggattttattgctgtttgctttatcagatagtgcctgatcaaatttctaatattccttgtgtgcttgaaaataatgtacattctctaaatattgaatgtaagctcaattaagttgtttttattttcaatattcttgcttattttttgtctgctttacatatttataattaagagaagcattttgaagttaataatatatggatgatttttcaaatctccctagaattctatcaatatttgccttccacgtttcgagaccattacactaggtgtagacatatttaaaattcttatgtcatcttgacacgaacacttcatcactgcatagtgactctcttgatgcctaataatttttattactttaagtccatttttcagcataagctttctttcagttagaattttcctgaaatatctttttacattctttgtgtagaaaatgtctaatccagaaagcaaaaactttcctaggcacttctgaggaaggaattttaatacagagaactggctacaaatatgatagaggacatagagtagcaaaaggagaaaagcacgttaatcccgatgttaaaactgcatgagattatttcagtcatgaagctggagaagcaaatgcacatggagcttcccgagcccacagtggctgtgcactggtaccactgctgtgggaaccacgtgagcaggaagcaggtgcctgaactccctggctgccccctgcacccactgccgagggacgttgcttgtgtgatttcctttttgtatggttttattgcatccctatgtgtgccatgaagttatattttgtatttacattttttaaacgttataaaagttgtatgatgctatatataatctcctgggcttatttttacatttaactggatatagctgagctttattcatattgtatgtagcatggctgtctagtttgtttacattttttatgtaaacataccagagttgattcctgcactctcctgttgataagcatttgtgttgtttttataatttctgtaaatagtactgctatgaattttcttgtgtgaaagttttgcttaaagataaacaaagagtgaaattgtgtgtaagaagttatatgaatatttaactctgtaagttaatgagggactgtttttcaaagtgggttcatgcacttacatggccatcaatgcagaagagattctggagaacaataccctatccagactttctaataatttagcatggaataaagttaaaataatacttcattgtatgcatgattttttgtcttgatcattaataatgttgaacatctactggtatatattgaacatatagaagatttcaaaaacacagataattgacctaaaagacttattacacccccaaattggagaatttatattcctttcaataatgtaagaataactttaaaaaatgacaatgtgccagaccactaaattgattcctggccaggcatggtggctcatgtctgtaatcttagcactttgggaggccaaggcaggaggatcc

SEQ ID NO: 687337 - DNA, 2680 bp, Homo sapiens
tgtcggatagtattttagggtttcctcaatctattgagatggttttatgatttttaatgtattaatatggtgaaatatgtgctttacacacaagtggtgtgtcatttggttatctcatttggttgtctttttataaggtgtgattcattttgctaatattttatttaatgttcttgaatctgtattaatgagcaagcagtatgttaactgtcctctttccaactgccagtgtttggatttggtataaaggtcatgctaaccttaaaaagtgagctgacaaagactcctcccatccatgtcttggatcattggtaaaagattgagacaatttgtacctgaaaagcttggtaggacttatggccaaaattatctcagtatatatttttttcttcagaagatttataacttgcttcaattttgctatgctttatttcttctagtggcagttttaatgttatatttttatgacttttgaaatgttttttaaatttttgctatctgcttgttgatagctctgtcatattattcaattcagattatttatgttctctttatatttaaaatattatttgttttatttttatttttcttgataaatcttgctgactgttaaataaaacctaaaccaggctctgtggcttatgcctataatcccaacattttgagaagtcaaggcaggaggattgcttgaggccatgagtttgagaccagcctgggcaacataatgagacccccatgtctacaaaaagtgaaaaaaataaaactaactgggcatgatggygtgggcctgttgtcctagctacttgagaagctgaggtgggaggatcccttgagcccaagagttcaaggttgcaaaaagttatgattgtgccactgcactccagccttggcaacatcatgagaccctgtctcaaaaaaatgaaaataaaacagatttttccatcttttgcttctttaatggtctggcacatctctaaatgttgatatgtagtgtacttattatataattctaggaattttgtttctattatagtttattatttaaaccataagtttttagttttttaaaatttcaaaatatgcagggtttctaagtttagatattttattttagcttcaatttagttatgtcgaacaaacatgaagtctgtaatgcatatgctgtggattttattgctgtttgctttatcagatagtgcctgatcaaatttctaatattccttgtgtgcttgaaaataatgtacattctctaaatattgaatgtaagctcaattaagttgtttttattttcaatattcttgcttattttttgtctgctttacatatttataattaagagaagcattttgaagttaataatatatggatgatttttcaaatctccctagaattctatcaatatttgccttccacgtttcgagaccattacactaggtgtagacatatttaaaattcttatgtcatcttgacacgaacacttcatcactgcatagtgactctcttgatgcctaataatttttattactttaagtccatttttcagcataagctttctttcagttagaattttcctgaaatatctttttacattctttgtgtagaaaatgtctaatccagaaagcaaaaactttcctaggcacttctgaggaaggaattttaatacagagaactggctacaaatatgatagaggacatagagtagcaaaaggagaaaagcacgttaatcccgatgttaaaactgcatgagattatttcagtcatgaagctggagaagcaaatgcacatggagcttcccgagcccacagtggctgtgcactggtaccactgctgtgggaaccacgtgagcaggaagcaggtgcctgaactccctggctgccccctgcacccactgccgagggacgttgcttgtgtgatttcctttttgtatggttttattgcatccctatgtgtgccatgaagttatattttgtatttacattttttaaacgttataaaagttgtatgatgctatatataatctcctgggcttatttttacatttaactggatatagctgagctttattcatattgtatgtagcatggctgtctagtttgtttacattttttatgtaaacataccagagttgattcctgcactctcctgttgataagcatttgtgttgtttttataatttctgtaaatagtactgctatgaattttcttgtgtgaaagttttgcttaaagataaacaaagagtgaaattgtgtgtaagaagttatatgaatatttaactctgtaagttaatgagggactgtttttcaaagtgggttcatgcacttacatggccatcaatgcagaagagattctggagaacaataccctatccagactttctaataatttagcatggaataaagttaaaataatacttcattgtatgcatgattttttgtcttgatcattaataatgttgaacatctactggtatatattgaacatatagaagatttcaaaaacacagataattgacctaaaagacttattacacccccaaattggagaatttatattcctttcaataatgtaagaataactttaaaaaatgacaatgtgccagaccactaaattgattcctggccaggcatggtggctcatgtctgtaatcttagcactttgggaggccaaggcaggaggatcc

SEQ ID NO: 687338 - DNA, 1448 bp, Homo sapiens
tgcctaatgttaaatgatgagttaatgggtgcagcacaccaacatggcacatgtatacatatgtaacaaacctgcacatcgtgcacatgtaccctaaaacttaaagtataataaaaaacaacaaaaaaatccagtaattaaataaagctagccaacaaatcttttcatagttaattttctatgatgccttgtaggttaaaacatgtagcatataatgtctttccccctaaaaatgttcaaagtttttgaatgaattggtcatcatgatgtgtattctttatttgtgtactttcaaacctgccctctcagatgggcaagtagatatctgacaagttgcagtgttaactggtggccaatattttctaaaatagcaaggcaggccatgactactccgtttaacttctatctgggttatcctttaattaacaagcaaatgattcagaaccaatgctacatagccatttgcgaaaacaatagcacttaactttcttatttgaggacatacataaagctaaccagaaaaaaaatcctcaaggtagctttctaaaggggaagaacgtgcaacaatccaagaaaaaataagtttatttaaactaacattaataacttatcgagtgttatttagggagcaatttgtgttttgtgagataaagaaaaacgaagatataagaagctgaagatgggaggaaaaaaattcatataacaatctgaataaagcaccctctgtataatagtacaaggtcctggtttttgaagtatttaaatgtgttaatcaattattgataaagatctgatatatttgtttccaaaaggactcccagtgcatagctaccatatttactttgataatgtattgatatgtatttctgggtagaaacgtaaatgattagctaagctaaatcttacagatagctcgctaaattcctcttgtaaaaatctggggaatgttaacagtgtgcctggtaataaaatgctaggtttayttaagacccttatacaattttacaaatcattacttaaaggcatttacagttatcctaatgcacctttgtttggattttattgttttatggtttccaaattctcatttggaatagttataaaaaggtgttccagaatgtttcattgcctaatccatgtgagcattgacccgaactgtgaaattcattttcttttcacttttcttttgtaaatatcacagatatctacatattaacacatttttgcactactttggtgctaattttaggaatacaaagtttgtattggcactgctggtacagtaattgttaaattttacaagttggggttggcttaaatgcaaaaatatgttaataaaaattattttcatttttgagtaccttctttatggaatagtctctgtataggggctgattaattttggtaccaggagaaaccttaaatctagaataaatatctgagattta

SEQ ID NO: 687339 - DNA, 1448 bp, Homo sapiens
tgcctaatgttaaatgatgagttaatgggtgcagcacaccaacatggcacatgtatacatatgtaacaaacctgcacatcgtgcacatgtaccctaaaacttaaagtataataaaaaacaacaaaaaaatccagtaattaaataaagctagccaacaaatcttttcatagttaattttctatgatgccttgtaggttaaaacatgtagcatataatgtctttccccctaaaaatgttcaaagtttttgaatgaattggtcatcatgatgtgtattctttatttgtgtactttcaaacctgccctctcagatgggcaagtagatatctgacaagttgcagtgttaactggtggccaatattttctaaaatagcaaggcaggccatgactactccgtttaacttctatctgggttatcctttaattaacaagcaaatgattcagaaccaatgctacatagccatttgcgaaaacaatagcacttaactttcttatttgaggacatacataaagctaaccagaaaaaaaatcctcaaggtagctttctaaaggggaagaacgtgcaacaatccaagaaaaaataagtttatttaaactaacattaataacttatcgagtgttatttagggagcaatttgtgttttgtgagataaagaaaaacgaagatataagaagctgaagatgggaggaaaaaaattcatataacaatctgaataaagcaccctctgtataatagtacaaggtcctggtttttgaagtatttaaatgtgttaatcaattattgataaagatctgatatatttgtttccaaaaggactcccagtgcatagctaccatatttactttgataatgtattgatatgtatttctgggtagaaacgtaaatgattagctaagctaaatcttacagatagctcgctaaattcctcttgtaaaaatctggggaatgttaacagtgtgcctggtaataaaatgctaggtttatttaagaccctyatacaattttacaaatcattacttaaaggcatttacagttatcctaatgcacctttgtttggattttattgttttatggtttccaaattctcatttggaatagttataaaaaggtgttccagaatgtttcattgcctaatccatgtgagcattgacccgaactgtgaaattcattttcttttcacttttcttttgtaaatatcacagatatctacatattaacacatttttgcactactttggtgctaattttaggaatacaaagtttgtattggcactgctggtacagtaattgttaaattttacaagttggggttggcttaaatgcaaaaatatgttaataaaaattattttcatttttgagtaccttctttatggaatagtctctgtataggggctgattaattttggtaccaggagaaaccttaaatctagaataaatatctgagattta

SEQ ID NO: 687340 - DNA, 1644 bp, Homo sapiens
ctggaattagcctgttctgctgatttattcatttccacagcgattctttgataaattcatgtgtttaatttttttctggccccagctgttggatacagtcaggaaataggcaagaaatgccagctccggaagcagagggagaataagatagttattctctagtgccacccaggaatatgccactgaagtgttaatgacagactcttccctctacaggagagttgtgctaaactttgatgttttgtggtcttctggggattctggaagtaagggacctgaggtgacttaacaacaactgctgtatgacaggatcaggataagtgagttgtgaatgcttagcagagtctgattaagttcagagtgaagctggagcaggagagaatccagctctgacctgccgtttacacttttttttatcgttcaggaacttcatcttggctgccagttttcagaaatagaaattgtaaatatatttccatttttttgtctttgactgcttaaagtgcttttgtttgtttgttttacctcacaggagtttttattctatgtgggtcaagtttaccaatcttttcattaatgatctctggatattggcttataaggaggaggacttttcttttttgagatggagtctcgctctgtcacccaggctggagtgcagtggtgcgatctctgctcactgcaacctccgcctcccgggttcaagtgattytcctgcctcagccttctgagtagctgggattacaggcacgcaccaccacacctggctaatttttgtatttttggtagagacggggtttcaccatgttggtcaggctggtctcaaactcctgacctcatgatccacccaccttggcctcccaaagttctgggattacagccgtgagcgaccgcgcccggccaggaggagggcctttctattctgaggttataaaggactcacctcatgttttcctctggtacttttatggttttatttataacatgtaaaactggtttatttggaatatatcctagtttatagagtaaggtagaaatctaatttaccatctttccagatggttatccagttctcaccatgcatttgaagagttcacttttttttttttttttaactcatttgctacctttatcatatgctaaatttatgtgtctatttctgggccttctgttctgtaccattatcatgagtactacacactttaagtattaaggctttataataagtaagttctttaggacaagtgcccttcttcctcagtttccccaggtagtcctgcatgtttagtcttctaggtgaacattaaaatcttctaaaaagtttctattttcatgagaatagtgttgaatttacaaattaatttggagattactggctgaatactaccctgagaagctgtaaagtggcttaatctgggaagcaagccctagattgaaatttcatcttggctgttttaacaggtgcctgacctcggaaaatttatttgcttctcagtttttatatatatgagaggaggactttaacgtctgccctgtaggattaaatgagataaaaagcataaaatgccttcttgggagtaagcaatcctttcttcacatggtccattctagtcaactcacaaatccctgagagggaagcctcca

SEQ ID NO: 687341 - DNA, 1644 bp, Homo sapiens
ctggaattagcctgttctgctgatttattcatttccacagcgattctttgataaattcatgtgtttaatttttttctggccccagctgttggatacagtcaggaaataggcaagaaatgccagctccggaagcagagggagaataagatagttattctctagtgccacccaggaatatgccactgaagtgttaatgacagactcttccctctacaggagagttgtgctaaactttgatgttttgtggtcttctggggattctggaagtaagggacctgaggtgacttaacaacaactgctgtatgacaggatcaggataagtgagttgtgaatgcttagcagagtctgattaagttcagagtgaagctggagcaggagagaatccagctctgacctgccgtttacacttttttttatcgttcaggaacttcatcttggctgccagttttcagaaatagaaattgtaaatatatttccatttttttgtctttgactgcttaaagtgcttttgtttgtttgttttacctcacaggagtttttattctatgtgggtcaagtttaccaatcttttcattaatgatctctggatattggcttataaggaggaggacttttcttttttgagatggagtctcgctctgtcacccaggctggagtgcagtggtgcgatctctgctcactgcaacctccgcctcccgggttcaagtgattctcctgcctcagccttytgagtagctgggattacaggcacgcaccaccacacctggctaatttttgtatttttggtagagacggggtttcaccatgttggtcaggctggtctcaaactcctgacctcatgatccacccaccttggcctcccaaagttctgggattacagccgtgagcgaccgcgcccggccaggaggagggcctttctattctgaggttataaaggactcacctcatgttttcctctggtacttttatggttttatttataacatgtaaaactggtttatttggaatatatcctagtttatagagtaaggtagaaatctaatttaccatctttccagatggttatccagttctcaccatgcatttgaagagttcacttttttttttttttttaactcatttgctacctttatcatatgctaaatttatgtgtctatttctgggccttctgttctgtaccattatcatgagtactacacactttaagtattaaggctttataataagtaagttctttaggacaagtgcccttcttcctcagtttccccaggtagtcctgcatgtttagtcttctaggtgaacattaaaatcttctaaaaagtttctattttcatgagaatagtgttgaatttacaaattaatttggagattactggctgaatactaccctgagaagctgtaaagtggcttaatctgggaagcaagccctagattgaaatttcatcttggctgttttaacaggtgcctgacctcggaaaatttatttgcttctcagtttttatatatatgagaggaggactttaacgtctgccctgtaggattaaatgagataaaaagcataaaatgccttcttgggagtaagcaatcctttcttcacatggtccattctagtcaactcacaaatccctgagagggaagcctcca

SEQ ID NO: 687342 - DNA, 580 bp, Homo sapiens
gggtggatgttttgtaaatcaacagttttgattttgtgggccttaaagtgtttaattctcccattgctatgattcagctgcaaccttggctttaatgcttttgaaataaatgaaaaatgtcattttatcttattatttatcttaagggaatagttacaacttctgcctcctagctggtgcacgttcctaccttaattgttgactgtgggggtcagttccatctgggcwgagctgtgtgtctacgtgcccttggatttttcatgtgaactagcacgtggtaatggagattgggtggctctgcttcatgtgtttattttgcagctaaacacacctgattgcttcacatgtgcaatgataatggcggcatttaaaagaataataaaatggtaagaatcaaatgagtgcccttattgcacccaagttaaggtcaaatggatactcacgggctagttgaagatgattgaaacattagatcaaaattttagaggcagcttcctgacataagctgatcttttagtattctctcacaatcatgctactgtatagtactctatagtttagaaagcattctcatttggat

SEQ ID NO: 687343 - DNA, 492 bp, Homo sapiens
ttgaagggaatgaggcacagaaatattaagtaactggccagaagtcatgcaatgttagtacattgtagtggcaggatttgaacttaggaagtttggctccaaccaactggaaataatttcctgcttgtctttctttacctcagcaaacttttgcagagctcccaaggaatgcatggtgatatattttacaatggttagcccagttccatccctgatctcgaagagcacataattctaaagtaaattctaaagtaaaaaggctttctaaactcaccttaaacatagataacatgtttctttggaaacatacttagcaatttatagatcttagtataaagaaaaatgatgttattaacacatttrtaaatattcagataattatttttactcttcccttaagcattttgcataatttaaaacaagattttatttattccaaaatatgtaaggcagcttgtatcaaaataaatagtttgaaatttaaatttggag

SEQ ID NO: 687344 - DNA, 1874 bp, Homo sapiens
tctctcataagataagacagatgagtgtgaggacaatcttttcaaagtagttttccattcaaacagagttaataatctctctgtttccttcttagtggtatgagtgaattttaggacttggatggcctcctgagttgtgattattaaatttcctatggccagtatattaggagagagagaatacccagttctcatcatcttattataattcaaagtcctttgacagtttctgtttcaactaactaggcaatattgattatgatattttttccatatgcctccttcactcagtaatttaaatcttgatgagttctaggatcaggcttagtaagagaataaatactgtcattctgcttaaagaaaagaatagtaccagtctcttcctccttaaccctgtacctcctatggtctgtggaagcttctcttctgtccttctccataatgaagaagtttcagaaggcttgccttcttcaaacaatgcaaaaatgcctttaaaatgctgttagtatcattagatacagctttgttggagagaggtagaacaaagataattagatcaactcacatcatcagatttcaaaaatcaatctgatgaattttataaagaaattcctgttgctcagtagctgcctataaggcaaactaaatggcttattaaaacattaatgctgtgcttgcagtcaaagttatactgaacgagatgccctgatgtctcatgcattaaaattacaggatccttgtgaggtaacatcatatttaatgcttttctttcaggtgtcatctataatggattaaacacagtgaataaaatacttaatgatatttgctcttgctcatggcccatagcttattatttgcactgaaggggcactacgcctttactaacggaagtatacaagttttatattcagtgcagttataaagtgatgctgactctcctcaacactgtcccttacctcagcaccacaccacttttccagtagcagagcatcttttataaaggatcagagactgagcgcttttatgtcttgtagaggttgtccacatcaggacaaagaaagagttataaggggacaaataaataaaaaagatccaatcaatgttctctggtgcactataagcctaaatcgatctcactgtttgatgtcagccactgataaaaacggtgccatccaaccaaatccagagatttacctcactgtgtgtttgctaatggtccaytaagaaatttgaaatacttccgggatatttcgcttttgtctctgtgctcattccttcgcttacggcaggaacagcttgtccttccccagacaatcacactatcacttgtatgatagatgagagtgttgcttttcaaagttggattaaactctattgatgtactggggttacttttcttttttttcagatggggagaggctggataaagaaatacaaagatttttttggttttccttctcaaaagttccttttatgtttcaaaccctaactatagaaagaggcagtccaggtgcagtggctcacgcctgtaatcccagcacgttgggaggcagaggcgggcggatcatgaggtcaggagttcgaaaccagcctggccaatatggtgaaaccccgtctctactaaaaatacaaaaattagctgggcgtggtggtgggtgcctgtaggtctggctactcggggggctgaggcaggagaattgcttgaaccctgtaggtggaggttgcagtgagctgagattgttctgctgcactccagcctgggcaacaaagcaagagtcgatctcaaaaaaaaaaaaaaaaaaatacagatttctaacaaacttctctggtttgagtatgaagcagtgccaatcctgttaagagaataacatagt

SEQ ID NO: 687345 - DNA, 1874 bp, Homo sapiens
tctctcataagataagacagatgagtgtgaggacaatcttttcaaagtagttttccattcaaacagagttaataatctctctgtttccttcttagtggtatgagtgaattttaggacttggatggcctcctgagttgtgattattaaatttcctatggccagtatattaggagagagagaatacccagttctcatcatcttattataattcaaagtcctttgacagtttctgtttcaactaactaggcaatattgattatgatattttttccatatgcctccttcactcagtaatttaaatcttgatgagttctaggatcaggcttagtaagagaataaatactgtcattctgcttaaagaaaagaatagtaccagtctcttcctccttaaccctgtacctcctatggtctgtggaagcttctcttctgtccttctccataatgaagaagtttcagaaggcttgccttcttcaaacaatgcaaaaatgcctttaaaatgctgttagtatcattagatacagctttgttggagagaggtagaacaaagataattagatcaactcacatcatcagatttcaaaaatcaatctgatgaattttataaagaaattcctgttgctcagtagctgcctataaggcaaactaaatggcttattaaaacattaatgctgtgcttgcagtcaaagttatactgaacgagatgccctgatgtctcatgcattaaaattacaggatccttgtgaggtaacatcatatttaatgcttttctttcaggtgtcatctataatggattaaacacagtgaataaaatacttaatgatatttgctcttgctcatggcccatagcttattatttgcactgaaggggcactacgcctttactaacggaagtatacaagttttatattcagtgcagttataaagtgatgctgactctcctcaacactgtcccttacctcagcaccacaccacttttccagtagcagagcatcttttataaaggatcagagactgagcgcttttatgtcttgtagaggttgtccacatcaggacaaagaaagagttataaggggacaaataaataaaaaagatccaatcaatgttctctggtgcactataagcctaaatcgatctcactgtttgatgtcagccactgataaaaacggtgccatccaaccaaatccagagatttacctcactgtgtgtttgctaatggtccattaagaaatttgaaatacttccrggatatttcgcttttgtctctgtgctcattccttcgcttacggcaggaacagcttgtccttccccagacaatcacactatcacttgtatgatagatgagagtgttgcttttcaaagttggattaaactctattgatgtactggggttacttttcttttttttcagatggggagaggctggataaagaaatacaaagatttttttggttttccttctcaaaagttccttttatgtttcaaaccctaactatagaaagaggcagtccaggtgcagtggctcacgcctgtaatcccagcacgttgggaggcagaggcgggcggatcatgaggtcaggagttcgaaaccagcctggccaatatggtgaaaccccgtctctactaaaaatacaaaaattagctgggcgtggtggtgggtgcctgtaggtctggctactcggggggctgaggcaggagaattgcttgaaccctgtaggtggaggttgcagtgagctgagattgttctgctgcactccagcctgggcaacaaagcaagagtcgatctcaaaaaaaaaaaaaaaaaaatacagatttctaacaaacttctctggtttgagtatgaagcagtgccaatcctgttaagagaataacatagt

SEQ ID NO: 687346 - DNA, 1533 bp, Homo sapiens
ttacagtaaattccctaaatatatgaacaatatatacatgtacagaacattcttaagtttgatattacacattatagaaaactcttaatatagcaaactggtaattaccactaaggttcttacagtaaattgtagaaaagataatttacttcggcgcacacaaaatatctctaaaaacccagcttttaaatggaaggcaatttgactgatacgcacagcattttcaccattgactggtacaataaatagctttgagatttttggttatcacatttcaaatccccagcagtaattgaacaaattagaagggatttgctcttggtaaagtatttgatcttaggtaaattataatttcctttcgaacaggtagaaatctgaaatagtattttaatgttaaattatatatatatgccaattacacatttagactaagtgttacaatattcaatgttttaaaattttatacaacagttttaagagacttctaggttgagacctaattggagaaaatgttctaagtgcaagattatctctcctgacctggttcttctccatgtaaaagtgagctggagaagcctaaggcaaacttctgtgacctgtcaatttaataataaaagtttggtatctatttgagttttccataaattgccactgtatttttgtatgtgggataatggattaaaattttgttataaatactcagtaaggattaaatataaaatgttcttaaaacgtaattgtggaaaaaattaaaggaggagaataaaaatggctaatttatatattttaattgagattcatcataatataatttccctgaaatgaatttaaaagatttttaaattaactattacatgtctgaagttcaaatttaactatttgttctgcataaagacagtatagcaaagaagaaacattatttaaaattactataattagaaaactgtttaccacagtgattctgtgatttctgaagttatctttttgcatatttaagtattataaaatagcaccaaaaagtacattatagataagaatraaatatactgtataaaagtagagatactgtggcactacatcaaaacactaaaaatttccaacaaaacttatccaggagaggaaatattcaaaacagaaatgaattcatttcaaatatcaaaataacttttgtacagacaggaaaataataggccttcttctatataaatcctgttattgtttgtgatgcattttatagtatcagtttttcatttttgtgccaataactgatcatctttctgctgtgaaatattgtactcactgtattaagcaaatactgtaatagttgttgaatattttacctgactctgcacagaaatcccactagtaacttttcttattagtatactttcatcttccacttacatacccagtcatccttctccaaaatattagtagaagtattccaagaatcttttgggaaaatattctttgatcctgggtatctttactggaagaaacttacctgcattattaatgaacacaatgtaatta

SEQ ID NO: 687347 - DNA, 659 bp, Homo sapiens
ttagaaaaatacagtatctgtgatatccaaacagtataatattcatttagtaatattaacaaaaatcaatcatatccaatataaaggtatacaaatactccatcttctaaaaaaactctgaaaacaaaggacaaacatgctaagaaagtcacccacattccccatcatataagatataccatactttctttttttttaagatatactatactttttaaagtcaatggagattacataaaactaacttcaacatctcttccttagtgtttctatagaaacttgtatttgctagtgctgtcttgacaagcttcttttatctatattataaaattcattattggcctaaatayggattgagaatagtgttttccttccctttactataaggtagaaatgattatatttcaaatcgtcttttcatttctatgcagctgatgaagctatgcctttttcttaacattttcaatgcagtacaacatattaaaaaaaaactgttattctaatagttagccaaggaattcctaaaaacgttattatatatattgtcaatacatcttaatagaaatgtttccttgtgaaaatactgcattctgggataacgaaggaagctataactatgcattttttcctaagatatgtagaagaaaaataccattgaa

SEQ ID NO: 687348 - DNA, 808 bp, Homo sapiens
gttttgatacctgctgtgacgaggctgcattgtttttcttatcattttaatgttatttatttatttatttattttgagacagagtctccctctgttgcccaggctggagtgcagtggtgcgatctcggctcactgcaacctccgcctcccgggttcatgccattctcctgcctcagcctcctgagtagctgggactacaggcacctgccaccacgccctgctaattttttttttttttttgtatttttagtagaaatggggtttcactgtgttggccaggatggtcttgatctcctgacctcgttatctgcccgcctcggcctcccaaagtgctgggattacaggcrtgagccaacgtgcccggcccattttaatgttttttaatccagattggcagcatgctaaataaatagtaaatttctaagtacaatagaaaaaattgctcatgaaatgtgccagtattaacatttatttcttccattacattactttgaaaattttgtagattcaagagaatgttgaagtggtggttacttttgttttccacattgattctcttcactgagaatgttgaaataatcaatgattgtgaagtgaaatttctttttattaatgcaattaaaaatttgctcccccttgcatatgccatttgaaacaaattccacacatattacagttttacagcagtgctgaatggtggaactgctgtgatgatggaaatgttctgggcttctgctgtttcagtagccactggaaatgtggttctggattgactgagcaactgaattcttaattgtatttaatttta

SEQ ID NO: 687349 - DNA, 587 bp, Homo sapiens
tgtttccttttggccaaactatcagggtctcccttgaacagcctgtaaagacttcaaataaagaatcatgctgataattgcctaagggcaggatttttgttttgcctaggagtcagtaatttaactgttacactgagggaggcttctgggttttgaatagaatttctttcaaggttgtattaaagttgttggtagatcaatagtttttcatcttggtgactatttgtctcctctcaaaaactagggattacacagtcactaagtgatacagactctagatgtattggagttgccacatgccgatggccctattctgtttgttctgtactttgtggctcgatatatatatatrtatgtatgtatgtatgtatagtttatgcagtggatttaactctttcatctagatttttgctcaatatcagataggatttaaagctgttatgttaaacatgttaaacagaagaggcagattattttttcatgtaattcctactcttgtatttttcctggtatcaatgtagaggataacctccctgaagtctttaaggcattattgttttaaaaaagattcacgagcccagctgacc

SEQ ID NO: 687350 - DNA, 587 bp, Homo sapiens
tgtttccttttggccaaactatcagggtctcccttgaacagcctgtaaagacttcaaataaagaatcatgctgataattgcctaagggcaggatttttgttttgcctaggagtcagtaatttaactgttacactgagggaggcttctgggttttgaatagaatttctttcaaggttgtattaaagttgttggtagatcaatagtttttcatcttggtgactatttgtctcctctcaaaaactagggattacacagtcactaagtgatacagactctagatgtattggagttgccacatgccgatggccctattctgtttgttctgtactttgtggctcgatatatatatatgtatrtatgtatgtatgtatagtttatgcagtggatttaactctttcatctagatttttgctcaatatcagataggatttaaagctgttatgttaaacatgttaaacagaagaggcagattattttttcatgtaattcctactcttgtatttttcctggtatcaatgtagaggataacctccctgaagtctttaaggcattattgttttaaaaaagattcacgagcccagctgacc

SEQ ID NO: 687351 - DNA, 2705 bp, Homo sapiens
caatttccacttgattttgtactttgtgtgcataaaagtgttcataacagtctctgagaatcttttgtgtttctgtgcgatcagttgtaatgtcatctttgtcatttctgatcgttctgatttggattttctcttttttttctttgttaatctggctaacaatctaccagtcttgtttattatttctaagaaccaactcttggtttcattgatctcttatatggacttttggttctcagttttattcacttctctctctctcttttttttgtatgttattctaaaactacagatttctctccttccattctcagccatatttctagaaacagtctacatttattgtctccatttctaactttccttttgttcgttatctcatggcaatctgacttcttacccctctctctcccctggcctgtatgaaaactgtaacattgaatttgccacactgcatgggaactgcctgctttcttataggtatttacaacaagatttaatgtcttttaaggagtatttattctatttgtagtaccagtgctttaggtgtgatatctctcatctatctatctatctatctatctatctatctatctatctattttattttacttttttgaggtagtgtctctgttgcccaggctggaatgcagtggtgcaaacatggctcactacagcctcaacctcctggcctcaagcgatcctcctgcctccacttcctgagtaactttggtcacaggtatgtgccagcatgcctggctaacttttttttgtatttttgtcttatttttatttcagagttcccctcaaaaaataacctactttttattttttattttttttgtagagacacggtttccctatgttgcccaggctggtcttgaactcctggtctcaagtgatcctcctgccttggcaaaatgctgggattacaggtatgagccaccatgcttgacctcttttttttaattaaactttttattttgaggtcattgtagactcatatacaattttaagaaatgacagagatcccttgtaccctttactcagtttcctccaataataacatcttgaaaagctatagcacaatattacaaccatgatattgacactgataacagtcaaggtgcagtatcattcgccacaaagatccattaccacaaagatcccttatgttgtggattcagccacacatactttctcctgcccacccattccttaacccctgataccactaatttgttcatttctatgattttgttgttttgataatgttatataaatgaaatcacacagtatgtaaccttttgggattggatatatcgcagtttgttcaatcatttacctgttgaaggacatctgggttgtttccagatttgggttattatacaggtttttgtgaaaatcgaatttttcttatctctgggataaattccccaaagtgcaattgctgggtcacggtcagatggtagtttcatgctagggtttacgataaatacccaacagttttacaataaattttctataaataaagaagtgaacaaataatgttataccaaaatctttagaatgaagattgggcttgaataaatgtatttttaccatctgcacagacaatcctattaactacaaaaatgacattctaaatattctgaaacataatacaaagcagaaatcaataaagcttaaatgtgagggataagcttattcattactctaggagtcagggttttttagcctaaaatgtatttatagtaatagtgaagtctgattcaccagaaatgatgtacagacattacactataatatttaatctccaaatggctacactttgaaaattagatctaaaacccccacaaatgataaacataacttgataatcagtaatgtatattaaataagtaaccacatgctctttaaagatgttttcctgtttttatggtggtccattacagtgttccatttcagggtgctccatcagagttcttgccttgggttacatcatctcatcccaatgccaagcccatcttttcatttgaaactcacagccagcacttacaataagggtcttcatgtatcatagaaggaacatgtgctagacccagatggacgtgaggctgaatctgaacaatataacttactggcaagttataraatttctcttggtcttgattttctcatctattagatgaggataagtctaaacaacctaaataacttgacagggcttaaagtcacacgaaataacatatacaaagtacctggcactgaaaaagcatcaataatattcaattcccttcacctatggcattttaaattttccgaggaataaattccaatgtttatttataaatgttgcccaaatttgtagtgggttgttacagatcattcttatccaggagatttgaacgtgtaaatttaacaacccaatcatatccaaggaaatattcaaaggcagttgatgcagtttccacagggccttcttaaaattagagatagatattaaaataaagaaaaaaaactatgcctcattgaaaaagtttacattttgggatacaaaccctatcttcttattacttgttttcttatattttcttcggtatgaatatatacactccagttcaagaaaatgaagggattttttcttaatttgggctgatgtatttttatttttaataaatgctgtcagaaacaggaccaccatt

SEQ ID NO: 687352 - DNA, 2705 bp, Homo sapiens
caatttccacttgattttgtactttgtgtgcataaaagtgttcataacagtctctgagaatcttttgtgtttctgtgcgatcagttgtaatgtcatctttgtcatttctgatcgttctgatttggattttctcttttttttctttgttaatctggctaacaatctaccagtcttgtttattatttctaagaaccaactcttggtttcattgatctcttatatggacttttggttctcagttttattcacttctctctctctcttttttttgtatgttattctaaaactacagatttctctccttccattctcagccatatttctagaaacagtctacatttattgtctccatttctaactttccttttgttcgttatctcatggcaatctgacttcttacccctctctctcccctggcctgtatgaaaactgtaacattgaatttgccacactgcatgggaactgcctgctttcttataggtatttacaacaagatttaatgtcttttaaggagtatttattctatttgtagtaccagtgctttaggtgtgatatctctcatctatctatctatctatctatctatctatctatctatctattttattttacttttttgaggtagtgtctctgttgcccaggctggaatgcagtggtgcaaacatggctcactacagcctcaacctcctggcctcaagcgatcctcctgcctccacttcctgagtaactttggtcacaggtatgtgccagcatgcctggctaacttttttttgtatttttgtcttatttttatttcagagttcccctcaaaaaataacctactttttattttttattttttttgtagagacacggtttccctatgttgcccaggctggtcttgaactcctggtctcaagtgatcctcctgccttggcaaaatgctgggattacaggtatgagccaccatgcttgacctcttttttttaattaaactttttattttgaggtcattgtagactcatatacaattttaagaaatgacagagatcccttgtaccctttactcagtttcctccaataataacatcttgaaaagctatagcacaatattacaaccatgatattgacactgataacagtcaaggtgcagtatcattcgccacaaagatccattaccacaaagatcccttatgttgtggattcagccacacatactttctcctgcccacccattccttaacccctgataccactaatttgttcatttctatgattttgttgttttgataatgttatataaatgaaatcacacagtatgtaaccttttgggattggatatatcgcagtttgttcaatcatttacctgttgaaggacatctgggttgtttccagatttgggttattatacaggtttttgtgaaaatcgaatttttcttatctctgggataaattccccaaagtgcaattgctgggtcacggtcagatggtagtttcatgctagggtttacgataaatacccaacagttttacaataaattttctataaataaagaagtgaacaaataatgttataccaaaatctttagaatgaagattgggcttgaataaatgtatttttaccatctgcacagacaatcctattaactacaaaaatgacattctaaatattctgaaacataatacaaagcagaaatcaataaagcttaaatgtgagggataagcttattcattactctaggagtcagggttttttagcctaaaatgtatttatagtaatagtgaagtctgattcaccagaaatgatgtacagacattacactataatatttaatctccaaatggctacactttgaaaattagatctaaaacccccacaaatgataaacataacttgataatcagtaatgtatattaaataagtaaccacatgctctttaaagatgttttcctgtttttatggtggtccattacagtgttccatttcagggtgctccatcagagttcttgccttgggttacatcatctcatcccaatgccaagcccatcttttcatttgaaactcacagccagcacttacaataagggtcttcatgtatcatagaaggaacatgtgctagacccagatggacgtgaggctgaatctgaacaatataacttactggcaagttatagaatttctcttggtcttgattttctcatctattagatgaggataagtctaaacaacctaaataacttgacagggcttaaagtcacacraaataacatatacaaagtacctggcactgaaaaagcatcaataatattcaattcccttcacctatggcattttaaattttccgaggaataaattccaatgtttatttataaatgttgcccaaatttgtagtgggttgttacagatcattcttatccaggagatttgaacgtgtaaatttaacaacccaatcatatccaaggaaatattcaaaggcagttgatgcagtttccacagggccttcttaaaattagagatagatattaaaataaagaaaaaaaactatgcctcattgaaaaagtttacattttgggatacaaaccctatcttcttattacttgttttcttatattttcttcggtatgaatatatacactccagttcaagaaaatgaagggattttttcttaatttgggctgatgtatttttatttttaataaatgctgtcagaaacaggaccaccatt

SEQ ID NO: 687353 - DNA, 1318 bp, Homo sapiens
tgcacgttctcatgttgcaccagagagcggaaactgatatgccaacatttccccctctaaaacagttgtccatcctgagcttcttattaatgctattcttccttgcttgcttcttttcttcacctgcccagaagacaggaatatcaggagaaagttcagaagaaagttcccacccrtgttcacataacaggtgcatgcctgtgatcaaaatacttagtaggaatagaaaataagtcttcagtcctataatgagatgggaaaataattttatacttaaagttggcaccagattctttgttgtggggtgtaagggacaccttgataagtacttggaatagaatatgagacctcagggtactaggctatgctctgaatatgacaaggaaagaaaaatgtgtttgtctttctaacaacgagaggaagataaagcaggggtggggagcaggagcaggtggggccagagaactggcagaatgctgtaaggagcacaaagtgacttgccactaaaatccacaacaaactcactaaatgtttgatgtgagtgaatttcatacggaaacaaataaaggagcaaaacagtgaattgaagtgaaaatagcaaagcctctgcaaaggcaggaacagaccacaagcacaatgaaatcagcagaaatcttcaagaagcttagaaccctaaagggcagtgggattcgaggttagaggctatcctaccttgctctcaagtttgaagggtccccaggtgtctgtctggaacaagacttctaagctaccttttgctttgcaagggatctttacaagtcaatagaaggaacatgaaggagaaacttgtggcattgcttttataagcatacttttctgagtagaagtgcaccttaaatgtcattttaactttttatgtgcatgtaaatagctattatttcagttgctggaatattagtcacaacatctaatgatgtggagattgttgccttataaaactcacagctgggtagctacatggctcaaggcaaaagcctattttaaaatccattgctttaggaggagaatgtttattaaaacatatatctattaaaaatatatgatgcctcattggtcattctctgtgttgcagtgccaaccacagtttttccagcagggctgagttgatacctgaaaacttggcaaggtccacagcctcataatttaccagtccatcaaaaaataaataaatcccaataaccagaaagtaaatcaccaaaggtgcctgcacagcagcccataaactcgtgtttacacaggctccatggaggtagccattgctgtcagtaaaatatttcta

SEQ ID NO: 687354 - DNA, 625 bp, Homo sapiens
taacaagggttttataggtattttatattgcacactgttagggaagtactattattatacttatgcagatatgaagaaacaggctcagagggattaagtaatttggctaagataagaaaatattgagtagtagaacttagctttgaactctagcaattcaatccgccagccctcattgccatatcactagaacatataacctttaatctgattagagtatttaaggtattagagtaccttatattagttggtcattcaatamgtgttcattcatttatcccttaactccctaagtgacattgccaaggacatccattgtccttaagataaagtcaattttcatagtcctattatttaccttcccacttcatttctcttcattagatcatcataccattcaccccagtgactcaaagacttctcacactgctttatagctataccatcaccatcctccaggacttttctgaagctgctcagatcaccgtgataattcatagcatctaatcaaaatatgaatccctgacctatgtccttgaggaaatagttcctgaacttccaaaatcaagtgatccactaacgtaccacccagtatcctggccctcccagctcctctgtcccttaa

SEQ ID NO: 687355 - DNA, 625 bp, Homo sapiens
taacaagggttttataggtattttatattgcacactgttagggaagtactattattatacttatgcagatatgaagaaacaggctcagagggattaagtaatttggctaagataagaaaatattgagtagtagaacttagctttgaactctagcaattcaatccgccagccctcattgccatatcactagaacatataacctttaatctgattagagtatttaaggtattagagtaccttatattagttggtcattcaatacgtgttcattcatttatcccttaactccctaagtgacattgccaaggacatccattgtccttaagataaagtcaattttcatagtcctattatttaccttcccacttcatttctcttcattagatcatcataccattcaccccagtgactcaaagacttctcacactgcttyatagctataccatcaccatcctccaggacttttctgaagctgctcagatcaccgtgataattcatagcatctaatcaaaatatgaatccctgacctatgtccttgaggaaatagttcctgaacttccaaaatcaagtgatccactaacgtaccacccagtatcctggccctcccagctcctctgtcccttaa

SEQ ID NO: 687356 - DNA, 622 bp, Homo sapiens
ttttttttttagtagagaccgggtttcaccatgttggccaggctcgaactcctgaccttcagttatccrcccacctcagcttcccaaagtgctgggattacaggcatgagccactgtgcctggccaatgtcttagtgttttaaatgaagaaagaacatcagagaggggcagaattaatactaagatcatgttgggcttgtataataaagttattactaaaatttatatatagtctattggtaagaatttgttacttaaaaatgatgagggactctaaaaatgaaatctattgaaaataatgaaggattaaaaatgtttaaaaaatgaaagatacacatattctaacctaaaagttagtacaaatgccttaaattacagctttatattttggagtaaaacagtgtattgttccctgaaatggaaatgaaaagacctcagttccagaattgactttggtaaaacgaatgacttattttacaatgaactgtgatttcaggtgttttaaacttttgatatttgacaaacattccaaaatcaaattataaattatgtctttttctgacctaattaatcttttacgatatcagattccctaaagtccaaaaatgacataatttggttt

SEQ ID NO: 687357 - DNA, 622 bp, Homo sapiens
ttttttttttagtagagaccgggtttcaccatgttggccaggctcgaactcctgaccttcagttatccacccacctcagcttcccaaagtgctgggattacaggcatgagccactgtgcctggccaatgtcttagtgttttaaatgaagaaagaacatcagagaggggcagaattaatactaagatcatgttgggcttgtwtaataaagttattactaaaatttatatatagtctattggtaagaatttgttacttaaaaatgatgagggactctaaaaatgaaatctattgaaaataatgaaggattaaaaatgtttaaaaaatgaaagatacacatattctaacctaaaagttagtacaaatgccttaaattacagctttatattttggagtaaaacagtgtattgttccctgaaatggaaatgaaaagacctcagttccagaattgactttggtaaaacgaatgacttattttacaatgaactgtgatttcaggtgttttaaacttttgatatttgacaaacattccaaaatcaaattataaattatgtctttttctgacctaattaatcttttacgatatcagattccctaaagtccaaaaatgacataatttggttt

SEQ ID NO: 687358 - DNA, 608 bp, Homo sapiens
gagcattttatgctattttttccatggtttttacatatagcaaagacttttgaagcatacacatttcttttttgtatgcttttagaaaataccaattttctaatgccttactaatcctatggaaagctgtgttcatcatttactttgcaactactgttacaaacattattgtacttcaagaacaaaatagagtgttgaggtcagcctggtactaatgaagtggctgagaaataaaatgagacagaaaaaataaaactacatgsatgtaaataccatcaagggaagataaaacagacatgaagtacatttcaaaagtaagaaacattaacagaataacaagaagttgttactaaaaaaagagtgtatatgagtcaataatcattatgtcacttattgcaaaatgtttttgtttacaatgcttaaaatgtgaacttatgtacccacaatagcctcttacccagtcccagtgtgtgaatggtggtatgaatatacactgattatcaggacctaaacaaagggaagttgcagctggactgaaaagccctgctggttctcttcccacaatccagggacattccagaatcaggccatgcccctgttgatggatg

SEQ ID NO: 687359 - DNA, 896 bp, Homo sapiens
gggaggccaaaggagagaatcatagagatgacagcatgaaaagactcagtctgatgttgctgactgtgaagatggagaaagaggccataagccaagaaatgtgagtgacctatagaatatggaaaaggcaagaaacagaacctcccctggagtctccagaaataacccagccataacaacacttttatttttgcccagtgagacccattttggacttctgacctccagaaatttaagataaattcttgtttcattccactaagttcatggtaatttgttatagcaacaacaaaaaaaactaatacagtcaattccttgtttttgtttttaatcttcataggtacatgacagttgtacatatttatgggatacatgtgatattttgatcaagcatgccatgtgtaaggatcaaatcttgstaattaggattttcatcacctcaaacatttatgatcatttctttgtgctgagaacattccaaatctacttttataattatttattttgaaacatacaaaataaattattgttaagtatactcaccctatctactctgggcccaaggagatggggttccttggggtctcagaaaaaactttaagagcgggatttgatctctaagaaaaggctgtggagcccaaaaagaaacttgaggtctcttggagatgccatgtagttctatggcctactgtcctcacagtaggacagtacttttctacttaaagtagaaaaaatccttctcatctctattcacctttttaatgctttcaggaatcactttcctccttcaggaaactggcattttctgtagagaaatttttctatgcaaatacttgtctttacaggagtaaatgaagttaaaaatatggaactttaggtaactaagtaattagact

SEQ ID NO: 687360 - DNA, 896 bp, Homo sapiens
gggaggccaaaggagagaatcatagagatgacagcatgaaaagactcagtctgatgttgctgactgtgaagatggagaaagaggccataagccaagaaatgtgagtgacctatagaatatggaaaaggcaagaaacagaacctcccctggagtctccagaaataacccagccataacaacacttttatttttgcccagtgagacccattttggacttctgacctccagaaatttaagataaattcttgtttcattccactaagttcatggtaatttgttatagcaacaacaaaaaaaactaatacagtcaattccttgtttttgtttttaatcttcataggtacatgacagttgtacatatttatgggatacatgtgatattttgatcaagcatgccatgtgtaaggatcaaatcttgctaattaggattttcatcacctcaaacatttatgatcatttctttgtgctgagaacattccaaakctacttttataattatttattttgaaacatacaaaataaattattgttaagtatactcaccctatctactctgggcccaaggagatggggttccttggggtctcagaaaaaactttaagagcgggatttgatctctaagaaaaggctgtggagcccaaaaagaaacttgaggtctcttggagatgccatgtagttctatggcctactgtcctcacagtaggacagtacttttctacttaaagtagaaaaaatccttctcatctctattcacctttttaatgctttcaggaatcactttcctccttcaggaaactggcattttctgtagagaaatttttctatgcaaatacttgtctttacaggagtaaatgaagttaaaaatatggaactttaggtaactaagtaattagact

SEQ ID NO: 687361 - DNA, 603 bp, Homo sapiens
tttgccacactgcataacaatacattcctgtattcactttctcaaacaactgccaaaaaatagaagcaaaagcagaaacttctgtttgcatgtctatatctaataacacacccaatgaataaaacactgtgttccttgatcacttgattagcgcatccctcacccttaatgttggcttgtttggcttcaattcatgaaagggctgaaattttattgccactgactttccagtttggtgctattgctagggcatgggcctctgaaaacctgacacggttagataccaggtgtgcctttcatgttttactatatggtcttctaatgaggccagggtttgatatccaccccatgcttcatacatatattttgtttctctgccaatttctcataaacacaggctgaagaaaagtgtgcaagtggacataagcatagtcactcctacttttttgtaaattactttagaaaaacccgaatcattctcatacatggagacaacccagtatatctgtgccttgatagggaattgtaagcaaattgctcagaagctcagcttagttgaarctcaattagaaagcaatctgtaggtagtttttctattaaaaa

SEQ ID NO: 687362 - DNA, 901 bp, Homo sapiens
catgactaaacccaacattaggggctggagaaatatactccgattcttcagtgggaggaactgcagagacaaatgacagagtcttggatacagggaggacatggatccattaatgtaccttaatcaaccacaaccctccaaccaccaatacaattaaataagtatttgttgaatgcactagtgcctgaatccttctggctgcagcccaggcaatggggggcctgayggggagggaccatagcagggactcgatgtcctgcaggtctgcatgtaattgtgtacggccgactccacgttggtcatggctgacttgctttgtcctgcgtccccaaggggcaacgattggctgattttatttctgaacaattttgacaaagttgttttcaggagcccaggaagcaaatcagttgtagatttgaattttgtaggggctcagaattgttgaatatatatatagtcttttacatgctgataattatttccataccacaaagaaggccggctattaggaggctgctgttcaattcctttgccccgtgaactcgtgagctgtgtctttgtggggggggcactcacttgttagaggcgtttcccttcataataacgtcagccaacattctaaatagatgcaagaaattaaatagtcttccccagacaggtactttggccttctaaagtgaattacacattgtaaaataaaacacagtcacattaaaaaaacaaaaggtctttgtgtcaggttggtctggcttcagcaaagataatatttgcctccagagtagaagatccttggaatccacagtattgcatacggcagccccacatcttgtttccttttcttttctttttttttttttttgtttttaactaaaagagttgacaattttattttcacatttcc

SEQ ID NO: 687363 - DNA, 651 bp, Homo sapiens
agcagtggctcatgcctgtaatcccagcattttgagacgctgaggtgggggtatcacctgagatctggagtttgagaccggcctgggtaacaggctgtgaaaccctgtctctactaaaaacacaaaaattagctgggcatggtggcacgtccctgtgatcccagcttctctggaggctgaggcacaagaatggcttgaacctgggagatggaggttgcagtgagccaagattgtgccaccgcacttcagcctggaggacagagcgagactctgtctcccaaaaaaaaaagaaaaaaagaaaaaagaaaagcagtgagtgggctgggcatggtggctcacgcctgtaatcccaacactttgggaggctgaggcaggaggattgcttgaggccaggagttcaagaccagcctgggcaacataggagaccctgtctctacaagaaatttaaaaattagctgggtgtggtggcgcgtgcgtgtagttccagctgcttgggagactgaggtgggaggatggcttgagcctggaagattgaggctgaagtgagcgtgccactgcgctccagcagtggttgggggaagggagggagggggcgcrgtggggaaacggagcgaccgtgtctggaaaaaagaaaagagcaggaagtatgca

SEQ ID NO: 687364 - DNA, 602 bp, Homo sapiens
tgattatttstttgctttctgacacagcaagatattccaggcacatcttgttctttccctgctccagtcctaaaaacagctatttctctgaggatctctggtatcttttcgtatagaatagacctttgaaacaaagatcagggagctatggatcctcattactattgggatggttcccagaccttctcagtacgtatattacctagagttaagcaaaataagcctgctaatttcttaactgagactgggggttgtcatctcctaaggcagtggttctcaatcttggctacacattacaattatttggtcctggccacaccctacaccaattaaatcagaaaccctggggattagacttaggaatcaagagtggcttcaacatatagccaaagttgagaaccaaagccttacactcaagaagttagaccaatgggaggaccaccccatttcttccctacaactcttctggcaaaggaaattcagaggataatgaacaagctgttttctactacagacttgggatctgtccagtgaatattctactcctggccccatctctgctgtaaataatacttaagattcagtagaaccttaaccaatcc

SEQ ID NO: 687365 - DNA, 1066 bp, Homo sapiens
ttttgaggataagcctgaaatcctgaaggtgagttttgatctcatttaaagtgcagtccaaacagcagcttagtgaatcacatcaaattagcaacatgaggcaatgcaggaccaatttctacattttaatttttcctgcttctcctactgtgaaatgctattaaagaatgtgagtaaagcccaacaatgtagatcttggtgctctggccaggtaagacaaccagtcttttttttttttttttgagacagagttttgctcttgtcacccagtgtggagtgcaatggygcaatctcggctcactgcaacctctgcctccttggtttaagtaattctcctgcctcagcctcccgcgtagctgggattacaagtgcccaccactataccctgctaatttttgtatttttagtagagacgatgtttcaccatgttggccaggctggcctcgaactcctgacctcaagtgatctgtctacctcggcctcccaaagtgctgggattacaggcatgagccacggaaacctggccagagattttcttttccccctgagaaaaacagagatttttaaatagatcagatttaaagtagaagttacttcatcaccttcaggctttgcactctatttactcatctaatatatttgagattttggcaagcacctaataaggattacagatgtctattttgagcacttcacactggctgtattttctatttgagagctgttttgttgacttgagcagtgcagttgaaaggaaggaacttggttaaaggacaattagctttgtggtcttcatctttttgggcttcagttacttcactgataaaattatgattgttgtaaatcatgtggccccactaaattgtaactttccactaatacaaacacttatctcaaagaacagtgctatgtattcttgtttgtacagactcagttctttcttcattaacatttcagcatagttctggcatttaataaacatgagtgattgttttcttggcctaagcaatcacgacagtctagttgatttgtgttcacaaaatataagaaatatgcttttctacca

SEQ ID NO: 687366 - DNA, 1710 bp, Homo sapiens
ttgccaagccatccttggggatggttatgtgtccagtagtgttgaaatcatgaacagagagacttgtaaaagaaggtgaatgtgggaaagaggacagtgatcgtcactcagaaacactgggtcaatcaccacacagttggctgctaaccagagcccctggggtatcaggacagtgttgctccctcttggtccacagtgacaggacacataaactcttagggcaggatttggctctgatcgtgcttaccaactaagtaaatcagtcagatgaaactgatgagcaaaccaaacttgtattttgaggattttaaaacaaagcactcagccgcactactaagctcattatactgaaatcacactgtgagggttcattgcaggtgcctacaccatagaagagatgactgacatgatttgaccatcaggaaactttgagcagtgtttgtttttaattatatcaggaacaactctaatatatctagagtggatgtattcaagtgtgcattgttggaaaagactcaactgaacaagactcagtatcttgttgcatcctgtccatcatttaactattatagacaacagggtaacaactttcttgtagcgtgatgatggccaaaagagatagaatcaaagttattaggattcacttaataaatatttgtctgtataattttttaaatttctctacagatcttttttaccttaatgctttaaaaaatctcctatttgtttcctgacttaatgaatgtttcagagtaatctacatactaaaaatacctcataattaagtacatgcacgcatatatgtgtatatccatttatctatctatccacctgtctacctatatatctgcctatccagaatctcctatataaaatattcatatgacatattagaaagtttagaaagcagaaagagagaccgggcatggtggctcatgcctgcaatcccagcactttgagagatgggtggatcacttgagttcaggagttcgagaccagcctggccaagatggtgaaaccccgtttctactaaaaatacaaaaattagctgggagtgacggtggacacctgtaatcctagctacttgagaagctgaggtgggaaaatcgcttgaaccccagaggcggaggttgcagtgaggcgaggtggcaccactgcactccacggcagaaagagaaatgttttttctctttgttaaaatgggataccccattcttcagtttatacttcctcttttcttttcaaataaaatatttatagttattcgttcagttgatttttccaacattccatttatataagcaacttgggcattgctctctgaaagcctgggactgtagtctccaaggacagtctctaatataagagatggaagtgactaccctcactacttgatcacaataaaaacaacatattttgagtgagttttaagattaggatacatttcccatgctgatcygccccagatgagtacactcatcagacaaaggacagatgaggtagagggtgaatcctccaccccaataagcaacacagccactaaaggaaaacaaatagattaggcagggcttatttacacatgaaaatcaaatatggcatcaaagagaattatgttacacacaactaatgaaaggcacaggaatgaaacaaagcacatagtggatcacaaagtggtttagtataatgaacactgatactaagtaacccgac

SEQ ID NO: 687367 - DNA, 613 bp, Homo sapiens
ttttatttggattggcctatcttacggaccaagtgtttataccacccccactccaattcatgtattgaagccctaatgccgaatgtgaccgtatttggaggtagggcctttgggaggtgattagggttagatgaagtcaggaggattggctctgatgtgacggactagtactcttttaagaagagaccccagagagctctctctcttttcccacawgcacctctctgtgaaaatggtgagaataatatctagcttggaaagtggatagaaaggttgagtgaattgctttccatatgctgagctcagtgcttggcagttagcaggggctccacaagtaaatattagttccttcctttgactgaaatcttaccttgacaagacatgtttcaagtgcattccttctccttccatactccctccagaagaatcccaacctataagaagtaggtacagagtctgtgatacctcattcctccacccgcaccccccaaaaacgaaaacccagaactaagaaaaactcctgctggacaagtaatgaccctgaactaagagacttaggaaagtagcaggtggagataaacatttcagtggatctaacatcagagctgaggct

SEQ ID NO: 687368 - DNA, 1282 bp, Homo sapiens
cagttgactgtgggcatctacctctactttaaaaggtgagtagtatctgaaagaaattgctcaatgattctctctctcttrtgtgtgtatgtgtgtgtgtgtcagagaaaagagagagatagacataagaacacaaacacacacagaaagagaaaggaggagaaacagtatgacaatcttccttttgcaagcctaaacaatagagttgaatattgtcaattttacactgttgttgtgctttgccgggaaacacatatggttcctcccttgagggcattggactggatgctactctgcctgcaaggtccttgcctcttgtaagtggtcacttgtgcagcatgcttgagaactcacgattccagaggagagttggtagctggcttggcacagacctggaattaattgatcactcatagccgttgaaaggcttggtgaagaatcactcatcaggaatcccagcttccacagtgtcctctcctgggagctctgtacaaaaagaggtgtggtgtgggatggtggcaagagtcccagttaaggagtctggagaccctcgagcctagaggttccctctggtcactcactgtccatgagaggtcgaaaagtttctcagccctctgggcttctggccctttgtaagtacaaataggaatagccacgtggccacagccaaccccataaggtagttatgatggataaaatgcacatatttggtgaaaacattttggaatccatacgcgcctggaaaataataataaaatggtaacaacagcaacaacagcgatcctattactagttactcctggggctaacatttggctgagtgttatgacaaacttttaatcagtcagtgtctgaactttactgcttcctacaccttttgaattcccccgctttgcctcagacctcagagattatgtgttcatggacatgcagcttccggtgcggcactgtttatcttcgtctacccccatctcagggtttccctaaaatcatccagaagatttcctttctcccgatacccaggtgctggactaaaaggagctagctgggagaaaaaggaaaggaggggttgacatttttagaggcaggatggttttcaaggaagagtttttttttctccaattgcaggtgaagtaaagcaagtgaaagggtaagtggggaaatgattgaggaggggggaggggaccagtcacttttgtctacgagttaagaatatcttcctgagttttcctttctaaagacatctgtgcatcagcagaaaatgatctgttaaaaaaaaaaa

SEQ ID NO: 687369 - DNA, 1282 bp, Homo sapiens
cagttgactgtgggcatctacctctactttaaaaggtgagtagtatctgaaagaaattgctcaatgattctctctctcttatgtgtgtatgtgtgtgtgtgtcagagaaaagagagagatagacataagaacacamacacacacagaaagagaaaggaggagaaacagtatgacaatcttccttttgcaagcctaaacaatagagttgaatattgtcaattttacactgttgttgtgctttgccgggaaacacatatggttcctcccttgagggcattggactggatgctactctgcctgcaaggtccttgcctcttgtaagtggtcacttgtgcagcatgcttgagaactcacgattccagaggagagttggtagctggcttggcacagacctggaattaattgatcactcatagccgttgaaaggcttggtgaagaatcactcatcaggaatcccagcttccacagtgtcctctcctgggagctctgtacaaaaagaggtgtggtgtgggatggtggcaagagtcccagttaaggagtctggagaccctcgagcctagaggttccctctggtcactcactgtccatgagaggtcgaaaagtttctcagccctctgggcttctggccctttgtaagtacaaataggaatagccacgtggccacagccaaccccataaggtagttatgatggataaaatgcacatatttggtgaaaacattttggaatccatacgcgcctggaaaataataataaaatggtaacaacagcaacaacagcgatcctattactagttactcctggggctaacatttggctgagtgttatgacaaacttttaatcagtcagtgtctgaactttactgcttcctacaccttttgaattcccccgctttgcctcagacctcagagattatgtgttcatggacatgcagcttccggtgcggcactgtttatcttcgtctacccccatctcagggtttccctaaaatcatccagaagatttcctttctcccgatacccaggtgctggactaaaaggagctagctgggagaaaaaggaaaggaggggttgacatttttagaggcaggatggttttcaaggaagagtttttttttctccaattgcaggtgaagtaaagcaagtgaaagggtaagtggggaaatgattgaggaggggggaggggaccagtcacttttgtctacgagttaagaatatcttcctgagttttcctttctaaagacatctgtgcatcagcagaaaatgatctgttaaaaaaaaaaa

SEQ ID NO: 687370 - DNA, 1282 bp, Homo sapiens
cagttgactgtgggcatctacctctactttaaaaggtgagtagtatctgaaagaaattgctcaatgattctctctctcttatgtgtgtatgtgtgtgtgtgtcagagaaaagagagagatagacataagaacacaaacacacacagaaagagaaaggaggagaaacagtatgacaatcttccttttgcaagcctaaacaatagagttgaatattgtcaattttacactgttgttgtgctttgccgggaaacacatatggttcctcccttgagggcattggactggatgctrctctgcctgcaaggtccttgcctcttgtaagtggtcacttgtgcagcatgcttgagaactcacgattccagaggagagttggtagctggcttggcacagacctggaattaattgatcactcatagccgttgaaaggcttggtgaagaatcactcatcaggaatcccagcttccacagtgtcctctcctgggagctctgtacaaaaagaggtgtggtgtgggatggtggcaagagtcccagttaaggagtctggagaccctcgagcctagaggttccctctggtcactcactgtccatgagaggtcgaaaagtttctcagccctctgggcttctggccctttgtaagtacaaataggaatagccacgtggccacagccaaccccataaggtagttatgatggataaaatgcacatatttggtgaaaacattttggaatccatacgcgcctggaaaataataataaaatggtaacaacagcaacaacagcgatcctattactagttactcctggggctaacatttggctgagtgttatgacaaacttttaatcagtcagtgtctgaactttactgcttcctacaccttttgaattcccccgctttgcctcagacctcagagattatgtgttcatggacatgcagcttccggtgcggcactgtttatcttcgtctacccccatctcagggtttccctaaaatcatccagaagatttcctttctcccgatacccaggtgctggactaaaaggagctagctgggagaaaaaggaaaggaggggttgacatttttagaggcaggatggttttcaaggaagagtttttttttctccaattgcaggtgaagtaaagcaagtgaaagggtaagtggggaaatgattgaggaggggggaggggaccagtcacttttgtctacgagttaagaatatcttcctgagttttcctttctaaagacatctgtgcatcagcagaaaatgatctgttaaaaaaaaaaa

SEQ ID NO: 687371 - DNA, 1282 bp, Homo sapiens
cagttgactgtgggcatctacctctactttaaaaggtgagtagtatctgaaagaaattgctcaatgattctctctctcttatgtgtgtatgtgtgtgtgtgtcagagaaaagagagagatagacataagaacacaaacacacacagaaagagaaaggaggagaaacagtatgacaatcttccttttgcaagcctaaacaatagagttgaatattgtcaattttacactgttgttgtgctttgccgggaaacacatatggttcctcccttgagggcattggactggatgctactctgcctgcaaggtccttgcctcttgtaagtggtcacttgtgcascatgcttgagaactcacgattccagaggagagttggtagctggcttggcacagacctggaattaattgatcactcatagccgttgaaaggcttggtgaagaatcactcatcaggaatcccagcttccacagtgtcctctcctgggagctctgtacaaaaagaggtgtggtgtgggatggtggcaagagtcccagttaaggagtctggagaccctcgagcctagaggttccctctggtcactcactgtccatgagaggtcgaaaagtttctcagccctctgggcttctggccctttgtaagtacaaataggaatagccacgtggccacagccaaccccataaggtagttatgatggataaaatgcacatatttggtgaaaacattttggaatccatacgcgcctggaaaataataataaaatggtaacaacagcaacaacagcgatcctattactagttactcctggggctaacatttggctgagtgttatgacaaacttttaatcagtcagtgtctgaactttactgcttcctacaccttttgaattcccccgctttgcctcagacctcagagattatgtgttcatggacatgcagcttccggtgcggcactgtttatcttcgtctacccccatctcagggtttccctaaaatcatccagaagatttcctttctcccgatacccaggtgctggactaaaaggagctagctgggagaaaaaggaaaggaggggttgacatttttagaggcaggatggttttcaaggaagagtttttttttctccaattgcaggtgaagtaaagcaagtgaaagggtaagtggggaaatgattgaggaggggggaggggaccagtcacttttgtctacgagttaagaatatcttcctgagttttcctttctaaagacatctgtgcatcagcagaaaatgatctgttaaaaaaaaaaa

SEQ ID NO: 687372 - DNA, 956 bp, Homo sapiens
ccaaggaatgaaggcagcttctaggagctggaaaaagcaggagcacattctcccttggagcctccagaaggaacacagccctgctgacattttgattttagcctactgagacacattctgaacttttgacttccagaactgaagaataataatgtgttttatttcaagtcaccaagtttttggtaatttgtcacagcagcatagaaaaccaatgcactggtattgtgatatctctcaggtttttgtttgttgcaagtaacccaggcggcagtgccccatgggagagatttatgagcagtaaactgatactgcactaataccaactaccatcgtttggatgccaaagggtttgagttctartgggggaataccaggcatcagcaacaggcaatgtatattttgaggggcagcacctctaattttgaggtgaccagtgtagatgatcctgtcagtgcctcatcatatcccttaagccatgcactcctgccaccgtccagcaccaggacctcatcttcatgcctgagagatatttgtttcaggaaccataaaaagctcctctgcctaaaaggccaaaaatgccagggcatcagtgctcccgaggaacagcatcaatcttgcctgtaaataccccagctcccttgcccctcaggtgggattcttccgagcatgtaattcatacaatttccctgaatttcctggaaggataaaggccctatcccatgcccgtcccaagagctactagagtcacttactttgttaataatgcaccatgtattggctgccttgtcttcctcccaaatcacttccttacaccagtgcatttttcctgcactttccaaagaaactagttgccctcagatccttttttcagggcctacctctgggaaagtccaaatgaagggtccttaaaatctcactgcctaggctgttgctaatgctggccagtatggtgcccc

SEQ ID NO: 687373 - DNA, 644 bp, Homo sapiens
aaggtagcattttaatatcaccaccctgttttccctttgaaaactcagagcaaataaagcccatctgtcttcctgctcctatgtgaccatrcggcaggctgtctgtctgagccgagtgttaacagcgagaaagagacgtgacggaagaatgacaaagtgacttttactccggagcagtctgtttcccatggttcattggcatcagaaatgcaggtcagcaacgctgagcttcatggtcctcctgacgcttcatttggccgcttaatacttgccacaagaagcttctgattctttgctcttctggtaaaacacctccctgttctcccttggggtctgcaggatatctgtgttcaatttgggagcatttctcacactttcgcagatgaggtctgtgctaatatcaaggccctggaactgaccctcccatgggccagttaatgtcacctaccttgtggccctggatccaacaggagcagggggtctcgccagagccagtgagtctattaatgtcccatgagccagtaaatgtcacctgccttatggctctggatccaccaggatcaggggtctcaccacagcgactccctctgtgctgcactgcactttatacagtactgacatatctattattacattgacttcta

SEQ ID NO: 687374 - DNA, 644 bp, Homo sapiens
aaggtagcattttaatatcaccaccctgttttccctttgaaaactcagagcaaataaagcccatctgtcttcctgctcctatgtgaccatacggcaggctgtctgtctgagccgagtgttaacagcgagaaagagacgtgacggaagaatgacaaagtgacttttactccggagcagtctgtttcccatggttcattggcatcagaaatgcaggtcagcaacgctgagcttcatggtcctcctgacgcttcatttggccgcttaatacttgccacaagaagcttctgattctttgctcttctggtaaaacacctccctgttctcccttggggtctgcaggatatctgtgttcaatttgggagcatttctcacactttcgcagatgaggtctgtgctaatatcaaggccctggaactgaccctcccatgggccagttaatgtcacctaccttgtggccctggatccaacaggagcagggggtctcrccagagccagtgagtctattaatgtcccatgagccagtaaatgtcacctgccttatggctctggatccaccaggatcaggggtctcaccacagcgactccctctgtgctgcactgcactttatacagtactgacatatctattattacattgacttcta

SEQ ID NO: 687375 - DNA, 644 bp, Homo sapiens
aaggtagcattttaatatcaccaccctgttttccctttgaaaactcagagcaaataaagcccatctgtcttcctgctcctatgtgaccatacggcaggctgtctgtctgagccgagtgttaacagcgagaaagagacgtgacggaagaatgacaaagtgacttttactccggagcagtctgtttcccatggttcattggcatcagaaatgcaggtcagcaacgctgagcttcatggtcctcctgacgcttcatttggccgcttaatacttgccacaagaagcttctgattctttgctcttctggtaaaacacctccctgttctcccttggggtctgcaggatatctgtgttcaatttgggagcatttctcacactttcgcagatgaggtctgtgctaatatcaaggccctggaactgaccctcccatgggccagttaatgtcacctaccttgtggccctggatccaacaggagcagggggtctcgccagagccagtgagtctattamtgtcccatgagccagtaaatgtcacctgccttatggctctggatccaccaggatcaggggtctcaccacagcgactccctctgtgctgcactgcactttatacagtactgacatatctattattacattgacttcta

SEQ ID NO: 687376 - DNA, 1117 bp, Homo sapiens
gaggaggatgaatttggctatacttcttggctcccagacttccctattgcctattccagactcctctacctctttggacctgcaggccgagatcaccaacctaggctgagctggctgggatgagccaggactccccatgtggaatgcaatcaaattagctgtgccttataggacatgagaatgaaaattttacacattactgccaactcaatcctgaaacagtgctattctcctgtctcctcctcaggaaactttcctgactccccattaaccaaaggttgaagtccaaactccataattcaactttccattgatctaaatcgtataacatctttccayccattcattcattaataaacacctatcagtcacatgttatataccaggtattaggagtaaacattgaatgaaacacaatgtctactctcaagaagttcatggccatccctcaaataaatgacaatctgacccaaattattttcctggtctaacttccaccacatgtatgtgaacagtccattctgggccaacaggtgcacttgtgttatcccaatgtgttggttaaagttctggaggcaggtaaatgttggcttaaaacccatttcccttgctttctagtaagtttctaaatctttctataccttagttgccttacaagtttgaagtaagggttaaataatttagtgtggaactcatactgagtgctcttacagagccgtttttactattactgttgttgctgttgttcattctcctctctaagccttgtttgcagccagctctcaggtgaaaggcccgaacccctgctctgcccacacccttcccaggccttgcaaggccagcttgctcctccagtaaccactccctctgcttgactcgctcatgacacctgggacctggactgttgtcaggggatcacaggtgtgggattccgcttcctgcatggaatgtaaactctgggatgataagaagtcgtaaaattatgtagatcctccaatggaaaacccaggatgctatgacctatgaaatttgggacttgctgtgaaataaaccagcaaatgtgatgtttcctcgaattaccacctcatggtgtttgtctgctttggctcataaattc

SEQ ID NO: 687377 - DNA, 605 bp, Homo sapiens
tgaaaagtatcttccatcttgaaatgggagaaaagattattcccaactattagtaagaaggactcctccttagtacttgagagaggatggtaaaactctcttttgttatttctgggttcattattcatacaaatagcctcataattagccattcaataaatatttttgagtacgtctatcttgcagaaaaatcactagttgccatgacaggtacaaacattgactacttaactccatcagtgaagtcttttttccttccttctgcatttatgatactttcatagccactttcatwgtgtccatagtttccttgaagcaccctaaagttatttttatttctcacttcatagatagattattcctttcttcacatcaaggaggcttcaaaggacaggaaggggggcaacagtttgttcctccatgccagatgtaattggtaatcatctccctcaacaactacaacaacagtaaaagtctgagtaaactataacacagactccttcatcccccctaactttcttaactttcatattatttgcctttctctattaatgtttgcattccatgggcaaaaataaaatgtgaccaaagatagcaagctgata

SEQ ID NO: 687378 - DNA, 1374 bp, Homo sapiens
cgaatgatgtaaacagatattcaccatcctcacctaaaagaggcaaacagctcatygatgactttaacttgttgactggttcaaacatccgccagaaaatgttgtaagcaacatggttatagaaaagacattctgaaattaggattaggagatctagatcactgtcctggctccaactctaattgaactataactttcatctaattattcaacatttataggcattagcacttttcacccataaaatgagataaatacacagaacatctatttagttatgttcacctctaaaattctttcaatctgttgtgtgaaactaatagttttaaaattcttgatttcctaataaaaatataaaacggtaatatatgtttaatgtttttatttaattataaataatattttccagaaggaaaaatagtttgttaactcttcatccctttagtcttggcagtagctagcattttgattaaattgtaaatgaagtctatcgaagagcgaaggaaacctcaagagttgcttaacgctggtagtgtttatgtgggcccatgttcctctatattccaatgtgatttcattatatgaggtttaaaatatttatgtaaggcttctgtttaggggaacaattatcctatcttcatctttatgatttctaaatgccacattaactgcactggtattgattcagataataaaatggcaatcagtattcaatgaattggataattctcttacaaacgtgagagcctagtgtctatctgcttttatatccatgtttttacttcagctcccaggatacctttctttcacaaaccattaagtttcccagtgtatggaagcttttggattatttagcttatcataataaaaacagtctatgcagtataaacagtagaaaaggcagaaacaatttgtatgtatttctcctttttagagtaataaaatgccgtctataggatctacaaatataggaatagacattttcagccaaaaaattctcaggcataattaattttgttttttgttcccattccccaaacaataggtttatagagtatgattcttctcattgccaaaaaacaacaagaaaacaaaagaaaaaaataaagttctccatggtgaaaactgtaaatgctaagaaggcaataaacttcatggaataagaacttaaaatttatagcaactatccatttatatgaattttcacttttgaacacaacttacccatctctttaaagcagagggttgaagtttctattgcgaaccccaaatgtctgagacaagcctccatcagtttaggaagtttatgttgcccaaggtaaagatgcacgcccatgagacaatctcagaaagccctgatgacatgtgcccaga

SEQ ID NO: 687379 - DNA, 1374 bp, Homo sapiens
cgaatgatgtaaacagatattcaccatcctcacctaaaagaggcaaacagctcattgatgactttaacttgttgactggttcaaacatccgccagaaaatgttgtaagcaacatggttatagaaaagacattctgaaattaggattaggagatctagatcactgtcctggctccaactctaattgaactataactttcatctaattattcaacatttataggcattagcacttttcacccataaaatgagataaatacacagaacatctatttagttatgttcacctctaaaattctttcaatctgttgtgtsaaactaatagttttaaaattcttgatttcctaataaaaatataaaacggtaatatatgtttaatgtttttatttaattataaataatattttccagaaggaaaaatagtttgttaactcttcatccctttagtcttggcagtagctagcattttgattaaattgtaaatgaagtctatcgaagagcgaaggaaacctcaagagttgcttaacgctggtagtgtttatgtgggcccatgttcctctatattccaatgtgatttcattatatgaggtttaaaatatttatgtaaggcttctgtttaggggaacaattatcctatcttcatctttatgatttctaaatgccacattaactgcactggtattgattcagataataaaatggcaatcagtattcaatgaattggataattctcttacaaacgtgagagcctagtgtctatctgcttttatatccatgtttttacttcagctcccaggatacctttctttcacaaaccattaagtttcccagtgtatggaagcttttggattatttagcttatcataataaaaacagtctatgcagtataaacagtagaaaaggcagaaacaatttgtatgtatttctcctttttagagtaataaaatgccgtctataggatctacaaatataggaatagacattttcagccaaaaaattctcaggcataattaattttgttttttgttcccattccccaaacaataggtttatagagtatgattcttctcattgccaaaaaacaacaagaaaacaaaagaaaaaaataaagttctccatggtgaaaactgtaaatgctaagaaggcaataaacttcatggaataagaacttaaaatttatagcaactatccatttatatgaattttcacttttgaacacaacttacccatctctttaaagcagagggttgaagtttctattgcgaaccccaaatgtctgagacaagcctccatcagtttaggaagtttatgttgcccaaggtaaagatgcacgcccatgagacaatctcagaaagccctgatgacatgtgcccaga

SEQ ID NO: 687380 - DNA, 1374 bp, Homo sapiens
cgaatgatgtaaacagatattcaccatcctcacctaaaagaggcaaacagctcattgatgactttaacttgttgactggttcaaacatccgccagaaaatgttgtaagcaacatggttatagaaaagacattctgaaattaggattaggagatctagatcactgtcctggctccaactctaattgaactataactttcatctaattattcaacatttataggcattagcacttttcacccataaaatgagataaatacacagaacatctatttagttatgttcacctctaaaattctttcaatctgttgtgtgaaactaatagttttaaaattcttgatttcctaataaaaatataaaacggtaatatatgtttaatgtttttatttaattataaataatattttccagaaggaaaaatagtttgttaactcttcatccctttagtcttggcagtagctagcattttgattaaaytgtaaatgaagtctatcgaagagcgaaggaaacctcaagagttgcttaacgctggtagtgtttatgtgggcccatgttcctctatattccaatgtgatttcattatatgaggtttaaaatatttatgtaaggcttctgtttaggggaacaattatcctatcttcatctttatgatttctaaatgccacattaactgcactggtattgattcagataataaaatggcaatcagtattcaatgaattggataattctcttacaaacgtgagagcctagtgtctatctgcttttatatccatgtttttacttcagctcccaggatacctttctttcacaaaccattaagtttcccagtgtatggaagcttttggattatttagcttatcataataaaaacagtctatgcagtataaacagtagaaaaggcagaaacaatttgtatgtatttctcctttttagagtaataaaatgccgtctataggatctacaaatataggaatagacattttcagccaaaaaattctcaggcataattaattttgttttttgttcccattccccaaacaataggtttatagagtatgattcttctcattgccaaaaaacaacaagaaaacaaaagaaaaaaataaagttctccatggtgaaaactgtaaatgctaagaaggcaataaacttcatggaataagaacttaaaatttatagcaactatccatttatatgaattttcacttttgaacacaacttacccatctctttaaagcagagggttgaagtttctattgcgaaccccaaatgtctgagacaagcctccatcagtttaggaagtttatgttgcccaaggtaaagatgcacgcccatgagacaatctcagaaagccctgatgacatgtgcccaga

SEQ ID NO: 687381 - DNA, 371 bp, Homo sapiens
ataacagatgtgtttaaaatatatctcagcaaaaggaaaaatatattttataataatttttagtcacttgattatatcttctatttgcattttcaccattaaaaaatttaaatgcttaacatcactcatagttcttttatttctattataataatttcttgatgacaaagactgtagattttaggccccatcatgatttacttagattttagtagccaattctttagatatatacaactatagtttttcaaatatttaaaatttagtattcaatgccaaratattttctcaatcatataatttttattttattttattttattatttttattttttttttatttttttttgagacggagtctcgctctgtc

SEQ ID NO: 687382 - DNA, 371 bp, Homo sapiens
ataacagatgtgtttaaaatatatctcagcaaaaggaaaaatatattttataataatttttagtcacttgattatatcttctatttgcattttcaccattaaaaaatttaaatgcttaacatcactcatagttcttttatttctattataataatttcttgatgacaaagactgtagattttaggccccatcatgatttacttagattttagtagccaattctttagatatatacaactatagtttttcaaatatttaaaatttagtattcaatgccaaaatattttctcaatcatataattttwattttattttattttattatttttattttttttttatttttttttgagacggagtctcgctctgtc

SEQ ID NO: 687383 - DNA, 371 bp, Homo sapiens
ataacagatgtgtttaaaatatatctcagcaaaaggaaaaatatattttataataatttttagtcacttgattatatcttctatttgcattttcaccattaaaaaatttaaatgcttaacatcactcatagttcttttatttctattataataatttcttgatgacaaagactgtagattttaggccccatcatgatttacttagattttagtagccaattctttagatatatacaactatagtttttcaaatatttaaaatttagtattcaatgccaaaatattttctcaatcatataatttttwttttattttattttattatttttattttttttttatttttttttgagacggagtctcgctctgtc

SEQ ID NO: 687384 - DNA, 601 bp, Homo sapiens
tacatatatatatatatacacatatatagaataaaaatgtagagtgttctaccttgttgcccaaggcattgtctctttagattatccaatattatgtcaaatatctatcaccccaagtttcatagcatgttacaggccacaaagcaagagtgccttgtgctttcaatatagggcttttaatgttttacaaagagtttagagaaaggagttttgaaatttctttyatttggacattttaactttcatctctttctaagattcttaaaaacataacacttaagatcttagctaaaacataacactgaactcaattcctctttctttttgctcttagtctaggttactgggaccatataggtgttatcttgacactttgtgcactttctctctgaacttttccttagaactatcattcccttacctcactgacttccatgcctatctaaacacaaatacaaaaaagaattacattccaaagtgagtgcttccactacttccactacacttgaattctgggtgagtttgatgaatatattacctataccccaggtctacaagtctgtgaactaccattaatatagttaatagattacgtaacaaa

SEQ ID NO: 687385 - DNA, 601 bp, Homo sapiens
tacatatatatatatatacacatatatagaataaaaatgtagagtgttctaccttgttgcccaaggcattgtctctttagattatccaatattatgtcaaatatctatcaccccaagtttcatagcatgttacaggccacaaagcaagagtgccttgtgctttcaatatagggcttttaatgttttacaaagagtttagagaaaggagttttgaaatttcttttatttggacattttaactttcatctctttctaagattcttaaaaacataacacttaagatcttagctaaaacataacactgaactcaattcctctttctttttgctcttagtctaggttactgggaccatataggtgtyatcttgacactttgtgcactttctctctgaacttttccttagaactatcattcccttacctcactgacttccatgcctatctaaacacaaatacaaaaaagaattacattccaaagtgagtgcttccactacttccactacacttgaattctgggtgagtttgatgaatatattacctataccccaggtctacaagtctgtgaactaccattaatatagttaatagattacgtaacaaa

SEQ ID NO: 687386 - DNA, 662 bp, Homo sapiens
tcatattatacaatttttatttagtagctaaataataagcaaagcattatataatcatgtattagtgacttatttcaattttgctaccamgagatgaaaaattgttatcaaaatgcagagcataaatcttggaactgtcatttggatgtgtcacatcaatgtgtttggtgatatgaacctactatgtgcagacgtaggggttacagccgcaagtagaacacgtcttgggtgggcccggctctcttggagctcaggcaaaggccacaactccaatgatgacgttttactaattactggagacaaagtgttatgaacatggcttgattactaattgctctgctctcttctgaaaagatatatttcatttgaataacagaaaatcctttgaagcaaatgtcacaaggtaaaagtcatattggtttttaagcatatacaacttgggatagttagttaagcattgaactggaacaggggtgagaaacgggcagtatttaagagcatgtgcagccctctcagaactcattacatctcaacattccgatgtaacaaagccaggaattttcttttcgcatttgaccatttcccttttaagagatataggtatatttagaagaaactgaagcccagagaagttaagtgagttgcctagggtcccccagcta

SEQ ID NO: 687387 - DNA, 662 bp, Homo sapiens
tcatattatacaatttttatttagtagctaaataataagcaaagcattatataatcatgtattagtgacttatttcaattttgctaccaagagatgaaaaattgttatcaaaatgcagagcataaatcttggaactgtcatttggatgtgtcacatcaatgtgtttggtgatatgaacctactatgtgcagacgtaggggttacagccgcaagtagaacacgwcttgggtgggcccggctctcttggagctcaggcaaaggccacaactccaatgatgacgttttactaattactggagacaaagtgttatgaacatggcttgattactaattgctctgctctcttctgaaaagatatatttcatttgaataacagaaaatcctttgaagcaaatgtcacaaggtaaaagtcatattggtttttaagcatatacaacttgggatagttagttaagcattgaactggaacaggggtgagaaacgggcagtatttaagagcatgtgcagccctctcagaactcattacatctcaacattccgatgtaacaaagccaggaattttcttttcgcatttgaccatttcccttttaagagatataggtatatttagaagaaactgaagcccagagaagttaagtgagttgcctagggtcccccagcta

SEQ ID NO: 687388 - DNA, 662 bp, Homo sapiens
tcatattatacaatttttatttagtagctaaataataagcaaagcattatataatcatgtattagtgacttatttcaattttgctaccaagagatgaaaaattgttatcaaaatgcagagcataaatcttggaactgtcatttggatgtgtcacatcaatgtgtttggtgatatgaacctactatgtgcagacgtaggggttacagccgcaagtagaacacgtcttgggtgggcccggctctcttggagctcaggcaaaggccacaactccartgatgacgttttactaattactggagacaaagtgttatgaacatggcttgattactaattgctctgctctcttctgaaaagatatatttcatttgaataacagaaaatcctttgaagcaaatgtcacaaggtaaaagtcatattggtttttaagcatatacaacttgggatagttagttaagcattgaactggaacaggggtgagaaacgggcagtatttaagagcatgtgcagccctctcagaactcattacatctcaacattccgatgtaacaaagccaggaattttcttttcgcatttgaccatttcccttttaagagatataggtatatttagaagaaactgaagcccagagaagttaagtgagttgcctagggtcccccagcta

SEQ ID NO: 687389 - DNA, 556 bp, Homo sapiens
tgaaacttatttaatcttatttaatccaatatttcctaacattattaactttggaaactttctcctgtagtagttaacagttctgcagaacattttagaaatggtaacataagtataaacaacaaaacagtgagattctgataccaacttccagttcctcctcaccaagacttcgtgaaaactcttcagctcatctggcaaaacaaacaggttatgttctggttccttctggatgttctttttaatatctcacacttttccaggcttttgctggtctgtaattgaaagtcackttttcctatggaggcccttaatcttatgtttctgtataacttattaaaaggttattttaagggcatgaacgagaggcctcttaaagtctcactcttcttactgcccagaggtagctgggctctgtttgttgtatgctgcctctttttttctaattagagtgatctgtttgttatctactgtctgggtcctggctgatctgttttctctctttgtgaagcagggagggtggagtttttaaatatccttttggcaggaagcataa

SEQ ID NO: 687390 - DNA, 621 bp, Homo sapiens
ctgtgtgtgcatgattaatgatcatgatgattacagcatcctgggcatttcacatccctgaagtaggaactggagctctgtaccaggcacttcttgtatttcctcttttcctcatctggagagggatgaaggagatttttttgtaggaggtatgttcacatggggaggtcagaactaccagaaaggcattttttttttttttcaaataatggccatccttattggggtaaagtggtatctcattatgggttgacctgtatttccctagtgactagtgatggtgagcatcttttcatgtgcttattagccatttatatattttctttgaagaaatgtctattcaaattatttgcctactttttaatcatttttttgttgttaagctgtaggagttctttatatattctggatatgaagccattatcaaatatgtaattwtctcccattctgtgggttgtcttttaactctcttgaaagtgtctagactgggcacagtggctcacgcctgtaatcctagcactttgggaagccaaggcaggtggatcacttgagctcagcctgggcaacagagcaaaaccccttctctactaaaaaatacaaaaaattatctgggtgtggtgg

SEQ ID NO: 687391 - DNA, 608 bp, Homo sapiens
acctgggagcttattagaatgccaattcccacgcctggggcctgacctagggaagcagaatctctggagttggagcccaaggatttgcgttttagcaagctccctaggtgacatctaagcctgagaaagtttgagaagcattactgtcaaatatttttttcctggggcgtaaagaccttaatggagacaaagcttaagacaaacacatgagtaattttgaccaaaacaaagtagaaataggattatttttaatgcaaagattgcaaattatgacataaaggttaacaaacctttgtacagaccaagaggtcatcagaagtcttgagaasatgccgaggccagaaaagcacaggatgcacctgaactaagagcaaaccagcgttgagtttgaatcccagcacacccacagaccagctgtgtgcctttggcaaattgcttcactgggaccttcatttctccattcagaggttgaaattacaatctccttgacccatatactccaggaaggttgtgaaaaatcaaggggataatgtatgggacagtgctttgtacagttggataatgtggtaatcaggtttcattttctgctgtaacacttcacaaaatga

SEQ ID NO: 687392 - DNA, 632 bp, Homo sapiens
tccgctcactgcaacctccgcctcccaggttcaagtgattcttctgcctcagacacctgagtagctgggactaccggagtacaccaccacacctgggtaatttttttgtattttaagtagagacggggtttcactgtgttagccaggatgggctcgatctcctgaccacgtgatccgcttacctttgccttctgaagtgctgggattacaggcgtgagccactgtgcccggccgagaactctttactttcaaatgaccaagatattttggggaatacagcaattctcttaacttgaagatacagtcaaaccggtactgcactaaagggaaaaacgggataagcaataaatagaactagagatgtgggccagaggggaaagtctttctcaagcctctcttccagataaaatcaagtttggcmatttttgtcttacctgattgcagtcaaaagcatttcgagtgatttatgggaattagagcttttggtgcacagctagttcattcttaaattgcccatgcttacatagtgtaggagaaggtgtgagtctatgtcccaatttacacataccgcccccaaataattattagtagtggcctcttcctctctcaaaagtatgattgccctagcttta

SEQ ID NO: 687393 - DNA, 2604 bp, Homo sapiens
tgttatgcaccttcaatcagcaaagaaggtaaactccaaaattgtttgcaattacataataatttccttaattaataagtatatttaaattctagggagatttaaagttaggtacgaaaatcattaagtaaatcaaaccaaaagttgagcaaaaatttaaaacaaaaaagaatattaaatgtatcaataaaatgtgaactatttcattaaacaaattacaaaaggcctcaaaaaagatttatttgagtaagaccttaagatgagcttaacaacttgtgaaacaggtttgaaatgttaacttcaataaatgtagttttaatttttaaaagtcaaagtaatccatgacgaactttctctctgcctatgattgagttgctgttcccaaacagtcctcctaagcacaacgacaaaagtagaccaaaaaaagtaagaagaaactgttgaagagttctgtctgataaaagcaaccaaagcggccaggacatgaggaaccaaaatcacggaatggcgggactgaagcactgaaacaaactctgcattccgcgtgccctttcctcttaaggtgggtatttgcacacaaaaattgtacacacctggggcacagctcagacaaaccaagcaggaagaagctgctagaagaaatgagtcggcttactgaagcctctactatttctgagcagatatttcagcagtctgtcagcactagggagacaaaattttgttggtgttgagtgcctaacagaggaggagccctggaaagagatcccaaaagcattatgctctgggaatgtggacaaaccaaaaaaccagtctactcaatcatggcgatctgctcagactgctagaagaaggttaaatccactctctatgaagatatcatccaaattttcaataaaaaattgccaggcatcaggaatctctctgaatctgctgtgattctgaaggctgcctgattcacgaatcataagtttaaaaataatgaaaaaaatttttaaaattgccaggcatgccaaaaaacagaacctgatgttccggaaatgagaaaatggaaacagacccacaagtaatctagactggagttaacagacattgacattaaaacaaaagattgatgtgtttaagaaaattaaaagacagactctcaccaaggaacaaagatctacaaaaacaaacaaaaattaagaattcaatcgatgagtttaacagcagctttcctagtttagacacaaattaggaaagagaatttagtgaactggaagactagtacacagaaaacatccaggatgaaaattatgaatgatgaaaattattaccatgaaagggggaaaaaatctcctaattaaaaagaatgagaactacataaaagagcataacaaacatatgggataagatgaaaaaggtctgtcatacgcataacaggcaacctgagagagaagggaaaatgcarcaaaatgggtacttagacagaatcagtatttgaagaaatactggccagtattttccaaaactgacaaaggtatcaagccacagattgaagaaactctaggaacaccaaagaggatgaatacaaaaaaagacaaatctaggcatatcataataaaactgccaaaaaccaaagttatctcctaataactgtttctgtaatccagaaacataatcatatttacaagtctattcatttggagtctggaaaagtagaaaccatttaaagactgacacccagcaaattcaaggtacatggctgggttttaatctgtgaacacaatgaatggtaataattagccaaaattctgttctcttgaagcagtgaaagagaaggcacaagtacagtcagcagccctgtccttgagttctgcatctgaagattcaaccagtcgcaaatcgaaaatattaaaaaataggacaggcgtggtggttcacacctgtagtcccagcactttgggaggtcaaggcaggcagatcacttgaacgcaggaattcgaggccagcctgcacaacatggtgaaaccccatctctatcaaaaatacaaaaaagtagccgagtatgctggtgcacaccccatggtttcggctactcgggaggctgaggcaggaggatcacttgagcccaggaggcagagattgcagtgagccgagatcatgccactgcactctagcctgggtaacagagtaataccccatctcaaaaaaattaatatttaaaaataaatataaatggatggctgtgcctgtacacaacatatacagaattttttcatcattatttcctatacaatatagtatcacaactattaccataacatttacattgtattaggtattacaagtaatctagagatgatttaaagtatatggaacaatgcgtgtacattatatgcaaatactatgccatgttatatcaggaacttgagcatatgtggatttgggtgtctgaggggagtcttggaaccaattccccagggatctctagagataactgtaatgtatggacttcacacctttacttcaaaaaggttttaaaccatctccccatgtattcagaaaccaaaatacaccaattccaacactagcaatcacttcttctactgccatccccatttgatg

SEQ ID NO: 687394 - DNA, 2778 bp, Homo sapiens
ctttctcaacaacagcgtgccatgtgaatatttgtttttgtttgtaatagatacctctataataaggagaatgagaaggttattatttcatcctgtttgttcactgtttttatttaacaactttttttttttttcctactacattccaggcagcaggccagaggccagggaaattcgttgccacttcacagtatctcattgcatcattgagaggtttactcctgatccagcaccgaaagaccatttttggcctttaaaaataaagttgaaagtccaagagccagaaagattaaggattaagctaatttttaaaataacaaatgttttcttatattcttttctcatttatatggtgctggtaattttttaaattagattttcatctgggcattttatattaaaaatgatacagttccctgtcccttgtaattgcatttcttttgattttcttttattatgactcgcatatcactgacacttttttcctggaatgttaaaagtatacatcatctggctaaaaggaaaaaatactgacttaataaaaatggaaaagagagagagagagaaaatggatattcttctcttttggttccaaacaaggcaaagtcctcattcctcgttcttcatacatgccaaggttgatgtcacggatccaaaccagttttgagttatctgaaatgggggggagcggggaagcgcagttcaacaatcttctgaagcttgaaaaacaaatttgtcacagtctgataacccaaaaatgactgatggattttctctgcattttccaagcagggaggggtcgggcatggagaatgaaacattctgagaaaagacttaaatgtggaaacttttggttcaagagggtattctaggagatacaagaaatatctcctgggggcatccaaagggaataacactgtaatcttgagtgatgtatggttccattgcccgaggaatagggatgaaaaccataaactcctttggttggggtattaacttatcatcaaaagttaccataaataatggatattgtttatggctgagaagtaggacacatccagagaagacatcccttaatttttcataaaatcatctcagtgttattggaatatgtttttcatgccatttgagctgtcggagtatctcttgggtagattcttaagcagaaatagttgggactttacaaaccctgcctgggattctaatgtctggtgccatgaagattttggcttgtgtttcttttgatgtctagaatatcaagaacattcctagcttctatattacggcaggtcacgtcccggcttcttctagtaaaatcccctctaggattcaagcctctatttgcaccggtaataaatgtgatggcacattgcgactttgaatgcaagccagcagggctgcaggcacctgtttctcccagtgccccaactgtatcaaacccttttcatcctccctgcttttgatgcacaaacataaaacggagtcccagaatctaaaagtgatgtcacttgagtgtcaccaaggacctttagaggaccatggggcatctcttcctgttacaaatgaggctctcaaagcctggaaaggtgaatccctggaccacaagtggaggaactgagaaagggtgcgtcgacactcagaccccacagcttgccattgtgtggcttgtgatagaaccaagacatcagaacagaccagcttatccggttataaatctaggataacatgatgagcttcagagccaggggttgagctctcctgggactcctcccctccwaaggatgtgttccattgccaaacattaaaagctccgaattcttgttttctcgccaaaaggtattgtagacatgatggcagtgaaattatttttttcgcatttaaagttacccttaataaaatcactttcttcaggtggtgtaccaagttagtaaaacatacctgtttgaatctatattccatcaaccatgaacttatgcctggggatcaaaaatttcttaaaacccaccaggcgtgatcctaatacttttttcacagtttctcggggtgtttcagtaggttaggattacctccaaagacatttaaatgatgtttctggttcaaacggaaatgaaaagcacataaaattgtaagacataagaattccaagaatttggcagaggtgaaaacacacaaagaaaagatgaaatttagacgtttttattctgctcctttatccaacacaaatccctctccagttgtcccataaccacaatgccagcatttaactcctcaagggttaaaggaggcttgtagagcgggcctctggctgactccagcgtggatcgcaggcctggcgtcctgtcagacttccacggtcaaatggtaaccacactgcctctagttacctcgctccatttcttggggggctcagggacagccgccatttccccatcagtgtccacgaccagcgtccttctgccaggaggcgggctggaaggtccctcgcagctatggccaagccctggctgcggctgcagaagtctcacttgtttcactcggccaacacttaatttctttatgtatctgagggagtggggaattagtgtcttccaggaaattcaggctctgagttttctgtcctagactacaacaggcaaatggagaacgggttgtggggatcggagctgaggaatgaacttcagctgataaaatgcaagacaaggagggaacaggaaagcaaaggacaaagtgaaggagaaaaaaataaagggaattttggcagggaaaagggatttggga

SEQ ID NO: 687395 - DNA, 2778 bp, Homo sapiens
ctttctcaacaacagcgtgccatgtgaatatttgtttttgtttgtaatagatacctctataataaggagaatgagaaggttattatttcatcctgtttgttcactgtttttatttaacaactttttttttttttcctactacattccaggcagcaggccagaggccagggaaattcgttgccacttcacagtatctcattgcatcattgagaggtttactcctgatccagcaccgaaagaccatttttggcctttaaaaataaagttgaaagtccaagagccagaaagattaaggattaagctaatttttaaaataacaaatgttttcttatattcttttctcatttatatggtgctggtaattttttaaattagattttcatctgggcattttatattaaaaatgatacagttccctgtcccttgtaattgcatttcttttgattttcttttattatgactcgcatatcactgacacttttttcctggaatgttaaaagtatacatcatctggctaaaaggaaaaaatactgacttaataaaaatggaaaagagagagagagagaaaatggatattcttctcttttggttccaaacaaggcaaagtcctcattcctcgttcttcatacatgccaaggttgatgtcacggatccaaaccagttttgagttatctgaaatgggggggagcggggaagcgcagttcaacaatcttctgaagcttgaaaaacaaatttgtcacagtctgataacccaaaaatgactgatggattttctctgcattttccaagcagggaggggtcgggcatggagaatgaaacattctgagaaaagacttaaatgtggaaacttttggttcaagagggtattctaggagatacaagaaatatctcctgggggcatccaaagggaataacactgtaatcttgagtgatgtatggttccattgcccgaggaatagggatgaaaaccataaactcctttggttggggtattaacttatcatcaaaagttaccataaataatggatattgtttatggctgagaagtaggacacatccagagaagacatcccttaatttttcataaaatcatctcagtgttattggaatatgtttttcatgccatttgagctgtcggagtatctcttgggtagattcttaagcagaaatagttgggactttacaaaccctgcctgggattctaatgtctggtgccatgaagattttggcttgtgtttcttttgatgtctagaatatcaagaacattcctagcttctatattacggcaggtcacgtcccggcttcttctagtaaaatcccctctaggattcaagcctctatttgcaccggtaataaatgtgatggcacattgcgactttgaatgcaagccagcagggctgcaggcacctgtttctcccagtgccccaactgtatcaaacccttttcatcctccctgcttttgatgcacaaacataaaacggagtcccagaatctaaaagtgatgtcacttgagtgtcaccaaggacctttagaggaccatggggcatctcttcctgttacaaatgaggctctcaaagcctggaaaggtgaatccctggaccacaagtggaggaactgagaaagggtgcgtcgacactcagaccccacagcttgccattgtgtggcttgtgatagaaccaagacatcagaacagaccagcttatccggttataaatctaggataacatgatgagcttcagagccaggggttgagctctcctgggactcctcccctccaaaggatgtgttccattgccaaacattaaaagctccgaattcttgttttctcgccaaaaggtattgtagacatgatggcagtgaaattatttttttcgcatttaaagttacccttaataaaatcactttcttcaggtggtgtaccaagttagtaaaacatacctgtttgaatctatattccatcaaccatgaacttatgcctggggatcaaaaatttcttaaaacccaccaggcgtgatcctaatacttttttcacagtttctcggggtgtytcagtaggttaggattacctccaaagacatttaaatgatgtttctggttcaaacggaaatgaaaagcacataaaattgtaagacataagaattccaagaatttggcagaggtgaaaacacacaaagaaaagatgaaatttagacgtttttattctgctcctttatccaacacaaatccctctccagttgtcccataaccacaatgccagcatttaactcctcaagggttaaaggaggcttgtagagcgggcctctggctgactccagcgtggatcgcaggcctggcgtcctgtcagacttccacggtcaaatggtaaccacactgcctctagttacctcgctccatttcttggggggctcagggacagccgccatttccccatcagtgtccacgaccagcgtccttctgccaggaggcgggctggaaggtccctcgcagctatggccaagccctggctgcggctgcagaagtctcacttgtttcactcggccaacacttaatttctttatgtatctgagggagtggggaattagtgtcttccaggaaattcaggctctgagttttctgtcctagactacaacaggcaaatggagaacgggttgtggggatcggagctgaggaatgaacttcagctgataaaatgcaagacaaggagggaacaggaaagcaaaggacaaagtgaaggagaaaaaaataaagggaattttggcagggaaaagggatttggga

SEQ ID NO: 687396 - DNA, 839 bp, Homo sapiens
gagcagagctaggttcttgtaaaacacttggcaggtaggttcctaggaatttaaaggtatctgcctttgttaaattatgaagattttttaaatgtgagtagagaaaagctgtttccagtcatgaggagtcacgaggggtgcctccaggaggagagagaccatgcaagaagcaggtgacggggcagtggggcgagcggcccagagaagcccccccaccccctggatctcttgggcagtggggcgagtggccagggaagccccctgtatccccctgggtctcttctttgagggcttatgctctgtccgtggtgtggagccactcttgttcatgcacgttgcagacacaaccacttttggtccagcaagaatagttgagctgatcacttgaaaggatcaaaatccagttgccactgtggaagctctggggccacatattttaatattctaaattaggcctcaagttggatttgtttttgtgactcaaggaaattttgttctctttcacattctagaattccctgtgaagcagccctgtaaataggagggcttttcctgaataatatggaaagaatttctctttggggatttgagtctatatcatacaacattttaaaatactcttgagatggcacgtgcagccctagcaacagggccagaccacagtcaagggcttccagagtgtgccgcacacgttcccgtgggatccagccttgcacrgtgcccagggcggcgggggcgggggtgatggggaaggtcctgtgactggtggtttctccatggtcacagggtcttctttctgttgatgtggccccattcgctctgactcacccctgacggca

SEQ ID NO: 687397 - DNA, 600 bp, Homo sapiens
atttccacctaaccatagagcaacgacatacacaggagatttaatacaggagactcttcacaagtgctgcatttccaagccagaaaggaaatggccagcattcctcttgataggatttggggaatatcaaagattagtaaggtgactcatttgtgtaagtggtcaaacctacgaagagtttcagcttttctatctgcagtgtactttccttcttttgttttttggagacggggtctcggtctgtcgcccaggctggaatgcagtggggatcatagctcacctgcggtgtattttattcttcttagtggtttccaagccaaagcctcttggtctttcttaccatttagttcattctgcctcccgccctatccaacacatgcatacactcacctttgtcattgtacctgcgtaacacaggcaccatgtctatggataatagagcacatttgtcaaaaggctctatgggtatttaaaatagagtaatgaggttatttttcctgagctcaatttcttactgattaatacatttccttgagacctcataaatttataagtgtgtgactggctgaaataaacaaaatatatactaygtaaaaatcc

SEQ ID NO: 687398 - DNA, 968 bp, Homo sapiens
aatggggaaccagaagctgccccacgattactgttttctgcacacaatgataacacctgtgctaacactgtattggccctgatttaattctacccttagtttgaacacctgcatttttctcccctaaggataaaatgaacaggttctattttttaaattttcttctgcattttacaacaaataattatataagagtgaaacacagatctgtccaagggccagccatatatgggggctacagtcactaaaaggtaggaatcgaccagtgagccatgcccagataccaggaacgccattaggaagaaccaaatagtccctgtgcttaaataacaggaacagcaatttgcctacttatcattctgtctactagtgattcccaaagatggctatggtgatgaagttactggcttattgtgaaatgaaaacacatggacagtaaagtgaggtgtattttctctttcaattcattggttttattgaaggaaatatcccctaatagcaaaacaatcagagtttgttaggytgcctctaccaactcaaaattaacactgatatgcaaaatactgaaatgtatcagtcatttaggaaaactgaaacatgatacataaagcagtttaaaagcctaatataagatatactgtggttcatcagtttatttgtaatgcatgtttatccataatatgacaaaaataaatcaattatttactgccattatggacttagactgcactaagtacccatttacaacactttaacaccacagatccccttacattcactgacttactcagaaaaattccaaatactatctcagctacctcataattccagttgcctacatatgtttaagatttagttttattacagtaggaatattcatgaaagtttaccttcttccttttaaacaaaattctagattagagacaatggcaatttgatttaaaaaagtcctacttaaaaatttctgg

SEQ ID NO: 687399 - DNA, 2375 bp, Homo sapiens
  misc_feature 559, 560, 561, 562, 563, 564, 565, 566, 567, 568, 569, 570,571, 572, 573, 574, 575, 576, 577, 578, 579, 580, 581, 582,583, 584, 585, 586, 587, 588, 589, 590, 591, 592, 593, 594,595, 596, 597, 598, 599, 600, 601, 602, 603, 604, 605: n = A,T,C or G
  misc_feature 606, 607, 608, 609, 610, 611, 612, 613, 614, 615, 616, 617,618, 619, 620, 621, 622, 623, 624, 625, 626, 627, 628, 629,630, 631, 632, 633, 634, 635, 636, 637, 638, 639, 640, 641,642, 643, 644, 645, 646, 647, 648, 649, 650, 651, 652: n = A,T,C or G
  misc_feature 653, 654, 655, 656, 657, 658: n = A,T,C or G
tgcatctctgcctagtaaactcttacttgtccttcaaaccctatttcaaaactcacctctttgaagtcttcctcaatcctcatccttcttcctcactgcaagaatgaatccctcccactgtgattttacagcactttttacattcatttacagttatgtacatgaaacacaactgtattagggcttttaaaataatcagctatttaattaccaattcatctctcacaataaattttgaggtctttgggcagggaccttgtttccactgtgtgtccactgtgtctagcacaggcctactgtggggaggtgctttgcttccttttcctggggatggccctggggtctggatcacattaagaataaccatgagctggtagtccaaaaagtccatatattgctgtgtaagggtcaagaaagttcctctacttagagaaagatcctgaagaatacattgtttctattgaactaatccccagagttctgctctgttttgaattaactatgaaaaagcagtacatgatggccaggttaaagtcatattcatcttcaaatcaaagtnnnnnnnnnnnnnnnnnnnnnnnnnnnnnnnnnnnnnnnnnnnnnnnnnnnnnnnnnnnnnnnnnnnnnnnnnnnnnnnnnnnnnnnnnnnnnnnnnnnnggagttttgttcttgttgcccaggctggagtgcaatggtgcaatctcagctcaccacaacctccacctcccgggttcaagtgattctcctgcctcagcctcctgagtagctgggattacaggcatgcaccaccacgcccagctaattttttgtatttttagtagaaatggggttttgctgtgttggccagcctggtctcaaattcctgacctcaggcagtccacctgcctttgcctcccacagtgctgggattacaggtgtgagccaccgcacctggcctatggggtatttacatttttcttagtttttgacaatgaacatgtattacttgcagcattcacyttcttcattgaaggagatagggcaagataggcacaaactgactcggcctgtcccctaatgggcagtggttggaaggaagagtgcagcaccacctgcatgtgtcaaaacaatcttcattactgggcagatactgattatccctgatgggaccccacctgcctggacagagagcccacacccattcttccaccttcactcatgtggacactcagacaacagcaagtccatggagaaccacagaagctgtgaagtttccagatctctcatgagtctcactactgccttgcgctttttctatccattctctcccttattcacctggacaacattagttcatcgaaactcagcccagctgacacctcccccgggaagacttcccttaccctccgagctatgtctagagtcccgagctgtctctgtgcagtacatatcccacagactgagctcctggaggcagggccagagctcagcagctgtgcagcctcggtgcccagcccaacgcccagcccaggcaggagctcgggttggctgaactgaacagaaactatcttgttcctgagatgtagctagtttcttgatagaggtcatccagtgctagcagctcagtttccaactccattttgagaattatggccaataatttgttttcctaaagcaaaaaggaggtgaatcataaatccgagtggtttttgtttggcggactttttctttctttttttgtcctttttgagacagggtcttgctctgtcacccaggccagagtgcagtggtacaatcacagctcactgcagccttgacttcccttattcaatgtttagcctttaatgcaaatatcacaagtgggtcattgattatttttaaggggaaaggtaactttttggcaagcgactcatgtccacacacaccccatatttgaatttcatttgtcagtgattcttacctggacttgagctgctcaagagctgggagcccacccactgcatgccacgtagtaggtcttcgcccgtgtgccaatcattagagacactggagccctgaaagctgccgatgttgccctgttgccattggctttcactctttcttgtgctcttgccacatgccaggcattgttgcaggtgctgaggaggcagcagggaacaaatcctacaaaacacgagcccacccctcccaccaaacaacacttacaaactcttaccagaagctgggccccatagactcacccattttaaagaagagaaagagagaaaggaaggaaagcctgcactgcaggactctggaacaagtgtggattaggacccagaagtcttcagtttattttgagctttctggctgtgtgactttgggaaatctacttgacctgtcactacctcaattt

SEQ ID NO: 687400 - DNA, 2375 bp, Homo sapiens
  misc_feature 559, 560, 561, 562, 563, 564, 565, 566, 567, 568, 569, 570,571, 572, 573, 574, 575, 576, 577, 578, 579, 580, 581, 582,583, 584, 585, 586, 587, 588, 589, 590, 591, 592, 593, 594,595, 596, 597, 598, 599, 600, 601, 602, 603, 604, 605: n = A,T,C or G
  misc_feature 606, 607, 608, 609, 610, 611, 612, 613, 614, 615, 616, 617,618, 619, 620, 621, 622, 623, 624, 625, 626, 627, 628, 629,630, 631, 632, 633, 634, 635, 636, 637, 638, 639, 640, 641,642, 643, 644, 645, 646, 647, 648, 649, 650, 651, 652: n = A,T,C or G
  misc_feature 653, 654, 655, 656, 657, 658: n = A,T,C or G
tgcatctctgcctagtaaactcttacttgtccttcaaaccctatttcaaaactcacctctttgaagtcttcctcaatcctcatccttcttcctcactgcaagaatgaatccctcccactgtgattttacagcactttttacattcatttacagttatgtacatgaaacacaactgtattagggcttttaaaataatcagctatttaattaccaattcatctctcacaataaattttgaggtctttgggcagggaccttgtttccactgtgtgtccactgtgtctagcacaggcctactgtggggaggtgctttgcttccttttcctggggatggccctggggtctggatcacattaagaataaccatgagctggtagtccaaaaagtccatatattgctgtgtaagggtcaagaaagttcctctacttagagaaagatcctgaagaatacattgtttctattgaactaatccccagagttctgctctgttttgaattaactatgaaaaagcagtacatgatggccaggttaaagtcatattcatcttcaaatcaaagtnnnnnnnnnnnnnnnnnnnnnnnnnnnnnnnnnnnnnnnnnnnnnnnnnnnnnnnnnnnnnnnnnnnnnnnnnnnnnnnnnnnnnnnnnnnnnnnnnnnnggagttttgttcttgttgcccaggctggagtgcaatggtgcaatctcagctcaccacaacctccacctcccgggttcaagtgattctcctgcctcagcctcctgagtagctgggattacaggcatgcaccaccacgcccagctaattttttgtatttttagtagaaatggggttttgctgtgttggccagcctggtctcaaattcctgacctcaggcagtccacctgcctttgcctcccacagtgctgggattacaggtgtgagccaccgcacctggcctatggggtatttacatttttcttagtttttgacaatgaacatgtattacttgcagcattcaccttcttcattgaaggagatagggcaagataggcacaaactgactcggcctgtcccctaatgggcagtggttggaaggaagagtgcagcaccacctgcatgtgtcaaaacaatcttcattactgggcagatactgattatccctgatgggaccccacctgcctggacagagagcccacacccattcttccaccttcactcatgtggacactcagacaacagcaagtccatggagaaccacagaagctgtgaagtttccagatctctcatgagtctcactactgccttgcgctttttctatccattctctcccttattcacctggacaacattagttcatcgaaactcagcccagctgacacctcccccgggaagacttcccttaccctccgagctatgtctagagtcccgagctgtctctgtgcagtacatatcccacagactgagctcctggaggcagggccagagctcagcagctgtgcagcctcggtgcccagcccaacgcccagcccaggcaggagctcgggttggctgaactgaacagaaactatcttgttcctgagatgtagctagtttcttgatagaggtcatccagtgctagcagctcagtttccaactccattttgagaattatggccaataatttgttttcctaaagcaaaaaggaggtgaatcataaatccgagtggtttttgtttggcggactttttctttctttttttgtcctttttgagacagggtcttgctctgtcacccaggccagagtgcagtggtacaatcacagctcactgcagccttgacttcccttattcaatgtttagcytttaatgcaaatatcacaagtgggtcattgattatttttaaggggaaaggtaactttttggcaagcgactcatgtccacacacaccccatatttgaatttcatttgtcagtgattcttacctggacttgagctgctcaagagctgggagcccacccactgcatgccacgtagtaggtcttcgcccgtgtgccaatcattagagacactggagccctgaaagctgccgatgttgccctgttgccattggctttcactctttcttgtgctcttgccacatgccaggcattgttgcaggtgctgaggaggcagcagggaacaaatcctacaaaacacgagcccacccctcccaccaaacaacacttacaaactcttaccagaagctgggccccatagactcacccattttaaagaagagaaagagagaaaggaaggaaagcctgcactgcaggactctggaacaagtgtggattaggacccagaagtcttcagtttattttgagctttctggctgtgtgactttgggaaatctacttgacctgtcactacctcaattt

SEQ ID NO: 687401 - DNA, 1287 bp, Homo sapiens
  misc_feature 172, 173, 174, 175, 176, 177, 178, 179, 180, 181, 182, 183,184, 185, 186, 187, 188, 189, 190, 191, 192, 193, 194, 195,196, 197, 198, 199, 200, 201, 202, 203, 204, 205, 206, 207,208, 209, 210, 211, 212, 213, 214, 215, 216, 217, 218: n = A,T,C or G
  misc_feature 219, 220, 221, 222, 223, 224, 225, 226, 227, 228, 229, 230,231, 232, 233, 234, 235, 236, 237, 238, 239, 240, 241, 242,243, 244, 245, 246, 247, 248, 249, 250, 251, 252, 253, 254,255, 256, 257, 258, 259, 260, 261, 262, 263, 264, 265: n = A,T,C or G
  misc_feature 266, 267, 268, 269, 270, 271: n = A,T,C or G
tcttaaaattcagtgagatataggataaaataatgctttgagaagaatgtttaatagaaaattaaaataactttttctggcctctcttgtttttactgtgtatgttcttgctcagggctctctagataatgcagaataaagagaaacgttgggggatttataaactgaatgnnnnnnnnnnnnnnnnnnnnnnnnnnnnnnnnnnnnnnnnnnnnnnnnnnnnnnnnnnnnnnnnnnnnnnnnnnnnnnnnnnnnnnnnnnnnnnnnnnnncacccccccctttacctcccaccttcactgcagactgcacttcccattccctgctgcctgctgcctgactgctcctaatgagattacagatctctggtgaaatagacgagggttaattcccccaggctttacagggcagggcaggccaggccacaagaaatagcaaaaagacacctattctccaaagcactaagtgtgataatgaccctaagagtccgttcccctgttcagcacaccagggttcacactgcgtttccaaataccctctgggtggaattttgtaccagccctaacaaagtagatgctgttatcatctctattttacagatggagaaactgaggcacagtgagatgaaatgcttgtctgaggtcacacagctagtaagtggcagagctgggacccgaatgtgggtctcttgggctctgtcatctttaaaaaataataggcccagagagcctgcagggtgcccagcaccaggcttgaaacagccctgaagcatctacgtcccatttcccggtgagtggcacagcccacctttgaactcaggtcccctggactcgaatctacattccccacaatactgccaagcacccttgaacctatctgcctgttcatgtggtggaaacagactggcctagccctgacttctgacctctgtgaccatggccaagggactggcttctggggtctcagcctscctttctgaaaaatgaaggtgggaaccctgggatctttgggacaattccctatgattggcatagctaaggcagccagcacaggcctggcccgcagcacatgcacccacccaccttagtttctttatctgtaaaatggtgatattaatagtacttatttcttgggattggtgttaggattaaatatgccagtacatgtaacactcttctagaatggcacctggtgcatagtaaatgcttaattaatgttgagggaaactgatatcttactgtcttgtttttgattctttctggaaggaagcaggggtaaagatcaaacc

SEQ ID NO: 687402 - DNA, 610 bp, Homo sapiens
tctctctatgctgctttgctttatccatgacctgtgagttgatagatacactgctcattcctgcacttgtattggttgactctaagctttgattctactgggaaaatgacagttaactctgcaagactctactttgtttgtgtttgatttttcatttctctatatcttcccacagttttaccccacctgctttctgtgttcctttctggtcaatctccttttctcactctcagtccctggcaaccacatatctgccatcactattgttttgccatttttagaacttaaaaatgtaattctacagtgtgcagtcatgtatatcttgcttcttttacttagcataatgcttttgggattccttcatggtgtatatatcagtagctcattgcctgttattattcaatagttggattcattttattgcttttacatggacatttagattgtttatcaatttttgcttttatgaataaagccgtaatgaatattttgtaccagccttaayatggacaggttttcatttaactaatgtgtttttaattatattacttcattattattttgatcttgaagtgatttgccatctgccacaaacctaagtcattttttt

SEQ ID NO: 687403 - DNA, 610 bp, Homo sapiens
tctctctatgctgctttgctttatccatgacctgtgagttgatagatacactgctcattcctgcacttgtattggttgactctaagctttgattctactgggaaaatgacagttaactctgcaagactctactttgtttgtgtttgatttttcatttctctatatcttcccacagttttaccccacctgctttctgtgttcctttctggtcaatctccttttctcactctcagtccctggcaaccacatatctgccatcactattgttttgccatttttagaacttaaaaatgtaattctacagtgtgcagtcatgtatatcttgcttcttttacttagcataatgcttttgggattccttcatggtgtatatatcagtagctcattgcctgttattattcaatagttggattcattttattgcttttacatggacatttagattgtttatcaatttttgcttttatgaataaagccgtaatgaatattttgtaccagccttaacatggacaggttttcatttaactaatgtgtttttaattatattrcttcattattattttgatcttgaagtgatttgccatctgccacaaacctaagtcattttttt

SEQ ID NO: 687404 - DNA, 528 bp, Homo sapiens
tttagttccagggtggcaaattctcaatgctatttaaacccattgtccagtttctctatatccacatccaaaagagcagaacattgctggagaaaacctcttaaacagaagatgggctttactttgtattaaaaaatgagtcaactctgtctaataatcttaccacaattgtgtaaaaaactcatttttatactgtaaagaaaaatgaattcatagagcttctttttttcctaaaagctactgaccatcctaagtacttcttgagacaagggaagactttgtatttcatgaggtaatggaagatctaaatggaaacttcctcatcctcccaacaactaacctcaaaatccatttcctcaatgtctgtcttctcattttgcccttctgttaaaattaactcagtgatctgccttctaccaatggccagtgcgttcatagtttgattcctttcatgcatacttgctcaatgatttggccatttatcccttctttctgttgaaacatacatatccctttctkaaatggtca

SEQ ID NO: 687405 - DNA, 663 bp, Homo sapiens
ttaaaactttaaaaataaactttaaaaaatatatgtgcttatactttttatatatgtgtatcagtgtgcatatgtctacgtgttccaccagagctgtcttcattatccagcttctatgcaaggtctatgattttggcctacatttttcatcttcaaatgaagtacaagaattaccagtgttacttcaattgagatacaactcctataaaaatggaaaatccatagcatgcttgatgtttaatgaagtggactatattatccaacattccaataagataatcacaatgaattcttttttttggaaaaagtttttcttaatttcctgcattattaagatttttttttttwaaaaataagaaacatgtctaatatctttaaaaacacaaagcttttgtgccgggtgcagtggctcactcccgtaatcccagcactttgggaggcctaggcgggtggatcaccttaggtcaggagttcaagaccagcctggccaacatggtgaaaccccgtctctactaaaaatacaaaaactagccaggtgtggtcatgggtacctgcaatcccagctactcgggagactgacgcaggagaatcacttgaacctggaagccgaagttgcagtgagccaaggtcacaccactgcactgcagcctgggtgacagactg

SEQ ID NO: 687406 - DNA, 1169 bp, Homo sapiens
ttgcccaagctggtcttgaacttctggcctcaagagatcctgccaatgtgacctcacaatgcactggggttgcaggcatgagccaccatgcagcccctgcaaaatctaactgtccttcaggtgctccttttggacctcctagctagactgccattggcaaatgccagtttattatccacccacatgtatgttaatggatttcccatgttttatttgtctagaccaggctttctccacagcagcactgttgatgtttagggctggacagttctctgttctggagctgtttgcgcctcgcaggatgtttagcagcatccccagcctccgcctgccacatgccagcagcactcctcagtgtgacagccaaagtgatttcagatactgtcaaatatccccagggcggcaaaatcacctccagttgagaactgctgacctaaaaccctctggaacaatgttagatcatggtaatgatagcgcatactgctcctgaccttaatgggaatacctctagcatcaaagtatactagtacctgtatactactgtctgggctgttattagtacactgtattagtccattctcactccgctatgaagaaatacccaagactgggtagtttataaagaaaagaggtttaaattgactcacagttctgcatggctggggaggcctcaggaaacttacaattatggcagaagactcctcttgccagggcagcaggagagagaaggagagccgagcaaaggggaaagcctataataaaaccarcagatctcgtgagaactcactcactatcacgagaacagcacgggagaaactgcccccatgattcaattatctccacctgggcccacacccttgacacgtggggattattgcaattcaagatgagatctggatggggacacagagccaaaccatatcatatcctttatattagcatactgtatcaaagtataattttcttttttctttccttcaagagagagcctcgctctggctctggctggagtgcagtggcacgatgtcatcccacggtaacctctgcctcctgggttcaagcaattcttgtgcctccacctctcaagtagctggaactacaggtgtgtgcaaccacacccaactaattttgattttttttttttttttgagtacacatggggttcgaca

SEQ ID NO: 687407 - DNA, 596 bp, Homo sapiens
cactgccctagctgtcggcatgggygagctcactccctgtcactctcggcaatcctgacccaacacgagatgaacagaaaccccccaggctcaccccaggactcagaatcaaatttcccccgcaaatatgattcccatatccctcctcatttggcagaaatcagggcactcttgttggtgctattagtaagcctgaaactattacaaacacactccccagtaaaagactaaaaatagcgatgacctccaggaagcctggcatggcctcagccagcacctcagctcccattgtccaaatcggctctcagggtcagagcagccaacagctgcggtccaggggatatacggatgagggtggcccagaacaggcaatgaccgtgtggccagggagggttcctgaatacttggctgcccaggccagaaacacagggctcttccaagtcaaggatcacttgagcccgggagtttgagacaaacctgggcaacatagtgagacctggtctctacacaaaaatttaaaaaatagctgggcttggtggtggcacgtgcctgtagtcctagctactcaacaggctgatgttggagcatcactttga

SEQ ID NO: 687408 - DNA, 596 bp, Homo sapiens
cactgccctagctgtcggcatgggtgagctcactccctgtcactctckgcaatcctgacccaacacgagatgaacagaaaccccccaggctcaccccaggactcagaatcaaatttcccccgcaaatatgattcccatatccctcctcatttggcagaaatcagggcactcttgttggtgctattagtaagcctgaaactattacaaacacactccccagtaaaagactaaaaatagcgatgacctccaggaagcctggcatggcctcagccagcacctcagctcccattgtccaaatcggctctcagggtcagagcagccaacagctgcggtccaggggatatacggatgagggtggcccagaacaggcaatgaccgtgtggccagggagggttcctgaatacttggctgcccaggccagaaacacagggctcttccaagtcaaggatcacttgagcccgggagtttgagacaaacctgggcaacatagtgagacctggtctctacacaaaaatttaaaaaatagctgggcttggtggtggcacgtgcctgtagtcctagctactcaacaggctgatgttggagcatcactttga

SEQ ID NO: 687409 - DNA, 1087 bp, Homo sapiens
ggcaggcccatcatcatgtccattttttgaggcttaagagctaatataacttgtctgccaacacaggtagaagcctgggccacagggtaggttcttttttttttcccaagatggtcttgccctgtcgcccaagctgaactgcagtggtgtgatcttggctcactgcaacctccacctcccaggttcaagcaattctcctgcctagcctcccgagtagctgggattataggcgtgcaccaccacgcccagctaatttttgtatttttagtagagacrgggtttcaccatgttggccaagcttgtctcgaactcctgacctcaagggatccgcctgcctcagtctcccaaagtgctgggtttataggtgtgagccaccgtgcctggccagtctaggtccttaaccaccaaacaaaactcttctctgcttccaatcccaccccccaccccagtactccctcttccactggaggccagcatccttgctcttacatccctaatggacctggtcacatccctgcttaagccccacagtgagtggacttctagaaaaatatggcatgttgagcagacagatttatcgctgctcccttccaaaactccactatgatgacagtagaggaaataaacaaggcataaatccataaggggtgatgatgggtaatgaaggatgtcaacaagattctggaagctgggaagcagatggccaggcagtagctgacttggtagagtgataaaagctgagagccaactgcctgcagggaggaaccacccagaaggagaagcccggaaaggctcaggaatggagtttccagggacccctcagggccttagtgccaggagggctgaagacagtagggctgaaagtctgtaagaaccgatcagaccctagagcccctccccaaccctgagtagccaagtgatggccacctgccacccagcagaggggccggggatcactccctggggagggtgaaccaggaggctctggcccaggaatggtagacatacatgaaggcccaaggcagaaggacctacagagaaaaggggacgagcaaaatctacacattgaagggtaagaaacacgcca

SEQ ID NO: 687410 - DNA, 647 bp, Homo sapiens
actgtattctcagaatgaagaatcagtccatttaccgtgctttgagattctccactttgggaattgtccgtggcttccactgtactatctatttggattctgactgctggcaggaggagaaccaagccagtgccaaagtcttgccagagtggcagagtatatgggagtgtgtgcatgtttgtgagtgttcaggtgacaatgtgctcagttgagagcagccttctcgttgcaattcaatgccaactagaaaagatttagaatattctactgtttattttgtcacctccacaattgaagaagatggaggatgcattgctaaagaccaataaaattgcataggggtgwgtgcgtgtgtgtatgttagttgtagcaaaggagaagtaaagcacattttaccaattgactagttgccttattgaacctggttcattcttcccacgcatagcaagccaatcactgagatgacagagtttgcaaaagaggtagggattattcatgaggcagccaagcaaggaggcaggagaacaggtttcaaatccaccttcctaaagatagggcttagggatatttatgggttacagaagtggggtggtctaagacatagagaaaggtgactggcagtgggaaaaatgaactaatcagttatc

SEQ ID NO: 687411 - DNA, 637 bp, Homo sapiens
tgccacaaagattaaatatcttcaatatccagaaggacaccctacctttggtgaggcctattggtcgcctttccccgtccattgtccctaccaccagctataacgccagatttctatagaggatttcataatgtgtaggagaaatatatattttctgatgtgaaacccatgatctaggtgaggccaattagagcactccactccccctggacaaaagtaaatttagggttagccycatcatctaaacggatgcaatgagtgaagtttgaggacttttctctgtgtttgggagcccagatgctcaccctctttatgactggtgtgatatgtagcagtgaaacagaaaccactgtaactattttattatatacgtgaaaagaatacaagaacaagggaagagcctagtgaattggagatatgagctggagccttaatcaaactactctgaaacttgtaccacttgtacacgtttcagttattagtctctgagtggagccaacgatttctacgattatttaacacaactgagttatgtttgctatttaaaatgtcttatctgtattcacgacctagcctcttgttaggagtcttctccatatttaaactaactgtcccttctgataactctggttcccct

SEQ ID NO: 687412 - DNA, 1688 bp, Homo sapiens
tgggaattatgctttaatttctaggcataagaacaatattattttcttattgggtaccattgcacacatttagaaaaagaagaaatgaatatggaatattgatgtggtcaatgatcttgtctgttattagatcacatttccagtgggcagtgtggaaggaggtattgtgagataataaaaccctgattagtatatgaatataatatttacacaaaagttatcattaaggtgcaatctcagtgtaaattggagactagactgtgccctaccacatgaaaatgggatatgggctgtaagcttttatatttctttgtggcagacaccataatcccattcagcttctgtatatgaaaagtttaagaagtagaattaggtatgaagacattaagtaagtaaagtgacaaagcattattaggatgctcaaagggtgtttctcagtggtgagaaggggatgagtttcagccagggayagagtggaaaagcagacagcccagttataacctacgagtctcttttttttggctagaatggaatatacctcccacaccgtcagaaattcaaatataacttttgattcccctaaagctttactaatagcctactgttgaccagatgacttgccaataacatagtcaattaacacatatttttatgtgttatgcatcgtatactatatttttacaaaaatgtaagctagagaaaagaaaatgttaccaagaatatcccaaggaagggaaaatacacttaccattcgttaagtagaagttgagcatcctaaaggtcttcatcctccttgtcttgacattgagaaggctgagaaggaggaggaagaggaggggttgatcttgctgtctcagaggtggcagaggcagaagaaaatctgcatgtaagtgggcctgcactttcaaacctgtgttgttccgagggtcaactgtgtatatattttcaaagatttactttgaaaatcctttgtaaactatttgtattgttttctatggttttctttttttcttcctttttgttattaatgaattttccatttaaaaataccttttggtggctgggcacggtggctcacacctgtaatcccagcactttgggaagccgaggcgggtggatcatctgaggtcaggagttcgagaccagcctggccaacatggcgaaaccccatctctactaaaaatacaaaaattagctgggtgcggtggcgggcacctgtaatccccagctactcgggaggctgaggcaagagaatcagttgaacttgggaggcagagattgaggtgaagtcgtgccactgcactccagcctgggccacagagtgagactccgtctcaaaaaaaaaaaagtaaagcaattttcagtgagctgtggcatataaaacaggcaatcatttatgaagctggagtaccagcatgaaaggttaagaaaatatagttttaaaaataatggtcccaaatttaccaaggttaataaaaactgtaaaaccacagattcaagaagctcagaaactctatatagaaaaataacaacaaattcaggagaatcacaatcaaatttctaaaaactagcaataaagagaaaagtcttacatgtagctcaaggaaaaggacatattacagaaagggaacagagttatgaatgagagcagacttatcaggaactaagcaagccaacagaaaattggg

SEQ ID NO: 687413 - DNA, 1688 bp, Homo sapiens
tgggaattatgctttaatttctaggcataagaacaatattattttcttattgggtaccattgcacacatttagaaaaagaagaaatgaatatggaatattgatgtggtcaatgatcttgtctgttattagatcacatttccagtgggcagtgtggaaggaggtattgtgagataataaaaccctgattagtatatgaatataatatttacacaaaagttatcattaaggtgcaatctcagtgtaaattggagactagactgtgccctaccacatgaaaatgggatatgggctgtaagcttttatatttctttgtggcagacaccataatcccattcagcttctgtatatgaaaagtttaagaagtagaattaggtatgaagacattaagtaagtaaagtgacaaagcattattaggatgctcaaagggtgtttctcagtggtgagaaggggatgagtttcagccagggatagagtggaaaagcagacagcccagttatarcctacgagtctcttttttttggctagaatggaatatacctcccacaccgtcagaaattcaaatataacttttgattcccctaaagctttactaatagcctactgttgaccagatgacttgccaataacatagtcaattaacacatatttttatgtgttatgcatcgtatactatatttttacaaaaatgtaagctagagaaaagaaaatgttaccaagaatatcccaaggaagggaaaatacacttaccattcgttaagtagaagttgagcatcctaaaggtcttcatcctccttgtcttgacattgagaaggctgagaaggaggaggaagaggaggggttgatcttgctgtctcagaggtggcagaggcagaagaaaatctgcatgtaagtgggcctgcactttcaaacctgtgttgttccgagggtcaactgtgtatatattttcaaagatttactttgaaaatcctttgtaaactatttgtattgttttctatggttttctttttttcttcctttttgttattaatgaattttccatttaaaaataccttttggtggctgggcacggtggctcacacctgtaatcccagcactttgggaagccgaggcgggtggatcatctgaggtcaggagttcgagaccagcctggccaacatggcgaaaccccatctctactaaaaatacaaaaattagctgggtgcggtggcgggcacctgtaatccccagctactcgggaggctgaggcaagagaatcagttgaacttgggaggcagagattgaggtgaagtcgtgccactgcactccagcctgggccacagagtgagactccgtctcaaaaaaaaaaaagtaaagcaattttcagtgagctgtggcatataaaacaggcaatcatttatgaagctggagtaccagcatgaaaggttaagaaaatatagttttaaaaataatggtcccaaatttaccaaggttaataaaaactgtaaaaccacagattcaagaagctcagaaactctatatagaaaaataacaacaaattcaggagaatcacaatcaaatttctaaaaactagcaataaagagaaaagtcttacatgtagctcaaggaaaaggacatattacagaaagggaacagagttatgaatgagagcagacttatcaggaactaagcaagccaacagaaaattggg

SEQ ID NO: 687414 - DNA, 1688 bp, Homo sapiens
tgggaattatgctttaatttctaggcataagaacaatattattttcttattgggtaccattgcacacatttagaaaaagaagaaatgaatatggaatattgatgtggtcaatgatcttgtctgttattagatcacatttccagtgggcagtgtggaaggaggtattgtgagataataaaaccctgattagtatatgaatataatatttacacaaaagttatcattaaggtgcaatctcagtgtaaattggagactagactgtgccctaccacatgaaaatgggatatgggctgtaagcttttatatttctttgtggcagacaccataatcccattcagcttctgtatatgaaaagtttaagaagtagaattaggtatgaagacattaagtaagtaaagtgacaaagcattattaggatgctcaaagggtgtttctcagtggtgagaaggggatgagtttcagccagggatagagtggaaaagcagacagcccagttataacctacgagtctcttttttttggctagaatggaatatacctcccacaccgtcagaaattcaaatataacttttgattcccctaaagctttactaatagcctactgttgaccagatgacttgccaataacatagtcaattaacacatatttttatgtgttatgcatcgtatactatatttttacaaaaatgtaagctagagaaaagaaaatgttaccaagaatatcccaaggaagggaaaatacacttacyattcgttaagtagaagttgagcatcctaaaggtcttcatcctccttgtcttgacattgagaaggctgagaaggaggaggaagaggaggggttgatcttgctgtctcagaggtggcagaggcagaagaaaatctgcatgtaagtgggcctgcactttcaaacctgtgttgttccgagggtcaactgtgtatatattttcaaagatttactttgaaaatcctttgtaaactatttgtattgttttctatggttttctttttttcttcctttttgttattaatgaattttccatttaaaaataccttttggtggctgggcacggtggctcacacctgtaatcccagcactttgggaagccgaggcgggtggatcatctgaggtcaggagttcgagaccagcctggccaacatggcgaaaccccatctctactaaaaatacaaaaattagctgggtgcggtggcgggcacctgtaatccccagctactcgggaggctgaggcaagagaatcagttgaacttgggaggcagagattgaggtgaagtcgtgccactgcactccagcctgggccacagagtgagactccgtctcaaaaaaaaaaaagtaaagcaattttcagtgagctgtggcatataaaacaggcaatcatttatgaagctggagtaccagcatgaaaggttaagaaaatatagttttaaaaataatggtcccaaatttaccaaggttaataaaaactgtaaaaccacagattcaagaagctcagaaactctatatagaaaaataacaacaaattcaggagaatcacaatcaaatttctaaaaactagcaataaagagaaaagtcttacatgtagctcaaggaaaaggacatattacagaaagggaacagagttatgaatgagagcagacttatcaggaactaagcaagccaacagaaaattggg

SEQ ID NO: 687415 - DNA, 682 bp, Homo sapiens
tgtgttaggctgaaactttgagtaagaagaggaataagagttgtaatggcagagatgggagagggcagctctcagagcgcacaatccattctggactcatccacttgacttcattgccagtctggacacacacccgctatgagtttccaggccagattcaggattgagctggaagaagggagaagcttcaaattgaatgggaattggatgttttgatttagattagattggactttatgaaagtaatgtgcttaatcaaatagtaatgatttaaacagcagtatcacacttaagacaaaaacacatgtccctatctctatcccattctgccttttgatttctactttttggaggcactcatgtttaactcaacattttyatctgttgcttctgctatttacttcaaaattcctgttacatcctgatttttcaactttaagcattctctattaactttgtttcatggtaaatgaggatttagatacctttcattaccaccttgcctcttctcttcccaatatacacatgtacgcctatccatcttcccaatataattatattgtgatttatttttattaaatcagtatttcatgtttatattagtatgcctagtaaacaggaagatttgcagctgagcaaataatatttccgtgtactactttttactcttcctggttttaat

SEQ ID NO: 687416 - DNA, 1029 bp, Homo sapiens
  misc_feature 918, 919, 920, 921, 922, 923, 924, 925, 926, 927, 928, 929,930, 931, 932, 933, 934, 935, 936, 937, 938, 939, 940, 941,942, 943, 944, 945, 946, 947, 948, 949, 950, 951, 952, 953,954, 955, 956, 957, 958, 959, 960, 961, 962, 963, 964: n = A,T,C or G
  misc_feature 965, 966, 967, 968, 969, 970, 971, 972, 973, 974, 975, 976,977, 978, 979, 980, 981, 982, 983, 984, 985, 986, 987, 988,989, 990, 991, 992, 993, 994, 995, 996, 997, 998, 999, 1000,1001, 1002, 1003, 1004, 1005, 1006, 1007, 1008, 1009: n = A,T,C or G
  misc_feature 1010, 1011, 1012, 1013, 1014, 1015, 1016, 1017: n = A,T,C or G
tgacagggagggaaatggaaaactggatatttacaataaaaataacaacacgaagaggtttgttctgcaccgatgggccagagatgtaaaatttagatagagatgtggacaatagctacctgagcaatgacagactttgtttttcaccttttgaggtgtgttgatcttctgcatttaaaacaggtctgagaaacttggaaagcaggtcaaggtcttggtttgagcttgcctatgttcgatccttgaagctttagggcataaaatagcatgggagattatatagtttagaaacacagagtgattgtttagcctcctcctgtggactctacatttatttcacatggttataaatatatatattctgagggtttgagattttttgggtatatatgttttgcaaatgtgcaatcactcaaaaaattagtgtttctttattgcgagaattttcatggactttaatgtactaagaagcattattaaatcttccagacagtggtggaacatgcaccacttcttaggctatttgtccaggaacactgttcgaagagcaactcatagggctaaagtgatacagaacatatgttcaggattttgctctaatatgtttatctactgaaatcgcattgctttagggaccctagtctattatattctcacagcatccagtgaggtaagtaggaaataaactttattgaccaagttcttcttgatgcagaaagggaggctgcctgtgtgacagtaagtaagatgtgagttctggcatctgactgtatggcatcacttactaatggtataagcctgggtgtctatacctcatctttttcatctataaataggaataatagttaaaataccttatcttataagtttgttgtgagaatttagtgagatactaactggaaaacacttagcatagtnnnnnnnnnnnnnnnnnnnnnnnnnnnnnnnnnnnnnnnnnnnnnnnnnnnnnnnnnnnnnnnnnnnnnnnnnnnnnnnnnnnnnnnnnnnnnnnnnnnngacttmttaata

SEQ ID NO: 687417 - DNA, 1029 bp, Homo sapiens
  misc_feature 918, 919, 920, 921, 922, 923, 924, 925, 926, 927, 928, 929,930, 931, 932, 933, 934, 935, 936, 937, 938, 939, 940, 941,942, 943, 944, 945, 946, 947, 948, 949, 950, 951, 952, 953,954, 955, 956, 957, 958, 959, 960, 961, 962, 963, 964: n = A,T,C or G
  misc_feature 965, 966, 967, 968, 969, 970, 971, 972, 973, 974, 975, 976,977, 978, 979, 980, 981, 982, 983, 984, 985, 986, 987, 988,989, 990, 991, 992, 993, 994, 995, 996, 997, 998, 999, 1000,1001, 1002, 1003, 1004, 1005, 1006, 1007, 1008, 1009: n = A,T,C or G
  misc_feature 1010, 1011, 1012, 1013, 1014, 1015, 1016, 1017: n = A,T,C or G
tgacagggagggaaatggaaaactggatatttacaataaaaataacaacacgaagaggtttgttctgcaccgatgggccagagatgtaaaatttagatagagatgtggacaatagctacctgagcaatgacagactttgtttttcaccttttgaggtgtgttgatcttctgcatttaaaacaggtctgagaaacttggaaagcaggtcaaggtcttggtttgagcttgcctatgttcgatccttgaagctttagggcataaaatagcatgggagattatatagtttagaaacacagagtgattgtttagcctcctcctgtggactctacatttatttcacatggttataaatatatatattctgagggtttgagattttttgggtatatatgttttgcaaatgtgcaatcactcaaaaaattagtgtttctttattgcgagaattttcatggactttaatgtactaagaagcattattaaatcttccagacagtggtggaacatgcaccacttcttaggctatttgtccaggaacactgttcgaagagcaactcatagggctaaagtgatacagaacatatgttcaggattttgctctaatatgtttatctactgaaatcgcattgctttagggaccctagtctattatattctcacagcatccagtgaggtaagtaggaaataaactttattgaccaagttcttcttgatgcagaaagggaggctgcctgtgtgacagtaagtaagatgtgagttctggcatctgactgtatggcatcacttactaatggtataagcctgggtgtctatacctcatctttttcatctataaataggaataatagttaaaataccttatcttataagtttgttgtgagaatttagtgagatactaactggaaaacacttagcatagtnnnnnnnnnnnnnnnnnnnnnnnnnnnnnnnnnnnnnnnnnnnnnnnnnnnnnnnnnnnnnnnnnnnnnnnnnnnnnnnnnnnnnnnnnnnnnnnnnnnngacttcwtaata

SEQ ID NO: 687418 - DNA, 1109 bp, Homo sapiens
tgaggcaggagaatcatttgaacccgggaggcggagattgcagtgagtagagatcttgccactgcattacagcctgggtgacagagcaagagtccatctcaaaaaaagaaagagaggcaccttctttcccctcctatcacagtcccttagggccccatttaatcattcagtaaatatttattgagcactgagtaggggcctggtactttcctgctaattttatctgctaattttgtgctagccctcataacttagtgagattaactggacaaattttactccctctgttatagagacagggaaactgagactcaatcttatagcagtgtttcaatgacaaattagggtatgtttctgaatatgagattaagaaacatccttcagaataaataagattataactatgctaacaaagcaaaattaaagctctttcttacaatcaggttacactgctgataagtggcagaaagtgaactggacctcagttcttccatctttagtcatgaactctctgtaccacatcacactggaactcacctcccggccctccccatctagaagcctgccaagaacactccccgttcctaccccaccagcatatctgcatcctcatcacccacttcagggcacaccctatatcccaggtctgaaagcaggagccagagaggcttgtccatcccctctcagccacctgcagcactcacacgtgactgcttgagacaccagcactgacagggttttctggcggtgcccttgatcgaccggttcatctggaagtaaaatgtcaaagtggtaaactagttgcctggagcttggctagagtcagtgggatcaggcctttgagagactgsagccaaaaacccatgtcctatcaggtccaccaatcagccacgcaggctcttcttgctcccagaaagtgaccaagacctccccatccctagccaggcccagggcacaaaatgtaccttctgcgaaggggtagaaaggcagggagcccccgcaggcttggtcttcggtcttcaccaccaccaccacataaaagctgttgctggggaagtctttgcgctgcaggatgatgatgataaatatcttcttcatcatcatcatca

SEQ ID NO: 687419 - DNA, 620 bp, Homo sapiens
taggtatgacagccagaagggggtactctactctttcccatccccaagagcaactgggattatggtacaactctcatatatatcaggggactcaaagtcacagggactggaaggccaaagactcagtcgtgtgtaggataggaatgggcagaggaagaagagctcaagtttggaaagctacacagcttatcgcccagccacacctcccacgtggccacatgcatttcctacctgtacggtgatggccgccttcttggtcatcgtctggtacatgccgatgaaggctacgttgttgtccaggtcatagacaggacactgcakaggggcgggagaggcagatggatgggaacctggcctgcccctctctttagcagccctgctgcctgctggggaagagcaaaagggcaggcaactcaccagcacatcctgaatggagatgactgagcaggggaaggccttgttggaggtcaccttgacaattaccgagtccacgccttcagggaactcatacttgaagtactgagggtgcaggaaggaagggagagccccatctcatgaggatgctctcttggcccctctagaagggaatagtcccctataagcgaggacccagaatcctc

SEQ ID NO: 687420 - DNA, 606 bp, Homo sapiens
tgcacattgcctggtgtggctggcggtggttcgtggtcccgtctggggccggcatgaggttgcagccattcagttcctcacagagcctcatctcagggcacttcctctcttttgggcagcaggaaatccagctgtggcttcacacaggtctgcatgcatgtctggctggtgccccttgcttgggtactgggaccctgggggtgagggcagggccgtcagtgtatggctgtaatagggctcataggtctctgtcccgagacacagcgggaacagcagcgtgttgcaacccagtacgtgtgcactcagcacacagaacacacacgtctgcacctgtgcactcagcacatggatcacgcacactcagcacacagaacacacacggaacacgcacatctgcatccgtgcatgtgcactcagcacatggaacacgcacactcatctgcacccrtgcacatgcagttagcacacggatcttgcacactcatctgcacccgtgcacatgcactcagcacacggatcacgcacactcagcacacagaacacgcacatctgcagccatgcatgtgcactcagcacatggaacacgcacactcatctgcacccgtg

SEQ ID NO: 687421 - DNA, 606 bp, Homo sapiens
tgcacattgcctggtgtggctggcggtggttcgtggtcccgtctggggccggcatgaggttgcagccattcagttcctcacagagcctcatctcagggcacttcctctcttttgggcagcaggaaatccagctgtggcttcacacaggtctgcatgcatgtctggctggtgccccttgcttgggtactgggaccctgggggtgagggcagggccgtcagtgtatggctgtaatagggctcataggtctctgtcccgagacacagcgggaacagcagcgtgttgcaacccagtacgtgtgcactcagcacacagaacacacacgtctgcacctgtgcactcagcacatggatcacgcacactcagcacacagaacacacacggaacacgcacatctgcatccgtgcatgtgcactcagcacatggaacacgcacactcatctgcacccatgcacatgcagttagcacacggatcttgcacactcatctgcacccgtgcacatgcactcagcacacggatcacgcacactcagcacacagaacacgcacatctgcagccrtgcatgtgcactcagcacatggaacacgcacactcatctgcacccgtg

SEQ ID NO: 687422 - DNA, 1347 bp, Homo sapiens
tgacaaattagaaatttggtagaggaaaacaaaggccaagatggagattctacctataataagagttgcagagaaattaagaaaaaaaactttaaatctcaaagattgagattccatctgtaatcagagttgtggagaaattaagaaaaaaagtttaaaaagcacctttgcaaatcaatgtactaactcatgaattaataataacacagtattctttactcacaacaactgtaaatagctaaatgtttgtaattgtatttgaataacaagaaggattaatgaatttaagtaacattcaaggcatacaactattcatcattcattcctttatttttcattcttcaacaaattattgaatatctaccatatactagacattattaatttatgcaaggataattttgttttcttgctgttgttgtttagagaatgttgttgtttagaaaatgggtacctatgctataagtggaatttaatacagagatcgacactggaaattgtgttgagtgtgccagtttgattagggacttgagatggatggatcactggtcccagttcttcactcttccctgcatcactccattgctgtggcctcatcctgggtgtagagtattcctacctcttgactctggacgtggccaagtgacttcctttgttaaatagcacaggggtggatgtgacagtgtgccaggtaggaatctaggtctcaagcggccttgtgtgttttcatcctctctctcccttgtgcttctgctattgccttgaaaagagttttctctgtcatttctgtcccttcagcctgggccccaggataagcctacatggagtagagtcacctcatkcaggcatagccaaacctgcaggttgaggcaaagtaactcagttgaggtcagcctagatcatccaatactcatctgagattcagatgcatgtgaataagtgattgctatttttggccactgagtttgcatgagttttgtttgattcagtgtttcagtggccatctcttagcctaatacttttgacctcttctcatcctatcacttcctcctccctgttagtgaggaacttcctgattggtgagtttggaagaagaaatcggagatgcatagtcaagccattccttcttccattatgcttggatataagatcccttcaggactatatgttctgctctacttcttgttgtcataagttctacaggatgaaacacacacatacatacatgtacacacatgaaacgtgtagagagacctgttccaggtaggggtagtcacattgagtgggtaaattccttaaatttaagcatcagtattacaaagcctagaggaacacaaatataagcca

SEQ ID NO: 687423 - DNA, 2622 bp, Homo sapiens
  misc_feature 311, 312, 313, 314, 315, 316, 317, 318, 319, 320, 321, 322,323, 324, 325, 326, 327, 328, 329, 330, 331, 332, 333, 334,335, 336, 337, 338, 339, 340, 341, 342, 343, 344, 345, 346,347, 348, 349, 350, 351, 352, 353, 354, 355, 356, 357: n = A,T,C or G
  misc_feature 358, 359, 360, 361, 362, 363, 364, 365, 366, 367, 368, 369,370, 371, 372, 373, 374, 375, 376, 377, 378, 379, 380, 381,382, 383, 384, 385, 386, 387, 388, 389, 390, 391, 392, 393,394, 395, 396, 397, 398, 399, 400, 401, 402, 403, 404: n = A,T,C or G
  misc_feature 405, 406, 407, 408, 409, 410: n = A,T,C or G
ccttgaatagtggaaactggaatgcatttggaagagaagaacggtgctcttctttcttccccgggctcgccgtttttacactggttcctgaatggacctcaggcgccctgggacttgtgctcttgctggaacccacataacgccggaagcggacagaccgacttgcctgtttcacggtgcccgcttcccatgagtccaaacggaaaattttcccacgggcatgtaagtcatctggaagtaagctgtattgataataaaggaaagcaaacacaggagtgtgtgtattcaactgaaataaattcagaaagccnnnnnnnnnnnnnnnnnnnnnnnnnnnnnnnnnnnnnnnnnnnnnnnnnnnnnnnnnnnnnnnnnnnnnnnnnnnnnnnnnnnnnnnnnnnnnnnnnnnncaatgcgtaactggaaatggaggcaacatcgcccgatcctgaacgatcgatgcgagaatccaggatatgcacggcttatttggcccttttcccactgaaacaagggccagtattaaaaatggcacgctatcctctgtttcactccctgcttttaaacgtctccgatgtttctccctgagacagggcctcacttccgtcacccgggcttttccacggtataattttccttgtttgcttttgtccaaattagaactttttatttcacctctaggaaacgttcatccattatcacatacgtatggaaatattatcacacatgctgtgagatacgttgtttttattttcatcaattctttaataaacaaaaggttatagctgggataccttctgagttctcaagttttttgtttcgtgttttcttaaactgccgtcgcacgtccgaaaccgctcactatgcagtgtcatgaccgtctctcttttctggcaaacataaatttggggattgtcatcaattagtctctcggggattgcatgatttccccaaaggctttcacagtctactttgtgcactgagtatctcttcaaacttcagtgcatgtttctaccatttgatgctttcttatttggcaatctagcttccacaagagcatttcacgcaaagacttgtcttgttctccactggcaggtaatttcactcggatagagaatcaataggctcaacgtggaaaggttatcgctggaaggtctgtttaattccacggatctctcctttctcattagggaagaaaatacgctgtgctaaatactatacttcattgactattctcaggtcagaaagcgcactttcgacttcttgtccttccgtcgctgagaggatgatggcagctgccaaaagtacatacttggaagttcatcccagcacaaacacacacacacacacgccccccccccacacacacaaacacactcacacacacacacgcacacggtttcctaggtaaagatttcttccctgccattgctttacctaaaataaggcaactgtgaggccactgtcccaacccggttacgctcctattatatgtgcctatcatcctgaggagtaatttgattcaggtgttctggaagtcatgctgtgggctgtgtctgttgaattcccagcgatgccaggggacacaccctgtgactccttcctgaattgagtgctgatatttgattggcttatcgcgcacctgatgagtgggtggggtgttcgcggttggtgggggtgacttacagaagggctgatgcggccagagagctcgtcatttgaagactctctcggaagggatagcgtctttctgcaacctgcggtcccagcagaaaaaccttgtgatccttgttccagtcgacatggaggacgactcactctacttgggaggtgagtggcagttcaaccacttttcaaaactcacatcttctcggcccgatgcagcttttgctgaaatccagcggacttctctccctgagaagtcaccactctcatgtgagacccgtgtcgacctctgtgatgatttggctcctgtggcaagacagcttgctcccagggagaagcttcctctgagtagcaggagacctgctgcggtgggggctgggctccagaatatgggaaatacctgctacgtgaacgcttccttgcagtgcctgacatacacaccgccccttgccaactacatgctgtcccgggagcactctcaaacgtgtcatcgtcacaagggctgcatgctctgtactatgcaagctcacatcacacrggccctccacaatcctggccacgtcatccagccctcacaggcattggctgctggcttccatagaggcaagcaggaagatgcccatgaatttctcatgttcactgtggatgccatgaaaaaggcatgccttcccgggcacaagcaggtagatcatcactctaaggacaccaccctcatccaccaaatatttggaggctactggagatctcaaatcaagtgtctccactgccacggcatttcagacacttttgacccttacctggacatcgccctggatatccaggcagctcagagtgtccagcaagctttggaacagttggtgaagcccgaagaactcaatggagagaatgcctatcattgtggtgtttgtctccagagggcgccggcctccaagacgttaactttacacacctctgcca

SEQ ID NO: 687424 - DNA, 1051 bp, Homo sapiens
ccagaggttcggaagactcacgaccccaaaacttgatgtttcccatatgcgggctcatcctgagatgtagccatcactatccagttgtccctgttgtagagacagaaagttgggctcctcattagtttatgtaggattgacggtgttcgtgtttgtgtgggtgtgtgtgtgtttgcgtgcgcgcttctgggtgtagttatgtgtgtgtctgtgtgtgtgcgtgtgtgtgtgcacccctacgtgtgggtcggtacttccactgagatcactggcacacaagcagagccctcttgctgtgtttgttcttccctttggatctcctggccctccctcgcagggaagcgagtgtgccagtgttcatggactcctgatgtgtcggggtcgtcgaagagaggtttagcagggagctttgctgttcaggatgatggttcttcatcccacacttgtattttgattgatgaatcacaagtacgtcgggaggcagggtaccttcgacttttctgacgttgaactcaggcttcgttttgttttgctcttgaaggaatttccagtggtctaaggtgctttcctgagtggctctttccaccaagtgctcgtccaactcgggggcctggaggcaggggtggtctctcttgagctctccttgcgttgctcgcctgtctgtgtcttctgcgccaagggctcttggttccctgcctcttgacacactctcactgtgtctttcccattcactcttctggatgtaaaagaggacgtaggcctgttgactcaggacagaagtgatgctagaggcggtgacctcggcatcatccattttataccactggccttcttgagctttgacataagagaagtaatgtccgttgtgacaactccacccagcgtggaccagcacagcatagaggacatagacgagaggtcctgtgttcgkctgagacatgtatggctgcatgtcaaggcactcaggatattgcacattcttggcaatcttgttgcctgtgacatcggagaatctcttcaatacaaggatgaggaccttggcagaggtgtg

SEQ ID NO: 687425 - DNA, 1263 bp, Homo sapiens
cacacacacacccacacaaacacgaacaccgtcaatcctacataaactaatgaggagcccaagtttctgtctctrcaacagggacaactggatagtgatggctacatctcaggatgagcccgcatatgggaaacatcaagttttggggtcgtgagtcttccgaacctctggtgggactgtctgagtgtttgtgttcatgataggtgacattcagtgtgtatttctgaatatgacctaccgacgtgtaggtttgcgtgtgaggtaattgcaggggactcggtttcgtattttctcttggggtgtgtttcattcgtcagttgttggtcggcatgagaaggtgaaaggtggctcatgtgggacatccgtggatcattctcgccaccttgaatagtggaaactggaatgcatttggaagagaagaacggtgctcttctttcttccccgggctcgccgtttttacactggttcctgaatggacctcaggcgccctgggacttgtgctcttgctggaacccacataacgccggaagcggacagaccgacttgcctgtttcacggtgcccgcttcccatgagtcgaaacggaaaattttcccacgggcatgtaagtcatctggaagtaagctgtattgataataaaggaaagcaaacacaggagtgtgtgtattcaactgaaataaattcagaaagccctgcaatcaatctcactgggtgtgtttaaaaatggcatttggggaatttctgggtcatttgtccagctgcgaaagctgcatctctgaagcacagtccctgtcccgcagtgagacttattgatccgacgtggtgtttccgtggaaatgattgtgggaaatggccccttccttttctctatttgctgattagacttcatggtccctttctcgtcaggtacagtgatcaaagttgaccaaccccagaggaaagctgcccagggcacaactcagggctccgtagaaccacagaatcttgggcgcaaccctgctcaagcacccaaatgtgcatacgaacagggtctccgtgtgacgtgtgtgaaaactacagtgtgatgagcatgactggcagacagcttatcgattgggctcccctcaaaatcggttatgagcattcaagcacaccgatgcccaggtcccggctgcaggaataagaccctccagggtcttgtgtgaagcctcggcatctgcattgctcatgcttctggggatcattctcctgaaaatggtggctcctttctccctgtggagcatct

SEQ ID NO: 687426 - DNA, 1263 bp, Homo sapiens
cacacacacacccacacaaacacgaacaccgtcaatcctacataaactaatgaggagcccaagtttctgtctctacaacagggacaactggatagtgatggctacatctcaggatgagcccgcatatgggaaacatcaagttttggggtcgtgagtcttccgaacctctggtgggactgtctgagtgtttgtgttcatgataggygacattcagtgtgtatttctgaatatgacctaccgacgtgtaggtttgcgtgtgaggtaattgcaggggactcggtttcgtattttctcttggggtgtgtttcattcgtcagttgttggtcggcatgagaaggtgaaaggtggctcatgtgggacatccgtggatcattctcgccaccttgaatagtggaaactggaatgcatttggaagagaagaacggtgctcttctttcttccccgggctcgccgtttttacactggttcctgaatggacctcaggcgccctgggacttgtgctcttgctggaacccacataacgccggaagcggacagaccgacttgcctgtttcacggtgcccgcttcccatgagtcgaaacggaaaattttcccacgggcatgtaagtcatctggaagtaagctgtattgataataaaggaaagcaaacacaggagtgtgtgtattcaactgaaataaattcagaaagccctgcaatcaatctcactgggtgtgtttaaaaatggcatttggggaatttctgggtcatttgtccagctgcgaaagctgcatctctgaagcacagtccctgtcccgcagtgagacttattgatccgacgtggtgtttccgtggaaatgattgtgggaaatggccccttccttttctctatttgctgattagacttcatggtccctttctcgtcaggtacagtgatcaaagttgaccaaccccagaggaaagctgcccagggcacaactcagggctccgtagaaccacagaatcttgggcgcaaccctgctcaagcacccaaatgtgcatacgaacagggtctccgtgtgacgtgtgtgaaaactacagtgtgatgagcatgactggcagacagcttatcgattgggctcccctcaaaatcggttatgagcattcaagcacaccgatgcccaggtcccggctgcaggaataagaccctccagggtcttgtgtgaagcctcggcatctgcattgctcatgcttctggggatcattctcctgaaaatggtggctcctttctccctgtggagcatct

SEQ ID NO: 687427 - DNA, 2638 bp, Homo sapiens
acgcgtaggtttgcgtgtgaggtaattgcaggggactcggtttcgtattttctcttggggtgtgtttcattcgtcagttgttggtcggcatgagaaggtgaaaggtggctcatgtgggacatccgtggatcattctcgccaccttgaatagtggaaactggaatgcatttggaagagaagaacggtgctcttctttcttccccgggctcgccgtttttacactggttcctgaatggacctcaggcgccctgggacttgtgctcttgctggaacccacataacgccggaagcggacagaccgacttgcctgtttcacggtgcccgcttcccatgagtcgaaacggaaaattttcccacgggcatgtaagtcatctggaagtaagctgtattgataataaaggaaagcaaacacaggagtgtgtgtattcaactgaaataaattcagaaagccctgaaatcaatctcactgggtgtgtttaaaaatggcatttggggaatttctgggtcatttgtccagctgcgaaagctgcatctctgaagcacagtccctgtcccgcagtgagacttattgatccgacgtggtgtttccgtggaaatgattgtgggaaatggccccttccttttctctatttgctgattagacttcatggtccctttctcgtcaggtacagtgatcaaagttgaccaaccccagaggaaagctgcccagggcacaactcagggctccgtagaaccacagaatcttgggcgcaaccctgctcaagcacccaaatgtgcatacgaacagggtctccgtgtgacgtgtgtgaaaactacagtgtgatgagcatgactggcagacagcttatcgattgggctcccctcaaaatcggttatgagcattcaagcacaccgatgcccaggtcccggctgcaggaataagaccctccagggtcttgtgtgaagcctcggcatctgcattgctcatgcttctggggatcattctcctgaaaatggtggctcctttctccctgtggagcatctttctaagcagygctcttttcttcccccaggacactttacatccggcacaggaagccttctgatggagcacacctggcccatgaaaagacaagggaaagaaacggggccaaaggtcacagtcctctcatcccatcatcctccttaaaatcatcctaatttcatgggccctgaagccagggctgtttctttacacctagaggccttggcgccgggcctcaattccgccctgttccttaccgtctaagacatgttgggaaaatccctagagccaggatcttcattcctgctaagccagacagccggaagacacacccaaattctgtccctcttacttcagggaacatgtccactttcggcagcattacaattttggcaccaaatgtgctaactgcaattccaccatacaatgcgtaactggaaatggaggcaacatctccgatcctgaacgatcgatgcgagaatccaggatatgcacggcttattttggccttttcccactgaaacaagggccagtattaaaaatggcacgctatcctctgtttcactccctgcttttaaacgtctccgatgtttctccctgagacagggcctcacttccgtcagccgggcttttctacggtataattttccttgtttgcttttgtccaaattagaactttttatttcacctctaggaaacgttgatccattatcacatacgtatggaaatattatcacacatgctgtgagatacgttgtttttattttcatcaattctttaataaacaaacggttatagctgggataccttctgagttctcaagttttttgtttcgtgttttcttaaactgccgtcgcacgtccgaaaccgctcactatgcagtgtcatgaccgtctctcttttctggcaaacataaatttggggattgtcatcaattagtctctcggggattgcatgatttccccaaaggctttcacagtctactttgtgcactgagtatctcttcaaacttcagtgcatgtttctaccatttgatgctttattatttggcaatctagcttccacaagagcatttcatgcaaagacttgtcttcttctccactggcaggtaatttcacttggacagagaatcaataggctcaacgtggaaaggttatcgctggaaggtctgtttgattccacggatctctcctttctcattagggaagaaaatacgctgtgctaaatactatacttcattgactattctcaggtcagaaagcgcactttcgacttcttgtccttccgtcgctgagaggatgatggcagctgccaaaagtacatacttggaggttcatcccagcacaaacacacacacacacgcgccccccccacacacacacacacgaacacaatcacacacacacactcacacggtttcctacgtaaagatttcttccctgccattgctttacctaaaataaggcaactgtgtggccactgtcccaacccggttacactcctattatatgtgcctatcatcctgaggagtaatttgattcaggtgttctggaagtcatgctgtgggctgtgtctgttgaatacccagcgatgcaaggggacacaccctgtgactccttcctgaattgagtgctg

SEQ ID NO: 687428 - DNA, 1325 bp, Homo sapiens
cattgactattctcaggtcagaaagcgcactttcgacttcttgtctttccgtcgctgagaggatgatggcagytgccaaaagtacatacttggaagttcatcccagcacaaacacacacacacacgcgccccccccacacacacacagacgaacacaatcacacacacacactcacacggtttcctacgtaaagatttcttccctgccattgctttacctaaaataaggcaactgtgtggccactgtcccaacccggttacactcctattatatgtgcctatcatcctgaggagtaatttgattcaggtgttctggaagtcatgctgtgggctgtgtctgttgaattcccagcgatgcaaggggacacaccctgtgactccttcctgaattgagtgctgatatttgattggcttatcgcgcacctgatgagtgggtggggtgttcgcggttggtgggggtgacttacagaagggctgatgcggccagagagctcgtcatttgaagactctctcggaagggatagcgtctttctgcaacctgcggtcccagcagacaaaccttgtgatccttgttccagtcgacatggaggacgactcactctacttgggaggtgagtggcagttcaaccacttttcaaaactcacatcttctcggcccgatgcagcttttgctgaaatccagcggacttctctccctgagaagtcaccactctcatgtgagacccgtgtcgacctctgtgatgatttggctcctgtggcaagacagcttgctcccagggagaagcttcctctgagtagcaggagacctgctgcggtgggggctgggctccagaatatgggaaatacctgctacgtgaacgcttccttgcagtgcctgacatacacaccgccccttgccaactacatgctgtcccgggagcactctcaaacgtgtcatcgtcacaagggctgcatgctctgtacgatgcaagctcacatcacacgggccctccacaatcctggccacgtcatccagccctcacaggcattggctgctggcttccatagaggcaagcaggaagatgcccatgaatttctcatgttcactgtggatgccatgaaaaaggcatgccttcccgggcacaagcaggtggatcatcactctaaggacaccaccctcatccaccaaatatttggaggctactggagatctcaaatcaagtgtctccactgccacggcatttcagacacttttgacccttacctggacatcgccctggatatccaggcagctcagagtgtccagcaagctttggaacagttggtgaagcccgaagaactcaatg

SEQ ID NO: 687429 - DNA, 1325 bp, Homo sapiens
cattgactattctcaggtcagaaagcgcactttcgacttcttgtctttccgtcgctgagaggatgatggcagttgccaaaagtacatacttggaagttcatcccagcamaaacacacacacacacgcgccccccccacacacacacagacgaacacaatcacacacacacactcacacggtttcctacgtaaagatttcttccctgccattgctttacctaaaataaggcaactgtgtggccactgtcccaacccggttacactcctattatatgtgcctatcatcctgaggagtaatttgattcaggtgttctggaagtcatgctgtgggctgtgtctgttgaattcccagcgatgcaaggggacacaccctgtgactccttcctgaattgagtgctgatatttgattggcttatcgcgcacctgatgagtgggtggggtgttcgcggttggtgggggtgacttacagaagggctgatgcggccagagagctcgtcatttgaagactctctcggaagggatagcgtctttctgcaacctgcggtcccagcagacaaaccttgtgatccttgttccagtcgacatggaggacgactcactctacttgggaggtgagtggcagttcaaccacttttcaaaactcacatcttctcggcccgatgcagcttttgctgaaatccagcggacttctctccctgagaagtcaccactctcatgtgagacccgtgtcgacctctgtgatgatttggctcctgtggcaagacagcttgctcccagggagaagcttcctctgagtagcaggagacctgctgcggtgggggctgggctccagaatatgggaaatacctgctacgtgaacgcttccttgcagtgcctgacatacacaccgccccttgccaactacatgctgtcccgggagcactctcaaacgtgtcatcgtcacaagggctgcatgctctgtacgatgcaagctcacatcacacgggccctccacaatcctggccacgtcatccagccctcacaggcattggctgctggcttccatagaggcaagcaggaagatgcccatgaatttctcatgttcactgtggatgccatgaaaaaggcatgccttcccgggcacaagcaggtggatcatcactctaaggacaccaccctcatccaccaaatatttggaggctactggagatctcaaatcaagtgtctccactgccacggcatttcagacacttttgacccttacctggacatcgccctggatatccaggcagctcagagtgtccagcaagctttggaacagttggtgaagcccgaagaactcaatg

SEQ ID NO: 687430 - DNA, 1325 bp, Homo sapiens
cattgactattctcaggtcagaaagcgcactttcgacttcttgtctttccgtcgctgagaggatgatggcagttgccaaaagtacatacttggaagttcatcccagcacaaacacacacacacacgcgcccmccccacacacacacagacgaacacaatcacacacacacactcacacggtttcctacgtaaagatttcttccctgccattgctttacctaaaataaggcaactgtgtggccactgtcccaacccggttacactcctattatatgtgcctatcatcctgaggagtaatttgattcaggtgttctggaagtcatgctgtgggctgtgtctgttgaattcccagcgatgcaaggggacacaccctgtgactccttcctgaattgagtgctgatatttgattggcttatcgcgcacctgatgagtgggtggggtgttcgcggttggtgggggtgacttacagaagggctgatgcggccagagagctcgtcatttgaagactctctcggaagggatagcgtctttctgcaacctgcggtcccagcagacaaaccttgtgatccttgttccagtcgacatggaggacgactcactctacttgggaggtgagtggcagttcaaccacttttcaaaactcacatcttctcggcccgatgcagcttttgctgaaatccagcggacttctctccctgagaagtcaccactctcatgtgagacccgtgtcgacctctgtgatgatttggctcctgtggcaagacagcttgctcccagggagaagcttcctctgagtagcaggagacctgctgcggtgggggctgggctccagaatatgggaaatacctgctacgtgaacgcttccttgcagtgcctgacatacacaccgccccttgccaactacatgctgtcccgggagcactctcaaacgtgtcatcgtcacaagggctgcatgctctgtacgatgcaagctcacatcacacgggccctccacaatcctggccacgtcatccagccctcacaggcattggctgctggcttccatagaggcaagcaggaagatgcccatgaatttctcatgttcactgtggatgccatgaaaaaggcatgccttcccgggcacaagcaggtggatcatcactctaaggacaccaccctcatccaccaaatatttggaggctactggagatctcaaatcaagtgtctccactgccacggcatttcagacacttttgacccttacctggacatcgccctggatatccaggcagctcagagtgtccagcaagctttggaacagttggtgaagcccgaagaactcaatg

SEQ ID NO: 687431 - DNA, 1325 bp, Homo sapiens
cattgactattctcaggtcagaaagcgcactttcgacttcttgtctttccgtcgctgagaggatgatggcagttgccaaaagtacatacttggaagttcatcccagcacaaacacacacacacacgcgccccccccmcacacacacagacgaacacaatcacacacacacactcacacggtttcctacgtaaagatttcttccctgccattgctttacctaaaataaggcaactgtgtggccactgtcccaacccggttacactcctattatatgtgcctatcatcctgaggagtaatttgattcaggtgttctggaagtcatgctgtgggctgtgtctgttgaattcccagcgatgcaaggggacacaccctgtgactccttcctgaattgagtgctgatatttgattggcttatcgcgcacctgatgagtgggtggggtgttcgcggttggtgggggtgacttacagaagggctgatgcggccagagagctcgtcatttgaagactctctcggaagggatagcgtctttctgcaacctgcggtcccagcagacaaaccttgtgatccttgttccagtcgacatggaggacgactcactctacttgggaggtgagtggcagttcaaccacttttcaaaactcacatcttctcggcccgatgcagcttttgctgaaatccagcggacttctctccctgagaagtcaccactctcatgtgagacccgtgtcgacctctgtgatgatttggctcctgtggcaagacagcttgctcccagggagaagcttcctctgagtagcaggagacctgctgcggtgggggctgggctccagaatatgggaaatacctgctacgtgaacgcttccttgcagtgcctgacatacacaccgccccttgccaactacatgctgtcccgggagcactctcaaacgtgtcatcgtcacaagggctgcatgctctgtacgatgcaagctcacatcacacgggccctccacaatcctggccacgtcatccagccctcacaggcattggctgctggcttccatagaggcaagcaggaagatgcccatgaatttctcatgttcactgtggatgccatgaaaaaggcatgccttcccgggcacaagcaggtggatcatcactctaaggacaccaccctcatccaccaaatatttggaggctactggagatctcaaatcaagtgtctccactgccacggcatttcagacacttttgacccttacctggacatcgccctggatatccaggcagctcagagtgtccagcaagctttggaacagttggtgaagcccgaagaactcaatg

SEQ ID NO: 687432 - DNA, 1325 bp, Homo sapiens
cattgactattctcaggtcagaaagcgcactttcgacttcttgtctttccgtcgctgagaggatgatggcagttgccaaaagtacatacttggaagttcatcccagcacaaacacacacacacacgcgccccccccacacacacacasacgaacacaatcacacacacacactcacacggtttcctacgtaaagatttcttccctgccattgctttacctaaaataaggcaactgtgtggccactgtcccaacccggttacactcctattatatgtgcctatcatcctgaggagtaatttgattcaggtgttctggaagtcatgctgtgggctgtgtctgttgaattcccagcgatgcaaggggacacaccctgtgactccttcctgaattgagtgctgatatttgattggcttatcgcgcacctgatgagtgggtggggtgttcgcggttggtgggggtgacttacagaagggctgatgcggccagagagctcgtcatttgaagactctctcggaagggatagcgtctttctgcaacctgcggtcccagcagacaaaccttgtgatccttgttccagtcgacatggaggacgactcactctacttgggaggtgagtggcagttcaaccacttttcaaaactcacatcttctcggcccgatgcagcttttgctgaaatccagcggacttctctccctgagaagtcaccactctcatgtgagacccgtgtcgacctctgtgatgatttggctcctgtggcaagacagcttgctcccagggagaagcttcctctgagtagcaggagacctgctgcggtgggggctgggctccagaatatgggaaatacctgctacgtgaacgcttccttgcagtgcctgacatacacaccgccccttgccaactacatgctgtcccgggagcactctcaaacgtgtcatcgtcacaagggctgcatgctctgtacgatgcaagctcacatcacacgggccctccacaatcctggccacgtcatccagccctcacaggcattggctgctggcttccatagaggcaagcaggaagatgcccatgaatttctcatgttcactgtggatgccatgaaaaaggcatgccttcccgggcacaagcaggtggatcatcactctaaggacaccaccctcatccaccaaatatttggaggctactggagatctcaaatcaagtgtctccactgccacggcatttcagacacttttgacccttacctggacatcgccctggatatccaggcagctcagagtgtccagcaagctttggaacagttggtgaagcccgaagaactcaatg

SEQ ID NO: 687433 - DNA, 744 bp, Homo sapiens
tggcatattttttcaaaagaattttgcaatccaaggaactattgcttaatcaggcaccctaatgctggatttatttttgcactttaaaaattcttccttagacagtgtcacaaagatgctaccttggattcctacaaaataaataagaaagagagtgagagaaagaaataaaactttttttttttcaagaaaagaaaagatctccttacttcctagaggactgcagaatgagatctggattgaaaaataaagcaagrgaagcatcagtaatgaattccaaatccaggagttagatttctttaaacagaaaaaaaaattgtatattttatgcttgaatcttgtgctaaaatgttcagttgcctaaatgcataactctgcatgagaaaagaattgggaagcatctgaaaggaaacatctgcctgacttacggtctgttatctatgctaaaaaatctaccactgtgttatctaagatctgaacagatttgcaactataaactccaaagttggatgtattaaaatgaaattgtcctgttttatatgtttaggacaaaatttggttggatttattgaaatgtggtttttactatctgtttaaggtggtatgatattaggtagaggtaaatatcttaagggaagataaaatgaaataaagtgaccttctccaataagttttttaaataagatcttaaaagtgaagtcataaagatgagaagattatcaatagttagaaaagaatgataag

SEQ ID NO: 687434 - DNA, 744 bp, Homo sapiens
tggcatattttttcaaaagaattttgcaatccaaggaactattgcttaatcaggcaccctaatgctggatttatttttgcactttaaaaattcttccttagacagtgtcacaaagatgctaccttggattcctacaaaataaataagaaagagagtgagagaaagaaataaaactttttttttttcaagaaaagaaaagatctccttacttcctagaggactgcagaatgagatctggattgaaaaataaagcaagggaagcatcagtaatgaattccaaatccaggagttagatttctttaaacagaaaaaaaaattgtatattttatgcttgaatcttgtgctaaaatgttcagttgcctaaatgcataactctgcatgagaaaagaattgggaagcatctgaaaggaaacatctgcctgacttacggtctgttayctatgctaaaaaatctaccactgtgttatctaagatctgaacagatttgcaactataaactccaaagttggatgtattaaaatgaaattgtcctgttttatatgtttaggacaaaatttggttggatttattgaaatgtggtttttactatctgtttaaggtggtatgatattaggtagaggtaaatatcttaagggaagataaaatgaaataaagtgaccttctccaataagttttttaaataagatcttaaaagtgaagtcataaagatgagaagattatcaatagttagaaaagaatgataag

SEQ ID NO: 687435 - DNA, 661 bp, Homo sapiens
taactctgtcacccaggctggagtgcagtgacgcgatcatatcacattgctgcctcaaattcctgggctcacatgatcccactgcctcaacctcccaagtagctggttctacaggcatattccaccatgcctggctaatttttaaattttttgtagagacagggtcttgccatcttacccaggctgatcttgaactcctgggctcaagtgatcctccctcctcagcttcccaaaatgttggattacaggtatgagccaccatactcagcccagtagtgtactttaaagtcatgtagtgtggtgcttccagctttattctttctgcttargattactttggctatttagcctcttttttgtgttacatatgaatcttaggattttttttctatctctgtgaaaaatgacattggtattttgatagggattgcactgaatctctagattgctttgagtagtaaaagtattttttaaatgtaaaacataaaatgagtggttattattactatatgtattccttaattttagagggagttccttgatttgcaataccaatcagcactttacttgtgaatgtttaatattcattttgtaaacttctaaatttcaggtcctctcttccagtctgaattcacttgctgacgggattaacctcatttct

SEQ ID NO: 687436 - DNA, 661 bp, Homo sapiens
taactctgtcacccaggctggagtgcagtgacgcgatcatatcacattgctgcctcaaattcctgggctcacatgatcccactgcctcaacctcccaagtagctggttctacaggcatattccaccatgcctggctaatttttaaattttttgtagagacagggtcttgccatcttacccaggctgatcttgaactcctgggctcaagtgatcctccctcctcagcttcccaaaatgttggattacaggtatgagccaccatactcagcccagtagtgtactttaaagtcatgtagtgtggtgcttccagctttattctttctgcttaggattactttggctatttagcctcttttttgtgttacatatgaatcttargattttttttctatctctgtgaaaaatgacattggtattttgatagggattgcactgaatctctagattgctttgagtagtaaaagtattttttaaatgtaaaacataaaatgagtggttattattactatatgtattccttaattttagagggagttccttgatttgcaataccaatcagcactttacttgtgaatgtttaatattcattttgtaaacttctaaatttcaggtcctctcttccagtctgaattcacttgctgacgggattaacctcatttct

SEQ ID NO: 687437 - DNA, 655 bp, Homo sapiens
tggatgaagaaggcacttttattcttcgctccaaagagtcttccctatgcttcagaccttccccaaccaactttagagactcctatctcaccccccacccgcatccccccaaaaacccccagctggagctactatctttgtggcagattattttctaataatggctgcaacaatayttcccatcctacatgctcttcttttgtttttatttttctgtttagagacagggtcttgctatgctgcccaggctggagtgcagtgtctattcacaggcaagatcatagggcactgcaggcaggaactcctgggctctcagcctctggggtagctgggactccgagcatgagccagtgtgcctggcttctacttactcttcttacaaagtgattctgacatgttgctccagtgtggtctgtttcctccccttgaatctgtgatgatggtgaaagtaatgccatatgacttcaggagctagctcataaaaggtgatgcaacttctgcttgggtctctcaggttgcctgctctgggaaaccatgctgtgaggcagcccaaggtagagaccacacggagaagatgccaggtggaatattccagtggacagcccccagtgaggtgtcagccaacagccatttccaggcatgtaggtaaaacaac

SEQ ID NO: 687438 - DNA, 655 bp, Homo sapiens
tggatgaagaaggcacttttattcttcgctccaaagagtcttccctatgcttcagaccttccccaaccaactttagagactcctatctcaccccccacccgcatccccccaaaaacccccagctggagctactatctttgtggcagattattttctaataatggctgcaacaatatttcccatcctacatgctcttcttttgtttttatttttctgtttagagacagggtcttgctatgctgccyaggctggagtgcagtgtctattcacaggcaagatcatagggcactgcaggcaggaactcctgggctctcagcctctggggtagctgggactccgagcatgagccagtgtgcctggcttctacttactcttcttacaaagtgattctgacatgttgctccagtgtggtctgtttcctccccttgaatctgtgatgatggtgaaagtaatgccatatgacttcaggagctagctcataaaaggtgatgcaacttctgcttgggtctctcaggttgcctgctctgggaaaccatgctgtgaggcagcccaaggtagagaccacacggagaagatgccaggtggaatattccagtggacagcccccagtgaggtgtcagccaacagccatttccaggcatgtaggtaaaacaac

SEQ ID NO: 687439 - DNA, 1108 bp, Homo sapiens
attttaaatttatgactaaatttaatttgtcaatcttttcttttatgaatcatgctttttgtgtcatgtctaagaacttcttgcctaacccaaggcgatacaaattttcccccatgtttttatctaaaggttttatagcattctgttttccatttaggcctgtgataaatgttgagtaacattttgtgtcagccatggccataatattttttgtctctgacagtatcatgggcatttgcagctccccacatcctatgcagttcccatcttcttggtccggtcttcctgtgagtttcaggggatgtcttagtgctggtgctgtcctggtccatcgaggggtcccgtgggcttgtccgtgtgggaaagtcaggactgtgatgttgacgggatgccctgtgagtcagggggagatgctgatgggggtttccatgtaggagagagaggtgtttggttttctggatggggcagacttgagaggggacaaacttgagaaatgccaacaatgagaggcccaggcagagcaggtctcggggctgcccagccatgtgggcaccaaacgtggatgtgtcagtggccacgccaggaggtaaaccctcaaccgtggacctctgggtgtccaagaccaagtcttgttcaagaggtgcattcagctgagccaaccatggcagaaatatataaaggagatcccacggttcctttgtttaaatcccctgctaatcccacctgactcagagaaggcgccaagtcctcacagcagcctgcaaccccaccctgactccacctcctctcggctctaattctccatgttcttctatcctctctgtctcctctcccaccagagaggagatcctgcacattcatactggtggattcaaacccatctttgccatacagatagtcactggaatggataggcataatctataaayagtcctcttgtaaaagaaaaaggcaggctgggcatggtggctcacacttgtaatcccagcactttgggaggctgaggcaggaggatcacctgagttcaggagtttgagaccagcctggccaacatggtgaaaccccatctctagtaaaaatacaaaaattagccaggtgttgtggtgtg

SEQ ID NO: 687440 - DNA, 1108 bp, Homo sapiens
attttaaatttatgactaaatttaatttgtcaatcttttcttttatgaatcatgctttttgtgtcatgtctaagaacttcttgcctaacccaaggcgatacaaattttcccccatgtttttatctaaaggttttatagcattctgttttccatttaggcctgtgataaatgttgagtaacattttgtgtcagccatggccataatattttttgtctctgacagtatcatgggcatttgcagctccccacatcctatgcagttcccatcttcttggtccggtcttcctgtgagtttcaggggatgtcttagtgctggtgctgtcctggtccatcgaggggtcccgtgggcttgtccgtgtgggaaagtcaggactgtgatgttgacgggatgccctgtgagtcagggggagatgctgatgggggtttccatgtaggagagagaggtgtttggttttctggatggggcagacttgagaggggacaaacttgagaaatgccaacaatgagaggcccaggcagagcaggtctcggggctgcccagccatgtgggcaccaaacgtggatgtgtcagtggccacgccaggaggtaaaccctcaaccgtggacctctgggtgtccaagaccaagtcttgttcaagaggtgcattcagctgagccaaccatggcagaaatatataaaggagatcccacggttcctttgtttaaatcccctgctaatcccacctgactcagagaaggcgccaagtcctcacagcagcctgcaaccccaccctgactccacctcctctcggctctaattctccatgttcttctatcctctctgtctcctctcccaccagagaggagatcctgcacattcatactggtggattcaaacccatctttgccatacagatagtcactggaatggataggcataatctataaatagtcctcttgtaaaagaaaaaggcaggctgggcatggtggctcacacttgtaatcccagcactttgggaggctgaggcaggaggatcacctgagttcaggagtttgagacsagcctggccaacatggtgaaaccccatctctagtaaaaatacaaaaattagccaggtgttgtggtgtg

SEQ ID NO: 687441 - DNA, 1080 bp, Homo sapiens
tgtgcaggtttataggtattttaaaaagattattaaccaacattgtaataatctgtttgtaacaaagaataggaaccaaagtgtacttctcaggcaacaacttacttttagatcactttactgaaaatcttaacagcttcaaactaactcatctcacctttaccttactttgctgtaatacaatatattaattttaataaaatttaaatgattattccttgagaattagacattgttctagattcttgggacccaatggttcttgtcatcagatcttttagaatattataaaatacaatttaataaagctaacctcctcaactcccasaaaaccaaatgacatatatagtcttttgaagaaaaaaatgtaataaacttcttaaaataagttatatttcacaatatacatgcatttaaaccaagtttctcgggtatatacacagtaacaaaaggaataatatcttcctcaagtgacagaagataaaatggatagcctcaaatatctagtaagtattttcactttaaataccttcatatcataatcaaactgtgttactttactatcaaacaaaaaaaaaaaactagaatggtgattttaaaaaagtcttctttgatgaagctgatcatctcaaatattgcgagaaaatatatttaggtatatgaaatgccttttcagtaatttcacttgcaacgtaactcattcttacttttcttaatagtttactattccttcaacataccataatagttaacaatatttacaggagtattttaagtatatatttggccaggcatggtggctcatgtctgtaattcgagcactttgggaggctgaggtggttggatcacctgaggtcaggagttccagatcagcctggacaacatggagaaatcctgtctctactagtaatacaaaaattagctgggcgtggtggcacacccctgtaatcccagctacttgggaggctgaggcatgagaactgcttgaaccggggaggtagaggttaaagtaagctgagacaatgccactgcgctccagtctgggcgacagagtgaaactgtgtctccaaaaaaaaaaaa

SEQ ID NO: 687442 - DNA, 1660 bp, Homo sapiens
taacattttttctttagttctgtatattaaaataaaatagtgttttattttgtctgtagtaaatcatgacaatttaaaatgcattttgcttcagttaattgcttggtaaacttaattgaggaagttatattgtagatagtattattttcctgaaaactattctcaatggtttttcttatattgtttcaccctcccaaaaacacgtctaattgaaaattaagttgtatgtcactttgaaatttttaaaaatgtctttttcagaaaactttaatattaattttttctcttttattctatataatttagtatagaatttacctgctattactcaccttaaaaattgcaaatatctttcttttttattgaatattattcaacaagctaaacaaagatgggcagggactgtttttgattatagataatgcaaagaatcaaagaatgtgtggactttaatttcctatagataagagctttgtcataaaaactatctagctcctgtgttgtcaatatgatggtaataagtttgagttctaaaagggaaatttgcaatttatgtttattctaaaaatgtaatattgattaaaaattttgagaacattacccttcctacaataagaatctttttaaggacgcctattggtgtttctcaagagacggtggtaataaaactttttcagacacttttgaaatatcaagactgaaatatttctatattttcttctgagatttatttctgacattctagatttctgttgagattccaaagtccaaatattgtgtccacacagcacccctaaatcagagcaaaagctaagtgccaggaaaacctattgtttagtgtctatggcaacacaaatgagggaaaggtccaatgtgtgaattatccgacattgactttataaggacgcagaaggttgtagcatgtaaactgattatatctaccacattcttttacctttatcaatacttttttaaagaagtatatacaatgagatcataatactttttattctaaagttgttttataatttttttaaatgttaacattttattaaacttctctcgcgattttttaattaaaaaaattgmgatgtaacataatatattaaagagagcacggagaatagagtaacacatacgcatgaatcctgctttattccttatcagatgagtggccttgaagacacctgttagcccattctaaatctctgtattctccacactaaccaatacttagaatacatagaacaatacttagaattgtgcggattcgttgacataaaggctataaagaatctagcagagaacacataataagctctataaaatgttaggtgatgttctccttgatccatattgcaagaagacaaattgaggtaatgttttttgccagctttaagttagaggagatacagtagttgtgaaccatatagcaactcaggtgaattctctatggtaccaaaggcaattctatctggggacaagatgataatatataaaaatataaatacaatcagtttttaatctaagtaatctttaccaaataaggggatttccaaacaaatgtcttggttggatatttttttaaaaaattaaatgtctttaaaactataagaatgttttgcttgttttgtgttatcacatttgaggtctcagtttt

SEQ ID NO: 687443 - DNA, 1316 bp, Homo sapiens
tgatgatgctgactaaacaaataataaatgtttccaccattaatgtctcaggctaaggtgacttttcaatacctactttaaattatatcctcctaatactgaaaccactataaagaaaattttaaaaattcactttagygtaaaacaccatattttaaatgctctaatgaaattggaaaaagggaaagagctttaaaggattgatgggagtccctgttgcagagctgtattataatgtatgctctactttagactttggctcttaaaatgattgttacctgtgaaggaagaattttaaaaatttcagagagcaaggatggagggaggaaaggaagtaagtggaggaaggaagcagcaaaaaagaaaaggaagaagtaaaggagaaaggcagaaaagagagagaaagtagaaaaaattaaatatatatatgaaattctattagtgttcctcacttaaaagcccatatggggataaaacaaagagggaaagaaagcttactggctgttaatggattaactaagggagtctcctaataaatgttgctgtattgtttattttataaggggaacccatattacctttaagtctcctttcccatggcctacgttgtctaaacttgcactacatttaatcaaatttgatgagctgcataacaaaggaggaattccagatagtatttaccctcattcttttattccctgggcagacacagggaagaggccaaaacatgaggctgaggaatgaagacatttcagaataatacattgacctctagaacaaactggttccacgtgaaagtattcacgttaataaaaaggttagtatcattaattccatgatctcttgttttgacagccaagatgaatctatctgttttctcaaacattctatcctcttccagaatggagatcacatctacaatcatggcagtgagtcaattaatacattttcttgaaaggatatataaaataatgaccatcggacaaatagcgaatggattccaagcattaataaaaacataaatctttataattgttttacaaatgtgtgcaaaaatttcctcccagtctttgtctatatctatacttactttgaatgtcacaagcaaatgagctgacaccatcattgcaaagtgtcatgcaaagtaagagagctacagtgaaaagggagctgtatactcttcatgacccagtataaatagtgaaaattccttctgaattgattgcaaccttgaatcagcatgttttcattctagtgtcctccaggtatggagagccaatgaacttttacattgtctagctaacccagctctataa

SEQ ID NO: 687444 - DNA, 1316 bp, Homo sapiens
tgatgatgctgactaaacaaataataaatgtttccaccattaatgtctcaggctaaggtgacttttcaatacctactttaaattatatcctcctaatactgaaaccactataaagaaaattttaaaaattcactttagtgtaaaacaycatattttaaatgctctaatgaaattggaaaaagggaaagagctttaaaggattgatgggagtccctgttgcagagctgtattataatgtatgctctactttagactttggctcttaaaatgattgttacctgtgaaggaagaattttaaaaatttcagagagcaaggatggagggaggaaaggaagtaagtggaggaaggaagcagcaaaaaagaaaaggaagaagtaaaggagaaaggcagaaaagagagagaaagtagaaaaaattaaatatatatatgaaattctattagtgttcctcacttaaaagcccatatggggataaaacaaagagggaaagaaagcttactggctgttaatggattaactaagggagtctcctaataaatgttgctgtattgtttattttataaggggaacccatattacctttaagtctcctttcccatggcctacgttgtctaaacttgcactacatttaatcaaatttgatgagctgcataacaaaggaggaattccagatagtatttaccctcattcttttattccctgggcagacacagggaagaggccaaaacatgaggctgaggaatgaagacatttcagaataatacattgacctctagaacaaactggttccacgtgaaagtattcacgttaataaaaaggttagtatcattaattccatgatctcttgttttgacagccaagatgaatctatctgttttctcaaacattctatcctcttccagaatggagatcacatctacaatcatggcagtgagtcaattaatacattttcttgaaaggatatataaaataatgaccatcggacaaatagcgaatggattccaagcattaataaaaacataaatctttataattgttttacaaatgtgtgcaaaaatttcctcccagtctttgtctatatctatacttactttgaatgtcacaagcaaatgagctgacaccatcattgcaaagtgtcatgcaaagtaagagagctacagtgaaaagggagctgtatactcttcatgacccagtataaatagtgaaaattccttctgaattgattgcaaccttgaatcagcatgttttcattctagtgtcctccaggtatggagagccaatgaacttttacattgtctagctaacccagctctataa

SEQ ID NO: 687445 - DNA, 973 bp, Homo sapiens
actgcaaatgaaacggtagtgacaacaacaaattttaatcaataaagaccacatacattgagaaggcaatatataaagacataagaaaaagaagtaaaaacacttttaacaattacctaagtgctgtgtaaataaggtttaagaatggtggttgagactgagctatataaagttcaatagggtgtgatgacagagctattacaatatgcatgaaaaatgacattttttaaaaaacaaaagacgtcttctataactactacaccattggattttggctaaaagtattgaaaaacagaaggctaaaagagaaaatttgttaagaaaactaatattataaaagaaggtaaataggctacaaataaagaaatatgagattgaaagatgtttgatgagtttttgctgaacctgaatttttgcagaggagtggtgaggtgaaggtgttgggaaggggtggaggaatctctagccctccatatcaaagaaaagccaggattttaagcccagagcctggaactttcttgggactctgtaatgaccagcatctgccactgtaattacraaacgtgttacctgaccaacttcatgctacaatgttagcttattggtgtgaagcaaaacaaaattttactttcttaacatcctttaagtaggtgttacttcccttaatagcactgccatgcttggtcggggaggaagggaaatctaaatcctcatgtaacagctttaaaaatgttccagctattatttttaagcctatacattttcccctctaaaattctctaacttcttctaagttttatgtttttttttcttctttctttgatgctttaggtgtttttaatgtgctctcaatagaagtgccaaatacttattagaagttctttagatcttgtctttagaatgtataatgtaaaattctaaatttataatcagaacaaaaataattttcctttaatttgtgtggcatatagtt

SEQ ID NO: 687446 - DNA, 2173 bp, Homo sapiens
  misc_feature 548, 549, 550, 551, 552, 553, 554, 555, 556, 557, 558, 559,560, 561, 562, 563, 564, 565, 566, 567, 568, 569, 570, 571,572, 573, 574, 575, 576, 577, 578, 579, 580, 581, 582, 583,584, 585, 586, 587, 588, 589, 590, 591, 592, 593, 594: n = A,T,C or G
  misc_feature 595, 596, 597, 598, 599, 600, 601, 602, 603, 604, 605, 606,607, 608, 609, 610, 611, 612, 613, 614, 615, 616, 617, 618,619, 620, 621, 622, 623, 624, 625, 626, 627, 628, 629, 630,631, 632, 633, 634, 635, 636, 637, 638, 639, 640, 641: n = A,T,C or G
  misc_feature 642, 643, 644, 645, 646, 647: n = A,T,C or G
tggttttgacgtcacattcaacgacgtcacattcaactccgtcactgtagctcaaatgcagtcagagacgatatgcaagtgaacaagcatggccatgtttcaataaaactttattttcaaaataagacatggactggatttggtctaggatgagtttgtcaacttctgccctagatccctttcttctgaggtatttgttcttttaaaattgattggaagaatgttttatatgtagagaatattaacactttattttatttaatcctgtcatccaggctgtcatccaggctggagtgcagtggtgcaatttcagctcactgcaacctctgcctcccaggttcaagtgattcccctgcctcagcctcccgagtagctgggattacaggcgagcaccaccacgcccagctaattttgcatttttagtagagatgagatttcactatgttggccaggctttttgtttattatatatactgctactgcacttcagcctgggcaaaagaagaagaccccagctctaaaaaaataaataattaaaaattttaaannnnnnnnnnnnnnnnnnnnnnnnnnnnnnnnnnnnnnnnnnnnnnnnnnnnnnnnnnnnnnnnnnnnnnnnnnnnnnnnnnnnnnnnnnnnnnnnnnnntttttctcctgctttgtatgtgtgtttacacacacacacacacatacacacacacataattttaatgatggaattaaaagaacttaaatacaggacttaagttaaacttttattctcttagaatggttcaactcttttatcagttgatgtcataatttagtagtcacataaacacatacataaaatgttttagtttcctaagtaaaccatgaaacaccaaaaataaaatcactggtggggcgcggtggctcacacctgtaatcccagcactttgggaggctgaggygggcggatagcttgagttcaggagttcaagaccagcctgggcaacacggtgagaccccatctctactaaaaatacaaaaaaaaaaaaaaatagctgggcatgctagtacacgcctgtggtcctagctaatcaaggggctgaggtgggaggattgattgagcctgggggcagaggttgcagagggccaagattgtgtcactgcactccagcccgagtaacagactgagaacttgtctcaaaacattaaaacaacaacaaaaacaaaatcaccttaataataaattagtttttcttagtttctaaaggaaattcaggctttcattttgactcaaaatgatgatacataaaattcttataaattattatttggaagccaacaaggagggtaatgacataaattataaaagttcaagtggatgcctgaaaaatatttttgtaactcaggagataattgtttacatattgtgcaactatattgttattgttactgcaactcaggcttttagaaggaagttttacatggaaaaaattatttcctacctccgagttggtgaccaaccaatgaatttagagattaatttcagtataatctttcagctgattacttttaattaagtagtaaaaggaaactacaaacagatgagatatgcttttttttttttttggtgtatgattggcaagggacaaaaaacacatatgctgagtaattgcatggtgcatgtttcagcaaagcataaggagacaccaggaaataaattacaggtaaagctaatcaatacaagggcagggagttttgaagaagacagcaaaagaaagattttgttaaaagcgaatatgaggaaagttataaatgtgtatattgttaatagctcaaatgcccaaatacattttaagtaatgcccttaattaaatgtaaatagcaaacttagtagttacgtcaacttctttcttagtaacatgtttaaagcagattacaaatctcttagtaacaatgtagccgcagtccttcttgaaaaaaaaaaattgcttctcttcagttggttctgaaagacaatatatttctagaaatgaaatttgctaccaatgaggtcttattttgtaggtgaattatgtgacttttaacttgcagtatgcttgttgaaagtacatttaattttccaaaggaaagttctccacaaggttaaacaaaaggtttaacaaaagtttgaaagtcctgctaaagatttcctaagagctctca

SEQ ID NO: 687447 - DNA, 633 bp, Homo sapiens
aaaactcttaccattgtgctctaatggtgattttctatttccttcatttcttccatgtttattaattggaacctyctatgagggaatactttctcttctctctcatttgtttaattatttatgtcagtatggacatacggatcaaatttttatagctccaaggtgattctaatttattctcaagattgaaaaccactgctaagtggtctttgaacctagttcatgatgtggtgtctctactctgtctggtaacacaatggtcttgttttgttttgttttttttcaatatgtgttatttatattacctgtttctatagttaactgagtgcatctctcctctgccacagataaacttcgccacaccctaaaatatcataagccagaacacttgtacctctaaatttctgggtctaaccacaaattcatagctgtttacctagactacctcacatttactaaagtaagctttgatttcagcatgaactcaaatcctataatacctgcaccccaaacataccgtgccacctccttttgatattcactagcctcttagccaatcagttgtgttggttaataatttccatcttacattccctagcatcacaagatattatgaaatttggtgcttcttgt

SEQ ID NO: 687448 - DNA, 609 bp, Homo sapiens
tctgatcccataaacaaagaaagtaattaatggagatagaaatgagtcctatgtgatattgtatcagttagcttttgctgtgtaacaagtcatcccatacttagttgcttaagacaacaatcacacattgtgatcctgtgggttaactgagcagttcttatcttgatgggttaactgctgctgcatgatctaggaattctcactaggatttctcatttttgatacatatgatttttttcttcttataggctagtccaggtgtcctttcatagatatatcagagtttcataaagcagcaagaatgtaagtttcaaatgyataagcaattttcaggccgctgcttgcaaacatttgctaaagtgctgttggataaggcatgtctcatggtcatctccaggttcaagaaatggaaggataggcaccacctcatggtgggaaggctgcagtgtcacattgcaaagaggagcacacataaaaaagggaggaatttgtggctgcttttgaaatataccacaactaagaaacaatctattaactttgagggttcaatttttaatacagaaaagggagagtgttgattatccaggctagtctgctaaatgaaattca

SEQ ID NO: 687449 - DNA, 1544 bp, Homo sapiens
ggaaaaataagcaaatccattcttagaaaccagaataagattgatcaaatggtttttgttgccaatttttttttgaactttagttgagtgtaactccagtaatggggtgtgccaaccttctgatggggtccattttcatgacctaatgaaacaacattgcaaatggaaaggcagctcacaatgtttgccaagggaaagggaaattctaggcacaccaatttggatgcctttcaagttcaatgcatgtgtttactttgaaagtccgaacaccgaacaattaagagaacactcctctgattcggcctgcttatgtcaaatgactagtgaaataaatgattacatgacttaaaaatattagttttcgtttttttttttaaacaggaagggggaactaaagaaatctgggttaaagaataatttattcatccagcaaacatttattgtccatttccgtagagatactctgatggcttatatgaatacaaagagtatttaaacacattccacgattcctagtagcctagcatctaatggagataaaaagtaatatagattatgtagtctagtgtgaagataaaggacctcaagtgggtaacaaaacagcaaaaacaagcaaaaaccacaggaatgtactatggtaagatctatcaaatccgattagtagttataaaatagaaagggacttgaagataaatggacttgccaattataatgattggcaattggttttaagaattagaacaaaatagttgttaatggaactgcttatgtaacaactccggataaaaactgtgtagaattctaaggttgagagacaatatctttytggagcagggtagaggaaggaaagaaggatcacagtaaagtctattttctcatgccaccttattgaagtaggatccagaaaacggagacagttggaaatggagagaggaggaggaaagagtagcctatagctaccaaggaagagtttacaataacttatccttactggtatcaggaataacaagggtaatgatttcctgtaaaaacagcaaagtccaagtatatacatagatggaagggtcaagagaactggtaagcagaataaagtgcagataaaaagtgagagtgagacaggtaaggggcgaacaataaacattagtagaaattttatttaaatttgaactctaaagtcagtgggcgtgttgtttgttccgctagtgtaatgattatacctacttatgattaatatgcaaataaataccttttgtaatttaactttgaaagttgaaattggggctgggtgcctgagctcaggagtttgagaccagcttggttaacacagtgagaccccatctctattaaaaatacaaaaaattagctgggtgtggtggtgggtgcctgtaatcccagctacttggaaggctgaggcaggaggattgcttgaacctgggaggcagagctgagatcacagagctcgtgggacactggctcaaaaaaaaaaaaaaaaaaaaaagcaaaaaaaagctgggcacagcggctcacacctgtaatcccagcac

SEQ ID NO: 687450 - DNA, 651 bp, Homo sapiens
tctttcctactcatgtgttccacgtttattcctgctgtatcttttagtaatattttagaagagtagatcaaaccattacatataatagagggtgcctataagtattaatttaaaaatgatttacttatcttctattcaatttgagcagccttaaaattaaagcactattataagaagaagaagaaaaaaattaacctgttaaaaaattagatccaagaagtaaaaaggaagaaagaaggccaaatctgatgataatctgactgaaaaaaagctgtggcgattgactaaataacttgttttcagaccgttagtcaccagtgcaaagagaaaaacatcttcaccatttgcacaacttccattgttcaaaggaaggaagaacactttgtcactaggaggtaaaacactctggctgtgagctttgagggtaatttgtttatattcaatccatccatcattttactggtagaaagatctttcattcccacaaatctgattatgccaatcttttgcttaaaacccttcctcagctcccattgtctttgacatgaaatctaagtagcatttgctccctgttcgttttcatgcctccctctccaggctcatctgcaccttcacgggccatacccyatgtactatcacattaaactcttg

SEQ ID NO: 687451 - DNA, 1305 bp, Homo sapiens
ttttcaaatgaatgacttgaattgagactcaaatgttctgtatatgtttatttataggacaatccatatattttataaagtatagcattaataatatgatttcactttaatatctacagcagaatacattgtctgtatcttataggtatccaatatatatatatttttttctgattccccacgtttaatgggggagagaaacaatagccacagctatccaaattattataaaaaatttgctgagatgcattacaccagacacaatatgctccaaccaatactgctaaaaaattacattcaatattatttagacatacatgtaatgaaactgcaaaaggcatgatgagtatcaacgaaaattactacatatgtaattgggcaaattactcgatgtattacatgtcttggtcatacctaggttagaaagctatttagagcgtgctgcttcagccacagactgtttattcctcacataatgctaatcacagtgattgtgcctgtctctgttacgtctggcaaagcaacgtgtaagaagtcagctctggccaggacagccagttgaacacacatggcaacatgaaaaattctatttagctaggctgcctattccaggccctttactaaggttcccaaatcactggaaataaaattaaaatttcaatgtctgggtatcttttagtatttccctattttagtttgattagtttgatatttggaaaaaataaagcaagtgataatttttgtattgtttaaatacattttttattgtttttctccccccttgccatcacattttcataattttacttccaagagagacggaatacgcatcaaggagctacagggttggggatcctagctcacttggcataacaaacatgatgcccttcaaggcttgccatgtaggctttacccagagaagaatgtgtggcacttcagggcatatcctgggcttagtaaagtagggaccatatgcctacctagcattctattctcgggctcttgtttcagaataatctttcatctatacatgtctctccaataatattcccatttaaggattagcttttatgagttaaggacaatttcatactgagatggaagttttgtcaaatctaagcccattttatagctacaaaagccaaggcaggccgggygcagtggctcatgcctgtaatcccagcattctgggaggccaaggtgggtggatcacttgaggtcagaagttcgagaccagcctggccaacatggagaaacaccgtctgtactaaaaatacaaaaattagctgggtatggtggcacaca

SEQ ID NO: 687452 - DNA, 1282 bp, Homo sapiens
  misc_feature 1177, 1182, 1183, 1184, 1185, 1186, 1187, 1188, 1189, 1190,1191, 1192, 1193, 1194, 1195, 1196, 1197, 1198, 1199, 1200,1201, 1202, 1203, 1204, 1205, 1206, 1207, 1208, 1209, 1210,1211, 1212, 1213, 1214, 1215, 1216, 1217, 1218, 1219: n = A,T,C or G
  misc_feature 1220, 1221, 1222, 1223, 1224, 1225, 1226, 1227, 1228, 1229,1230, 1231, 1232, 1233, 1234, 1235, 1236, 1237, 1238, 1239,1240, 1241, 1242, 1243, 1244, 1245, 1246, 1247, 1248, 1249,1250, 1251, 1252, 1253, 1254, 1255, 1256, 1257, 1258: n = A,T,C or G
  misc_feature 1259, 1260, 1261, 1262, 1263, 1264, 1265, 1266, 1267, 1268,1269, 1270, 1271, 1272, 1273, 1274, 1275, 1276, 1277, 1278,1279, 1280, 1281: n = A,T,C or G
gttttttttttgtaataagtgactagaacatttcaattttaatgtctgtatacactttatagtttcatgtatttattgccataatgtaaacagtctactgtagagtgttacctagttttttcccattgatttcctatctagtatgatactgtgattatatattacttggtgtttctctttattattcccccggatattaactgtgctattttaaagcatttaatttgatggtgtgaaccctaatcccatcgcagagcacttacctatgtgtcacattgtcataatttagtccctagtgtaagtctaggggggtacttgcttttatttaagaaattcactgcatgctgaattcatcatactttgggaaaacagatccttattcattcagtgaacagaccatgcagatttctatgacatagcactgtgttggccaaggctctgtgggaacaactatctattgtaaaatggtaggaggataactgtgaacttcttttgtaaccaataaaattcagaaatggcacattgtaactcggtttgcaattttttcccaatattttcttaaagctttatgtatggaaagtgtctttgttttcactccattttgcattttgccaagaaaaagtgacaaaacagtacttatcatcttccttcaaaacatatggcatgtgcccacggaatattaaatgatcttttacaatgacaacaaatgttgtgatatttcatctgaaactctcagaatgtaaggtttcttgaagcaagcaggaaaagctaaaagatggttcaggaggattggtttgctggtagagatggtgatgaaaacatatgctacttcaaatctgaaggagtactgcgtatatatgaatctataagtgggagtgatagaaagtatattatttatttggacttaaagatcttyaagcagatcctatagccagtttagtgtcctctgggatgaaagagacctgaaattgagtatacatgggttggctttttttctgttatctttcactgtcagcagaacaattttccaatgatcccagattactgagaagggggcttgctaatttatttttctcacaaacttctacccaagggaggaggagtactttatttgatctgtaagcatgggagaaggacccaggcatgtgtaacttggtctttccttcttatctatctnaaatnnnnnnnnnnnnnnnnnnnnnnnnnnnnnnnnnnnnnnnnnnnnnnnnnnnnnnnnnnnnnnnnnnnnnnnnnnnnnnnnnnnnnnnnnnnnnnnnnnnna

SEQ ID NO: 687453 - DNA, 770 bp, Homo sapiens
atcctctgtatcttaaaatcagcaaacataataatctcagtttcaggtggtatataatatttttttctaattatagtttaatcttacatatttttacctcataaaaaatctttattaaatagatcatgattttttcaaatcacaatattttaaagcccatatatgcccatcaaaatgtgtatttcctttgggtgtaatttttaaaaccaaaattaatttgaaatgcaccatgcgattttaaatgttttgtgtcctcaaattttgtttcattttttgtttgagacagggtctgaccttgtcaccaaagctggaatgcagtggcacaatctcagctcactgcaacctccaccttcttggttcaagagattcttctgcctcagccacccaagtagttgggactacaggtacataccaccatacctggataatttttttttwattttttgtagacatgggtttcaccatggtacctagaccagtctcgacctcctgagctcaagcagtgtgcctgcttcagtctctcaaagtgttaggattacaggtgtgaggccactgctccctgccaaattttatttgttgggatgaaaaaaagcatttatttaaaaattgtaatttgttaatctttatgtaaaaatcacctattctgaaataaataggtgagaaggaaaaaaagaaaggaaaggtaggtctctaaattcataatttgtagatgagaaagagagagagagagaagcatcatagtaatctcataaaattattattagaaagga

SEQ ID NO: 687454 - DNA, 770 bp, Homo sapiens
atcctctgtatcttaaaatcagcaaacataataatctcagtttcaggtggtatataatatttttttctaattatagtttaatcttacatatttttacctcataaaaaatctttattaaatagatcatgattttttcaaatcacaatattttaaagcccatatatgcccatcaaaatgtgtatttcctttgggtgtaatttttaaaaccaaaattaatttgaaatgcaccatgcgattttaaatgttttgtgtcctcaaattttgtttcattttttgtttgagacagggtctgaccttgtcaccaaagctggaatgcagtggcacaatctcagctcactgcaacctccaccttcttggttcaagagattcttctgcctcagccacccaagtagttgggactacaggtacataccaccatacctggataatttttttttaattttttgtagasatgggtttcaccatggtacctagaccagtctcgacctcctgagctcaagcagtgtgcctgcttcagtctctcaaagtgttaggattacaggtgtgaggccactgctccctgccaaattttatttgttgggatgaaaaaaagcatttatttaaaaattgtaatttgttaatctttatgtaaaaatcacctattctgaaataaataggtgagaaggaaaaaaagaaaggaaaggtaggtctctaaattcataatttgtagatgagaaagagagagagagagaagcatcatagtaatctcataaaattattattagaaagga

SEQ ID NO: 687455 - DNA, 770 bp, Homo sapiens
atcctctgtatcttaaaatcagcaaacataataatctcagtttcaggtggtatataatatttttttctaattatagtttaatcttacatatttttacctcataaaaaatctttattaaatagatcatgattttttcaaatcacaatattttaaagcccatatatgcccatcaaaatgtgtatttcctttgggtgtaatttttaaaaccaaaattaatttgaaatgcaccatgcgattttaaatgttttgtgtcctcaaattttgtttcattttttgtttgagacagggtctgaccttgtcaccaaagctggaatgcagtggcacaatctcagctcactgcaacctccaccttcttggttcaagagattcttctgcctcagccacccaagtagttgggactacaggtacataccaccatacctggataatttttttttaattttttgtagacatgggtttcaccatggtacctagaccagtctcgacctcctgagctcaagcagtgtgcctgcttcagtctctcaaagtgttaggattacaggtgtgaggccactgctccctgccaaattttatttgttgggatgaaaaaaagcatttatttaaaaattgtaatttgttaatctttatgtaaaaatcacctattctgaaataaataggtgagaaggaaaaaaagaaaggaaagktaggtctctaaattcataatttgtagatgagaaagagagagagagagaagcatcatagtaatctcataaaattattattagaaagga

SEQ ID NO: 687456 - DNA, 629 bp, Homo sapiens
tacatttcattacttttacactcctatattatcaaaaataatgtaggaattaatatctttatagctgtgtcaccaagagtgaaaactacagtaaattttttttggcattttgactagatatggtataaataaatccagttttaggaaatcccacaaaggacaattccatttttcctttgctcctaaagaactacagtgctgtacaggtagctaaaattctgtgcagcctcaataatgtcccaaaattccagagtgagaatggcagctaggagcaatctctaacagaataaggagtccgtttcatttacagaacgtctcaacaccttggatcaacaccattttgagacagagttagcaaataagcaamtacccaaagaaagctctcagacaagaagctgtccttggattaggcttctcactattaggggttcatgccagatgaaggaaaccttttgtgaactggataggtaccccacacctggatgggaagttacctttggccaaaaccaaaagctgcctccaaggattgcacatactcctggaatagaagttagactgaactaatcagtagtcttcctggtttcaacaaacaacaaaaaattgtatagaaacaaagtgaccttcctgaa

SEQ ID NO: 687457 - DNA, 664 bp, Homo sapiens
tgactgcctcccttggaggctgaccttgtcctcattttaccttcactaattctctattgcataaatgatagtagtaagagctcatatttatggaaagttcttatgagttataccaaatgctaacactctataggcattgccttatttaattcttacaacagtcctatatggtaaattgcccatttcacagatgagaaaactgaggttcaaagagcttaagttgtcccaaattgcacagctaggaacagacaacmccagaatgtaaacctaagtatatttaatatcaaagtttgctttttagctatacagtaaaaggcaaaagatttatacgatttgaggagaaaccagagtataaagattgcttcttaactatataggctctgctccaagagggtgcattgcttatggggaaataagtctataaacacaacaacaaagtaaaatgattaggataagaagtaaacatagaaaactatgtgaacacccaaaaaaagggtcctaatcctaatgggaattatcaggaaaggctttcaaaagattatgatttatcatgcatatgtgaaagtgtgtgccatggacagagacagatgaccagagggatcaggaagagcctttataggatacaaaagtttgaaatcttaaagacaatagaggaacggaaatt

SEQ ID NO: 687458 - DNA, 664 bp, Homo sapiens
tgactgcctcccttggaggctgaccttgtcctcattttaccttcactaattctctattgcataaatgatagtagtaagagctcatatttatggaaagttcttatgagttataccaaatgctaacactctataggcattgccttatttaattcttacaacagtcctatatggtaaattgcccatttcacagatgagaaaactgaggttcaaagagcttaagttgtcccaaattgcacagctaggaacagacaaccccagaatgtaaacctaagtatatttaatatcaaagtttgctttttagctatacagtaaaaggcaaaagatttatacgatttgaggagaaaccagagtataaagattgcttcttaactatataggctctgctccragagggtgcattgcttatggggaaataagtctataaacacaacaacaaagtaaaatgattaggataagaagtaaacatagaaaactatgtgaacacccaaaaaaagggtcctaatcctaatgggaattatcaggaaaggctttcaaaagattatgatttatcatgcatatgtgaaagtgtgtgccatggacagagacagatgaccagagggatcaggaagagcctttataggatacaaaagtttgaaatcttaaagacaatagaggaacggaaatt

SEQ ID NO: 687459 - DNA, 631 bp, Homo sapiens
tatttgtcttggcaagaaaccacaggattgttttgctattgctatgacactaatatatgcaacattttatactacagtatttcctgcatttgtgcgatgtatgaaatagacaatatctgtataaacttttaaatccatgaagtctttgtatgggagtatcctagtgtgaaattaaaaaaaaaaatcccattaaagaaatgattgttgcgggagggaactaasttgtgtgaagcacctactatgtgccgagaagtttatctgtgatgtgttaattccaacaattatcctacagggaaaccatcattgtatcaattcttcagataaggagagaagtgatttgtctaactccacttcattattatgcagctgaaccaggcttcaaacctagctgcaaaatccaagctctctgtccacccatcactctgactacattccagttcacatttcaccatgaccactgtaatcttataaaatctacaaaagagtcaatcaatgtaaagttcaattccttgggtcaccatgagctctttcagaacattcctatccatataatttttttggcagttgccatgggaattaaacatggtaattttcatctgtaatagtacatcctcattataatatttctaga

SEQ ID NO: 687460 - DNA, 566 bp, Homo sapiens
actccgtctcaaaaaaaaaaaaaaaagtacaattgatggtcaggcgcggtggctcatgtctgtaatcccagcactgtgggaggccgaggtgggtggatcgtttgagcccaatagttcgagaccagcctgagcaacatgaagaaaccccatctctaccaaaaatacaaaaaattagctgggcgtctagcaggtgcctgtagtcctagctacttgggaggctgaggtgggaggatcacttgagcccaggaggtggagattgcagtgagagatcacgccactgcactccagcctgggtaagagtgagattctgtcaaaagaaaacaaaaaaaaaggaaggaagggagggagggagggaggaggagggagggagagagagatagagaaaagaaagaagagaaaaagaaagaaacaattgataaaataaagtktctagtgactttgttaaggaaatgctagagagcaggcttcactataggctttactgtacattctatatgtatgtttaccaacaaacataaaaggaaaagtactaactttacttcatcatttaagtataacttagcaaa

SEQ ID NO: 687461 - DNA, 1623 bp, Homo sapiens
aggtaatggagaattaatctaccagacaggacactaaaaatactaatagaagaacagatcattgaaatacagttcctcttatttaggcccagttgaatataacatttgaatatatgataaggcattacaaatcagtgataaggggaaggattatttagtaagtaatcatcttggaaaatctgtaatcctttggagaaggaatattttcactgcataaaatatttcttgtgggttcagtatttgtatttatttattttttatttattttttgagatgaagtctcgctctgttgcccaggctggagtgcagtggcgtgatctaggctcactgcatcctctgcctcctgggttcaagcaattctcctgccctcagcctccctagtagctgggattacaggcgcgccaccatgcccagctgatttttgtatttttatttttatttttgtttatttatttatttattttgagacggagtcttgctgtcgcccaggctggagtgcagtttcgcaacttcggctcactgcaagctccacctcccagggttcacaccattctcctgcctcagcctcccgcgtagctgggactacaggcgcccgccacctcgctcggctaattttttgtatttttagtagagacggggtttcactgtgttagccaggatggtcttgatctcctgacctcgtgatccacccacctcggcctcccaaagtgctgggattacaggcatgagcctccrcacccggccaatttttgtatttttagtagagacgggttttgccatgttggccaggctggtctcgaactcctgacctcagggtgatcgcctgcctcagcctcccaaagtgctgggattacaggcgtgagccactgcgcctggcctatttttaaaatataaccaaaaaaatgttttttttcaatgttgggtatcagctctctggagaaaggaagaatttctgaatttaaaaggaatcacaaagaaattaaacattcaattatatgaaaatgtacagcttctttaactttaaagcactatcgttataaagtttgaaaaaattttgaaatgtttatagcttattaaaaataaaccgtttatgaaagttacttaaggataaaaaacaaaataggcaaaaaagtgcagctcagtaaaataattaccagtttaagattttgaaacagtttctgaatctgcagagttttataaaacaaatgcaatactgaaggggagagtaaagggtagaataaaattgttttcatacttgctggcggtatgtagcaagttagtgtaatcctttaaggaagcagtttagcagtatttagcaagcttaaaattcaagagcaaacatttgtcttagttattaaacttcagagaatctgtcctaaaaaacatccttaacacaagaaaagttttatttatgaaatattcagtgtagtactttattattatatactcagtttcttagtctgccatctgttacctctacatgtgctatttgcctcaaattaattctactacacacacaactcctctcttcttaggagctctttcaccaaagccttgttaagtactccctcctttgaggaacctaataaacttgaatgctggttttgtttacattaagatacc

SEQ ID NO: 687462 - DNA, 1461 bp, Homo sapiens
ccaattgcttagaagcaattcaattctattcagttgtaatcaacttcgttctatttcacgtcatctcaacagcatattttgaacatttactacaaggaatatagttagttaagcacaacaggagacataaatataatgaattatctgtagacaaatactaactttggtgaaacgtagggatagagatcacacttttggatctgtgtctcaaagttcagttttgaaatacttgcccttcctagatcaacatatttcaaatagatcattagtaagttcaaccaataactggtcaaggtttataagatttgaaatcgtgcaatgcagtacattgatgattttaatatatgtaagcaaactattacaattgtgacaaagcaaattgagcaatgacttttacattaatatgtactcatttgtagctgcctccaactgttttggcaagactttcaaatgttttcttgctccatcatcttccagcaagaaagccaataactgtggccaaggcaatatttttggcagtggtagtgcccagatgacaacctctggagtacgtctcctcagcagtagcagtgacatctggattactttatccacttgagactatcttggctcacttccacatgtacagctgtggaaccatctccagtgctatcttcaagttggaaagcagtattgtgagacaaagatatttctatgatgtcctctgattatgagactattcccagtgcatgtatgtatgtgaatgcataattgtgtgtttgtcctttataggtagggtttagaccatagtttgttcaaaaaaataaaaatataaaatacactcaaaacttttaatgcatttatattatgcccctatatacagatatatgtgtatgtgtttgtatacatacatgcataacttttgagtcaatgatttagataatcattatttgagagcttttgtctactataggatataattattgtctttatgaattcatttggtacatagatacaatgtatttactggcaaactctagatactttgaggaacaaacaagtgaagatgcagattatttagacatattatagctactattgagatgatagtcttgccactggaaaaaggcataagaaattcaaaagaactggtaaacaaaacagcacttcaaaacatccattatgcraaagccttgagctacaacatctatttttaattacaattacagttcccatttatctatcaagaattgtgctagtcattatacataatttatcttatttaattctcacaacaaccctgtagagtagatattatttccttttgtggatgagaaaaatgaagctcagaggtatcaacacaactcataattggtgaagttgaattccaaacccacatctgtctgcttcccaaggtcacaactgtgtttccttacctacgaatacaggagcttgcagtcaatacattttctgaaatatatc

SEQ ID NO: 687463 - DNA, 616 bp, Homo sapiens
tgccttctatttttatagtagacttgtttgattgcattgtagtctttgtttttgatttaattcaaaagttttaagatagaagtttatcaaattaacaaatctttcctttatgatccctgtcttgatgtcattctagctgaacttgaaaattaactttaagtgatttatttcacaaataggcattcactgtgctccagttactgttaagcaacattttagatacagaaaacaatgatttataaaaccatgtattcattcctcatgaygtataaaacagtgtgttcattcctctaatgaagcatatcttcaaaattaagattttttaacttgtaattcaaagatctcaagttagtttatgaacacctatctttcaaggtaatattagcaggctcttgagtttaggtttgtgatgattttacagatggaagcatagctctctcctatgccaatttctggcagctctcttgatccacagttatgggaattaagtagtcatacaaacactttctttggacagttagggattaacattttaaaagagtctatacaatgtgtcaattaaaataagtaaataaaaatgtaagaaatttaaaatataatggttgtattttcattt

SEQ ID NO: 687464 - DNA, 636 bp, Homo sapiens
ctctgtcacccaggtgctgtggtgcagtggcgcgatctcgactcactgcaagctccgcctcccgggttcacgccattctcctgcctcagcctcccgtgtagctgggactacaggcgcgcgccaccatrcccggctaatttttgtatttttagtagagacggggtttcaccgtgttagccaggatggtctcgatctcctgacctcgtgatccgcccgtctcagcctcccaaagtgctgggattacaggcgtgagccaccgcgcccggcctttttttttatttcaatagctttgggagtacaagtggttttggttacatggatttaagtttatgaatttaaatatcgactctacgcttacatcacacagtcttcacacatgaaatttaaacaaagtctttggaaatttcaagctgttgatctaattatgcacagctaatgggttgtattttgacagttcctgtaggtctactcttgcaaattctgcacccaatcttggccatgttcactactcaaataaggtcaccataattatgctgccctatgtttccttcgctaatccatttatcttggggttcaaatgttgctcacatggaggttttaattacaaagatacatttcagtcactagagtagtcat

SEQ ID NO: 687465 - DNA, 636 bp, Homo sapiens
ctctgtcacccaggtgctgtggtgcagtggcgcgatctcgactcactgcaagctccgcctcccgggttcacgccattctcctgcctcagcctcccgtgtagctgggactacaggcgcgcgccaccatacccggctaatttttgtatttttagtagagacggggtttcaccgtgttagccaggatggtctcgatctcctgacctcgtgatccgcccgtctcrgcctcccaaagtgctgggattacaggcgtgagccaccgcgcccggcctttttttttatttcaatagctttgggagtacaagtggttttggttacatggatttaagtttatgaatttaaatatcgactctacgcttacatcacacagtcttcacacatgaaatttaaacaaagtctttggaaatttcaagctgttgatctaattatgcacagctaatgggttgtattttgacagttcctgtaggtctactcttgcaaattctgcacccaatcttggccatgttcactactcaaataaggtcaccataattatgctgccctatgtttccttcgctaatccatttatcttggggttcaaatgttgctcacatggaggttttaattacaaagatacatttcagtcactagagtagtcat

SEQ ID NO: 687466 - DNA, 636 bp, Homo sapiens
ctctgtcacccaggtgctgtggtgcagtggcgcgatctcgactcactgcaagctccgcctcccgggttcacgccattctcctgcctcagcctcccgtgtagctgggactacaggcgcgcgccaccatacccggctaatttttgtatttttagtagagacggggtttcaccgtgttagccaggatggtctcgatctcctgacctcgtgatccgcccgtctcagcctcccaaagtgctgggattacaggcgtgagccaccgcgcccggcctttttttttatttcaatagctttgggagtacaagtggttttggttacwtggatttaagtttatgaatttaaatatcgactctacgcttacatcacacagtcttcacacatgaaatttaaacaaagtctttggaaatttcaagctgttgatctaattatgcacagctaatgggttgtattttgacagttcctgtaggtctactcttgcaaattctgcacccaatcttggccatgttcactactcaaataaggtcaccataattatgctgccctatgtttccttcgctaatccatttatcttggggttcaaatgttgctcacatggaggttttaattacaaagatacatttcagtcactagagtagtcat

SEQ ID NO: 687467 - DNA, 642 bp, Homo sapiens
atgctaatatgcttcctttagaattatttcacttccaagttctaccttgtatataggtatatatgtagacaggtatgggggtatatatatatatatctgtctagacaggtatatatatacacctctagacaggtatatatatacacctctagacagrtatatatatgtacctctagacagatatatatatatatatatatatatatatatacacctctagacaggtacatacatatatatagagagaaagaggtatatatatatatgtgtatatatatatatacacacacacatatatatatacacacacatatatatgcacacacacacatatatatacacacacacacatatacatatacacctgtctagaggtacatatatatacctatatactgtctagaggtacatatatatatatatatgtatatatacctgtctatatatatatatatacacacacttgtctagaggtgcatatatatacctgtcatacacatatatacctgtctagatatatacctagatatagatacatatatgtttgatagatacatatgtttgatatagaaacatatgtttgatagatataactacatatgtttgatagatacatatgtttgccttgccaaaagtttttca

SEQ ID NO: 687468 - DNA, 642 bp, Homo sapiens
atgctaatatgcttcctttagaattatttcacttccaagttctaccttgtatataggtatatatgtagacaggtatgggggtatatatatatatatctgtctagacaggtatatatatacacctctagacaggtatatatatacacctctagacagatatatatatgtacctctagacagatatatatatatatatatatatatatatatacacctctagacaggtacatacatatatatagagagaaagaggtatatatatatatgtgtatatatatatatacacacacacatatatatatacacacacatatatatgcacacacacacatatatatacacacacacacatatacatatacacctgtctagaggtacatatatatacctatatactgtctagaggtacatatatatatatatatgtatatatacctgtctatatatatatatatacacacacttgtctagasgtgcatatatatacctgtcatacacatatatacctgtctagatatatacctagatatagatacatatatgtttgatagatacatatgtttgatatagaaacatatgtttgatagatataactacatatgtttgatagatacatatgtttgccttgccaaaagtttttca

SEQ ID NO: 687469 - DNA, 312 bp, Homo sapiens
aaaacccgctccatcataattactttatatgctatgatatggtttgactctgtgtccccacccaaatctcatcttgaatggtaatccccatgtgtggagggagggacttggttggaggtgattggatagtggggttctcactgtagtgagcaagttctcacaagatctgatagttctataagtggcagtttttcttgctctctctctttcccactgccttgtgargaaggtacttgcatctccttctcattccaccgtgactgtaagtttcctgaggcctccccagccatgtggaactggcaatcaatcaaa

SEQ ID NO: 687470 - DNA, 676 bp, Homo sapiens
tgtttctactgaagcccagtaaatggttttgggagacatttgaaatcttagtcatattcaaatcccaaatacaatttctcttttttttcccagaaatttcaaaggttttagaaatattttctactggaaaggtatctctcattcttactcaaaatttagacactaatgagtagatggcaagtcttgtttataagcattaatcatgaagatgaacatttataactgaaaaaagatgttcgaattttggggtttgtaaaagaactaggaatggagaacatttagagttcactatgtggtgatattcacaaaagcaaatgatgatrtaactatgtcacttggaaggagcttcaggcaggttctttctcttctacatgtaacatgtaagcctgttttggggtcattgctgaggaaaactacttcttaagacaattttacgactgcattgtttcaatagtacaccaaactatgttggaaagttatgacctagaatctgaaaaagaaaaaagtgatgaaggaataatgaaaggctgcatgacagaagtatttagtcttcattcctgtgtttgaagcagaaaaaaaggtattgagggctaaccagactctgccttttgctaaattgaagagtatcacatcaaaggccaaagatccattttaacaggtgccttaaaaagttgta

SEQ ID NO: 687471 - DNA, 661 bp, Homo sapiens
tggctaaccatttcaaaataaatactgtgaggcataatctrccaaaatacaaacatgaattccaggtagattacaaatgatgctctaaaagaatgaggaggaaacagacttacattgtggaaggtctctctgagcatccctgagaaggcacattcaatgaaaaaacatgaaaatatttgactatataaatattttaaatgtctaaacatttgcaaaaaccataaaacaacaaaatgcaaataaccaagtggaaaagatagttttaaatatgtataaggattataatattttaaaatattcctcatctttattcttttcttagtaaacctctctctctctctgcctctctctctctctctgcctctctctctctctgctgtccacttggctttgctattccatagaaggtggatgccactctggaaaggaggaggagtgtcccctttagccagaacaaggaagaggaaagacttccctgtcttccctgagggactgtgagaaaggtggggaagaaggtagtggaaagaggcagttggcatttgttctgagccctctctctcaacaagagtggtaggaatgcctgaagattggctgggcacggtggtgcatgtctgtagttccaactactcaggaggctgagaagagaggatcacttgaaccc

SEQ ID NO: 687472 - DNA, 1757 bp, Homo sapiens
tgttagaaaagtgagttccagtgccctgattccttttctcttaaggcccagtcatgcctccatttcttgttcctttgtgttagcagctgtgaaagggcttctgttgggatctgcttttattttcagctgcatctagccattttctcaatatgaggatctatgaagtagttatcagccctttcctttcatcaggttcaattgacatcaaatccaaaaagaatgcctcagaagtggaagtcccttttgcctaggatccagcccccaggcagattcccctaattgttccatgccacttgtcctgcagcactggcagggagaacttggaaggagttccatgctgactctgcagtctttcccaaatgcaaataagatacttgttttgtgggaaagagttaactgcctgccaggttgccaggcacttatgtaggcattttgaatatcagcttatttaatccatgaaccaactctgaaactgttcaagggcacacagttgagaaaggcacacaaccaaattcaagccctggtatgtttattccaaatgctcttccctacctctgttttatatcgaataatcatttcagcaaaaggaaaggtgtcttctccaggcataaacactggctgatcctttctgtaaggcacgtccaaatattcaacaatgtggccaggcatggttgctcacatttgtaatcccagcactttagaaggctgaggcaggtggatcacgaggtcaggagtttgaaaccagcctggcccaacatggcgaaaccctgtctctactaaaaatagaaaaattagctgggtgtggtggtgcatgtctgtagtctcagctactcgggaggctgaggcaggagaatcgcttgaacctgggaggcaaagcttgcagtgagccgagatagcaccattgcactacaggctgaatgacagaatgagaacaaaaaacaaacaagcaaaaaacaaatattcagcaatgctcatgcatctatctatctatcatctatctatctatctatctatctatctatctatctatattcttaaattagtcacaatttggctgcaacctccaccctgctcttcttctggcttctatggggatgaactctctgacgtgtttctttttcataatgaacaaaaaccagtcctccaaaaaaccaaaaagagaaaatactatgtcttttgtggtatgctcagagtcagtttaactgggaaaacgctgactgtggagggagaagacagcatcaatcttctgggtgaaggtcaatcttctgggtgaagggcaaggaacttcactttcctggccctgagattagcctgttaaaaggaagtatcgagttgggcgacttctaaatgtcttctagtctctactacttatgaatcccagtcatctatggctctcctgcaatttgcacagtcatcatccaaatgcagatgatagttcacccctatgctccactttatgagagaccaggattagctgtggcttaagctctatttggtagaatacttggaatgaagrtgaatctaaaccattaaaagatttagatttctgaagacactgaagggaacttcctgaggttcttttagtattagtaagtatgaaaatgctaattaatttattggcatgatttgctgcctgatgagatgacagcactctgatgctctgagcctgtgagaacttgctaacctcagggttcttataatttagttttacctcctgctgaatcatttttctagtggcatgaatcaggtctcattgg

SEQ ID NO: 687473 - DNA, 648 bp, Homo sapiens
gaattactctactcacataaattgaagatacgggtgaaataatttttaaaatttaatttatcaagaaagactatagaagatgtagaaaacctgaatataccacaattctccgttgataaatttcaggaagagaacagtggagaaggtggtaagaaaaatataattataagctattagttaatcagacaaaagaaaggcaattagaaactctaggaggaagaaaaaaagaagctgcacttcaaggttacacaagtaaaatgaacaaaaagagaatttttaaaagttgaggcttgtaacattctcatttgtgtggcataggtttacaacatggtattacattcccaaatctgcaggtttaattagctcaytttgaacaatagtttgaaattaaaacattacaacttctatttattggctttcagttttcaagatccatgtaagggaaagcacagaacccttaggtacaaaaaggactttgagagaataaaagtgttgctagattgatgaatttagaggggtgctaattacttcttcctacatattgggaattaaaagatagtatctaatataaatagcttaagaaataaaagttaacaaaatattgaattacttgattaaattaataaattaatttttaaaaaattaaca

SEQ ID NO: 687474 - DNA, 583 bp, Homo sapiens
tgataatgcctacctcgcggtgctactgttgtgattcaggggctggaatgaaagacctgaatatgtgactagcacacgctcaatcaatggcccctgctgttagaaactgttatgattattaactgtcatccccactttayagacagcaaggataaatcccagcagatgaagacactaaaccaagctaacccagctggtgggcccgggtctgttctgactcttgatcccatgctcttacccacatctcatggccacaaccaataaaaccccactatgggcaaagcaggccactgtgtatcttgccaaagacattttcatgaccagcccaaagtgaaagaactgtgcgaaggagctgtgtgttctacaattaacaactggaggatgaggaattatcaccttcctgtttaattctctcccttaggcatgaaagtatcatggaaccctgtgccaaggagacaggttaacaacgcagctgatgaaggatgctcatgaattgtgcaggctcctcagcggatgtcaaagcccaaatattccaaatattcctcacgtgcaacacagacatcaattcctctattgggtaagt

SEQ ID NO: 687475 - DNA, 583 bp, Homo sapiens
tgataatgcctacctcgcggtgctactgttgtgattcaggggctggaatgaaagacctgaatatgtgactagcacacgctcaatcaatggcccctgctgttagaaactgttatgattattaactgtcatccccactttatagacagcaaggataaatcccagcagatgaagacactaaaccaarctaacccagctggtgggcccgggtctgttctgactcttgatcccatgctcttacccacatctcatggccacaaccaataaaaccccactatgggcaaagcaggccactgtgtatcttgccaaagacattttcatgaccagcccaaagtgaaagaactgtgcgaaggagctgtgtgttctacaattaacaactggaggatgaggaattatcaccttcctgtttaattctctcccttaggcatgaaagtatcatggaaccctgtgccaaggagacaggttaacaacgcagctgatgaaggatgctcatgaattgtgcaggctcctcagcggatgtcaaagcccaaatattccaaatattcctcacgtgcaacacagacatcaattcctctattgggtaagt

SEQ ID NO: 687476 - DNA, 591 bp, Homo sapiens
aaaagaaggctctgtaccaatttattgcaacacaaagattatcagatagctagtattttgcccatggatctgtatcctccttagttgatactaggaattgtatagcatgatcatagtcctatttctatcacagttcatcactctcaagtaagtgtttactgaaaaaccgatgcagaagatgctttgcgagggttgtgttgtcaacaattttccccagttccaaagctttcagccaagcctctrtgttggtgcactatgaaccaatcttctagagggtgatgataacagaaacaataatagaatgggctcagctcttcaaagccatgtggctttgattattttcactaccaacaattcagacccataaagtaaacaagaattctttctgatctcaaaactgctaggtgaagtcatgtagtgtgtctattttcattaatattaacaataggtaatatgctaataatagtaatggaaaaaatacacgcagttttgggaaaacaaaaacaccctcgataagatttttttcccattaaatgggaaagatgagtttagcttgatgaaactgtttctgtcgttttgagttcccataaa

SEQ ID NO: 687477 - DNA, 603 bp, Homo sapiens
tcagttccagctatgcggtcttagttaagataatgacctctctaaatctgcctcctcaatggtccattagagatgataatacctcaaggggatactgagataattaaatatgtcacatttaaaacctcactatatctctggcacattggaagtaatcaaacattatttcaaagttgtattttattttgttttaatctccatctctagctaaaaatcactgcaaaaaagctttcccctctcctccattttccatagtcagccaaacctgaagcccaaaagtcacctttgagtcacctttgtctcctctagctttttctggctttatttctaactrccaagtctgcagattcaaaattatacctattgatttcattccttctgttaatcctatacttaggtagccccaaaatctgctgatcactgtctcgaggcttactctacagccttgtctcagctacacctcttcccacagtatctattgcagtatcttccaacttctctaagtcttatttcagtgatcctcctaaaatgcaagagcactcctaagtgaaaacctgcaaatggctccttataatctaaataagattccagcttgttaatata

SEQ ID NO: 687478 - DNA, 503 bp, Homo sapiens
tttagagattgccagatatatgcagatggttattaaagattaggacttagtagataattgctaattaatttaaaaatatttttgaatcctactctgtgcatagacgctactgggtactttasgggttgcagagacacatcagcccagtcttttctcaggtagactttaaaaactgcttgaggagataatatatgcagaaaagcttaataatataaggcagctatactgattacttatcatcaaaaagagctcaatgaaagaaatagttatgttaaaaataaatgacatgtattctggatctgtcatcgagttttggaaaacttaaaaatgatgtctttttcatggttaagaaaagattaacgaggaattacagctatgatgctaactcccttaactttttaatcagaagtatgggcagttatcagtccataccggagagacccatacaagtttctcagtataatctgtaaggggtttagagaaagcgtccaagagctcaaact

SEQ ID NO: 687479 - DNA, 1701 bp, Homo sapiens
tgtctcatctcctcttcaaactttaaacttcttaagggcataagaaaattatgttcgaattactgaaatacacttgcttatgttttcaatcttcctaatactttcaaaacctcaatccagattttttaatagagattaaacttgggataattagtataatgatttaaaatatcacgaaacaaggctattatcattggatgttcacagaaagccattaaaaacttttataaagcaatgagtgatgctaatcagggttctgaagcagtattataagcacttcttatttattctatctaaagcacaaaaagtgtaaaatgctttttgctttcaaccggatgtattttcctcatcacaattaacccctgcagtttctttctgcttcacgaggcaacctacttacttctcctatgccctaagaaatggtaaacattatcttgtggaagtttagtttcacaggttcagtattcagtggagaaatggttatgaaataatgacccaagtatgtgggaactgcagaaaataccagattgaagggagtgaaggcagtttaggttcattctcgtcttaagagtctgcataatttcactctagttttccaagatggcatgcatagtctccttcccatcacaagttcagttcttgaccccacacagccaacacttgccactcactgcagcctcacttttagcctcatgtacctcagtccttagtatgttcttctagggatttgagtaccagcctcagggtttgtattttccccagttcacctccaagctggaatacactgaggaatctcctctggaagagagtttgtggtgacagttatgtctttcttttcgttgtgaaactactactgtttataatctatattttctatggtcgctattcagaataggttattttattcactttctttgtttaattcactaagtaagtccaaaaatctccatggcttctgggcacacgctaagaataacaggaaatttattattttaaccactgtgcttagccagaaacccaatataaaagatggccttttactgggccctcaaaatcagaagattaaagtccttttgaaccagaatggaaaatcaatattttcttcaaagtaaagatttttttgaaataaactttaataattaagatatctgtgctatatcgtagggaacacctttttttaaaggctgttttaacaaaattcaaccctgatataaacgtttgaggcaygacagaaaaaacagcaatcaatatttagaaacttattttctttttaaactgaaattatgatctgatctctttggcttattaaaaaaaaatgtcattttgctggatgcagtggctcacagctgtaatcctggcacttagggaggctgaagtggatggatcacttgagtccaggagttcaagaccagcctgggcaatatggcgaaactctttctcaacaaccacaaaaatgcaaaaattagctaagcgtggtggagcattaactgaaaagtccacagtcctaagtctcatctgagacaaggcaagtgccttctgcctatgagcctgtaaaatcaaaagcaagttagttacttcctagatacaatgaggattcaggcattgggtaaatgctgccattccaaatgggagaaattggccaaaacaaaggggctacaggccccttgcaagtccgaaatccaatggagcagtcacatctta

SEQ ID NO: 687480 - DNA, 710 bp, Homo sapiens
ctattcttaaaagaaattttaggaggctgggtgcggtggctcacgcctgtaatcccagcactttgggaagctgaggtggatcacctgaggtcaggagtttgagatcagcctggccaacatggcaaaatctcatctctactaaaaatacaaaaattagccgggtgtggtggcgcacacctgtagtcccagctacttgagaggttgaggcaggaggatcacttgaaccaggagggtggaggttgcagtgggccaagattgcaccactgcactccagcctgggtgacagagcgagaccctgtctcaaaaaaaaaaaaagaagaagaagaagaagaagaagaaattttaaaagatacagcaaagaagatattctttcagtcctgggaaatcccatgactattgctcgaatatatacttctattccagggtttcatgattcattcccaaccttttttccatgtgagtgtaagcagataygcacagggacatcccatgaacagaacaaatggcagtgagtcacctggagagacgctttcccagccataatcaccgatgttgcccaacttgactacaagtagtttccaagatgagttatagtacactcaaaaattatactcttcagcatagtaaagtcattaacatttagttatccatgcttccaaatattctaggccttgggtgtttcagagattttgttgtactgtggacagatt

SEQ ID NO: 687481 - DNA, 655 bp, Homo sapiens
ctcaggtgatccgcctgcctcggcctcccaaactgttgggatcacaggcgtgagccaccgcgcccggccttcagagaacattaagagaagaaatttttcaaagaaaacaattttagcatgtgttccagaacaaatgattcaagtcttccgattgaagggaactcatgaggatgcaatggtaccagaaagaacaatagaccacgtaagaaatgtcgttgtgaattttcagaacataggaggtaagcaaatggttctaaatgtaatcggagaaagagaaaaagagatgatrtattaggagctgggaatcaatggtatcagatttgtcaaaagtaacagtgcagggaagacgacaggcaaatacgacttcaaaatttggatgggaaattatgtctgccttaaaattatatgaaaagtcttactttttttttaacctcttctcaaaagctactggagagatagctaaccccaaattaaaaaataaacacagtgggaaagacatggcaaaaggaagccaagaattcagcacaagtgaggaaggtatagaattttcaggataaaagttgtgtagcaagtccagtggtcaatcatttcacataactcctaaagttgtctctgggagatgtctctaaaaaaagggaaataataaattatatat

SEQ ID NO: 687482 - DNA, 667 bp, Homo sapiens
tctgaaatttaaaggagagccagaaacgaccaggcaggtgcagagtaggtgggatgcagggcagatatttctgctgatctccaggtaagggacagcgcatgggatgatstgagtcaggagggcacatggggctttgcatggcgccctgcatgaagtcagctgtttctgggtgtagaaagcaggggatgggggcgatgtgcacctgaagaggctggaaagcagaatgagccaagctggagtgagtgggagggctcaggagactagaaattattttttcatttaaaaaattgactataggagggcacaaggaaaaagctaaaggccgtggctagagtcgcaggagtggatgatgtcaccaagagggatgcttatggccactggtgtggagcatgatggtgcctcagagagtgctcccagaaaaaagagagccagagggagaaaaatcattgtcagggagagagaaggcctttgccagagacaatcatgagtgccgctccgggtggaagaaatgacttgtagaaagtggtaattttggctgggcattgttgctcaagcctgtaatcctagcactttaggaggcctaagcagatggatcacctgagatcagaagttcgagaccagcctggccaacatggtgaaacctcatctctactaaaaatacaaaaat

SEQ ID NO: 687483 - DNA, 626 bp, Homo sapiens
tcatgcctcagtttcccagatttctattctggggcaaaccaaacacttcttgtagtggacatgctcaccagaaagcactgacacacctgctcttgaaaggctccttcttcttccgtcttcagattctaggcaagacttttgctcaggcaaactgggggagacctggagcagcttcattgcacattaacttcttcaayggattttaatttataattggacaaaaattgttggtttagtggtctccaatatgccttttagttgtagtatttatgaaagcatcaaaacagcacagttctgcctgacacaacccatcatataagataccttgggtcgtccattcaaacgcagagtgctttggatttttcttcctctcagattatggagtacatgcaggttgttttcacagtaggatggaaggcctagttttcattctgtctatcataatgatggccttaattctttgggtaattaatagattctttacaaccaagtatatagaaatgaaaataataaccaatatgcccctgaagcctgtgggacacaaaagcgtgtgtgaagccctcaagcatcctgatacggccatggcctgaataatgaaggcaatttgaagctatcagcttctataa

SEQ ID NO: 687484 - DNA, 950 bp, Homo sapiens
tttcctttttattttcataatggtactttttaataatatcttatttatcaatgttatttcctcttaggattagtgcttcgtctatcttaagacaactcagtatatctgatggcagtaagtcactctcttacattagcctctagttttttaattgggtctcttatatgcccaagtgtgagtgtraggtaagagtgcagtttcactgatatactcattttgatttcaggaaccacttgattcatatcttgtggatatactgcagaaggtcaaaaggtgagaaagaagaggaaagacagcaaagatcatatgaaaacacttttccagagttttgagaggtgattgcaatgaaaaggcaattataaataaaatattaactttgcttccatgaagccagtactcatgctatataaaaaatacatacatttattcaagaagatgcatttacacacatataagtgtatatacacatgtacaaacataactgtatgtatacatatacaaaaatgtcactatagatcagtatttagaaattttttttactatgtttgtatttaattatgggacatctgtttataaattcgtgttggttgaaatttagtaaaatgttgtattttcctactctttcctattttcctttgttcatacagacatagtcaagtttataggtgcaaaagaagaaatgtggagtcaagctaaacatatcatatatataaaaactctttagtagatccatttatatatatgggtgaataataaatatgccatataaatgtaatataatactttttcagatctgaaaaagttaacaatctttgtatagtatgcttaaataattagaacatgaaaaacttccaaatgccattttttattatcctcaatttgctacatagtttaatagttttatttaacacttcaataaaaagttttataatgtatttatttgactatca

SEQ ID NO: 687485 - DNA, 1312 bp, Homo sapiens
ctttatttaatttgaatcaatatccctatgaaatgctggaggaaatatctgatttaaagctcatgttctttctgagcccagtagtttggaatcatggtgtctccaatgaatagactgtaactttgtgaaaatcactttataactctgggcctctgctttattkagtgatcatgttttcatcactaaaaagggattgattatagtactttactcataggattgacgtgaggattaaaggagatgactcgtgtaaggccttcagaaccaggcctgccacatagtaagcacactctaaatatttctgttcagtggactaagagtgaactgaactgtccttaggtgaatgttgaagacacagtcaatggaaatggctcctccgggaaaagaagaaaatggaaatgtatgagcagagtgagaataaaaacactattctgtcttcaagaatctttctacgtctatccataattacttctaactatcccgccatttcctttcttcctgaaacattgtataaccgaaggggactctggcatttctgatggcatcagcaagggtggtatgaggggcggacaatactggagttaactagatcatctggagatggcttagtccaatgttagccacaggcccctgacgctcagctgcaagttccatgattcacttcatggtaactgtggataagttagaaggtggggaggtgtgtaggaacttgtgtgcagctccctgaaagtcatgacatgttcccaaccttagagcgtgttgtctcacaacttaaaccaaagcatggagttgtttggttgctgttatttttctcattttatgatgagttgggaataagtgtatcagtcacatgtttacttagatgacccttagattcctgcttataaaatcagaatattgtacataactctatgcagagcctcgaaagtgaagtaaccctttttaatttcataatatttcattcatttaattacttaattttcactttttttaactttttaagtttgctcctttgtctgagatctaagtgagtctatttctgatctctctattctttttaattgattgctatcagttaattaaccactattacactgttttatttactatagtattacagtatactctagcatgtcagaatccgtattatgctacagtttcacccagcaacttttaaagtaaatattttttaattgaggagaaagaaattcagagtgccctacagaaatattgcagaactgccacgaaatttcatttcactgaaaaatctagaatttgtatttttgctaagtggccttttccccaatatttt

SEQ ID NO: 687486 - DNA, 601 bp, Homo sapiens
caaattttgcttccttatctgacagttaagtctgccagctgaacgtttgacattctgtgcattgttttataataagctgtacaaaactttactcactgctaaatccaattttcatatctatgaaattctatagtgaatattacaaatctctaatctaaatggacatgaggctaggttttggaagatcacagtcctgaatttaagctacattgctgacttgctatataattgaaaaattaatgcaactttcctgtttctcaaatatccttatcaataatggaataatgaaaatgtctggggtataagcatttcactctgaagtccactatttgtgtaaccttgtaaaatcacttgacttttgaacctcaattcttttgtcactraaatatggagaaaaacatttgcagttgatgctacaggctttgtgctaagatccactgaaatatatggcgctatttatattgtgtatgagttgtttccatgtggaaaaagaacaaaaatcagtggctagacatgaaaattcagcagagagcagaactttcaacaaacttattgatgatgatacagtcatcctttattggaataacattatatattggga

SEQ ID NO: 687487 - DNA, 601 bp, Homo sapiens
caaattttgcttccttatctgacagttaagtctgccagctgaacgtttgacattctgtgcattgttttataataagctgtacaaaactttactcactgctaaatccaattttcatatctatgaaattctatagtgaatattacaaatctctaatctaaatggacatgaggctaggttttggaagatcacagtcctgaatttaagctacattgctgacttgctatataattgaaaaattaatgcaactttcctgtttctcaaatatccttatcaataatggaataatgaaaatgtctggggtataagcatttcactctgaagtccactatttgtgtaaccttgtaaaatcacttgacttttgaacctcaattcttttgtcactaaaatatggagaaaaacatttgcagttgatgctacaggctttgtgctaagatccactgaartatatggcgctatttatattgtgtatgagttgtttccatgtggaaaaagaacaaaaatcagtggctagacatgaaaattcagcagagagcagaactttcaacaaacttattgatgatgatacagtcatcctttattggaataacattatatattggga

SEQ ID NO: 687488 - DNA, 1466 bp, Homo sapiens
tttttcaagatgaagagggcacttatatagacaaagaatatatttcccataaagatatattagcacaattctaattaatcttaaatctaagtttttgttccccaagtccaatactcagtctagaacatatgcccttttctgtgatgcctgctggccaccatgtatgatcatggtatattgtgcattgtacaaagtgcccagccaagggctgaaatcaactagtgctctacttatgaggaaytaatccaggcatggcgctgtgtctaccccagaggatgtgccttttctaattttcgtaaagttactgcaatgggccagccctgaagatatacagataacagaatcctatgacttttagatgacattagccatcatgagagcctgcctctctgtaaatggtgttagggtgtttattatcagcagcattgggaatacagttgttttgatgtgttttctgatgccctgttctaaaattcactacttctctgcaggctttggaaagtgggagtgtaaccactggtcctttgggttctttgtgaagttgtgctaaccataagatgccgcatactctcctagtgaccacagtttttatgggaggtgatgtacagcagcaaaagtctaatgtaaatctcatgttggttcttccagagcaggggcagctagagtctaataatttcttgggaagagtttctgtacctggaaattttagatgtatatcaaggacatgtgagcaaatgggaaatctaattgcccagtgcctctggagcaaagtgtagagacagaaccagaatgttttttaccggcacatttctgtattaaactaagggagggaagctctttaactatatgggaactttttctcattggttcctttaagtgtcttaaaaaaactgatgtcttcctaagagaacttgtgaaaggtggtaaaatgtttaattggaacttaagaataacttcctactgaatagctttgttgatttcactttcctgtggggaaaagatagacattgacaaaactgtttcgatgagaattaatcatagctgtagatttcaaggtatgttatgatactaggtttcatctcctggatcttcctcctctacattaaaatgattagaatgataaactcaaggcatattaatgatccctaatcaatgtaaaaaaattatcatttctcttctttatgctgtatttactgtcagaaatacagacatacatattaggaagatttttcttgaagggaattggcacaaaagggttgagacctttaattaatcaaaaaattgaccattccttgaaccttgattgtttggtatcattaacaaaggacatgagacaacatgttcaagctttataatttgctggaaataatattttctttttttttaaaaaaagcaattttttgttgtaattgttaatcttactatatatttgtctcctgaaaatggtgttatttgccactccttct

SEQ ID NO: 687489 - DNA, 520 bp, Homo sapiens
ggtgtagatatctaggagatatctctactcaactccttcaaatctttactaaagatatttcattctcaataatctgatcacctgattttccattgctacactttttgtatctcaatatatcctattcctctttcctttgaatttttctctgtggtacttccacagaactatccatgggtattactggatccaygttcaagctctgatatcatctcttcctagttgctgattctgatggggattgcaggtacatgaatgtaagtgccatgaggatggaggtaactgttttattccctgctatatccttagctcatagaaatgcacttggcccaaaatacacttggcctatagtaggcacacaattaatacttgttgaatgaataaatgaatgaatgaggctgggtgtggtggctcacgtctataatctcagcactttgggaagacaaggaaggtggatcacttgaggtcaggagttcgagaccagcctggccaacccggtgaaatcccatctctactaaaa

SEQ ID NO: 687490 - DNA, 625 bp, Homo sapiens
gtctgccaccctagaaactcaaagttcgttcctttgtcttgtcatttctctaaaaatttattgttcctttgctgagattctatattagctcaaggtcttaccagcccttggagttactcacgtctgagtgctcccacgtgtgagcccaatgcacacactaataaactcctgcttctctcttgttaagcygtctttgtcagtccaatttacaaagccccagccagagaaaggaggagggtggtaggaagaatttttcttcctctacagtttcagactcattttaagtacttaaaaatcaagagtatcattaggtagagatattgctacccaagttcagattttctttttttttaaatttttttaaaattttaagttccgggatacatgtgcaagatgtgcaggtttgtcacataggtaaacatgtgccatggtggtttgctgcacctatcgacccatcacctatgtattaagcccaacatgcattagctatttattctgatgttctccctcccatgctccccgacaggccccagtgtgtgttgttaccctcctgtgtccatgtgctctcatttttcagcccccatttataagtaagaacatgtggtgtttggttttctgttcctgt

SEQ ID NO: 687491 - DNA, 675 bp, Homo sapiens
atgcaatggactggaatagaactcgaatgcaatggattgcaatgtaattgattcgaaattaatggaaktgaatggaatgcaatcaaatggaatggaatgtaatgcaatggaatgtaatagaatggaaagcaatggaatggaacgcactggattcgagtgcaatggaatctattggaatggaatcgaatggaatggtttggcatggaatggactcaaatggaatggacagtaacaaaatggaatggaatagggattcgaacggaatgcaatggaatggaatggaatggactcgaatggaatagagtcgaatggaatggagtcgaatggaatgtaatcaaatggaatggaatcaaatggactggaattgaattgaattgtaaggagcagaatggaatggggtgttatcaaaagatatcgaatggaatggaatgcagtggaatggacttgaatggaatggactggaatggaatggaatcgaatggaatggaatggaatggagtggactcgaatggaatggaaacgaatggaacggaatggaatggattggaatagaaagtaatagattggaatggaatcgtttggaaggaaatggaatggaatggattggaatggaatagaattgaatgtaatggcatcgaatcaatggaatggactcaaatggaatggacttgaatg

SEQ ID NO: 687492 - DNA, 675 bp, Homo sapiens
atgcaatggactggaatagaactcgaatgcaatggattgcaatgtaattgattcgaaattaatggaattgaatggaatgcaatcaawtggaatggaatgtaatgcaatggaatgtaatagaatggaaagcaatggaatggaacgcactggattcgagtgcaatggaatctattggaatggaatcgaatggaatggtttggcatggaatggactcaaatggaatggacagtaacaaaatggaatggaatagggattcgaacggaatgcaatggaatggaatggaatggactcgaatggaatagagtcgaatggaatggagtcgaatggaatgtaatcaaatggaatggaatcaaatggactggaattgaattgaattgtaaggagcagaatggaatggggtgttatcaaaagatatcgaatggaatggaatgcagtggaatggacttgaatggaatggactggaatggaatggaatcgaatggaatggaatggaatggagtggactcgaatggaatggaaacgaatggaacggaatggaatggattggaatagaaagtaatagattggaatggaatcgtttggaaggaaatggaatggaatggattggaatggaatagaattgaatgtaatggcatcgaatcaatggaatggactcaaatggaatggacttgaatg

SEQ ID NO: 687493 - DNA, 675 bp, Homo sapiens
atgcaatggactggaatagaactcgaatgcaatggattgcaatgtaattgattcgaaattaatggaattgaatggaatgcaatcaaatggaatggaatgtaatgcaatggaatgtaatagaatggaaagcaatggaatggaacgcactggattcgagtgcaatggaatctattggaatggaatcgaatgraatggtttggcatggaatggactcaaatggaatggacagtaacaaaatggaatggaatagggattcgaacggaatgcaatggaatggaatggaatggactcgaatggaatagagtcgaatggaatggagtcgaatggaatgtaatcaaatggaatggaatcaaatggactggaattgaattgaattgtaaggagcagaatggaatggggtgttatcaaaagatatcgaatggaatggaatgcagtggaatggacttgaatggaatggactggaatggaatggaatcgaatggaatggaatggaatggagtggactcgaatggaatggaaacgaatggaacggaatggaatggattggaatagaaagtaatagattggaatggaatcgtttggaaggaaatggaatggaatggattggaatggaatagaattgaatgtaatggcatcgaatcaatggaatggactcaaatggaatggacttgaatg

SEQ ID NO: 687494 - DNA, 675 bp, Homo sapiens
atgcaatggactggaatagaactcgaatgcaatggattgcaatgtaattgattcgaaattaatggaattgaatggaatgcaatcaaatggaatggaatgtaatgcaatggaatgtaatagaatggaaagcaatggaatggaacgcactggattcgagtgcaatggaatctattggaatggaatcgaatggaatggtttggcatggaatggactcaaatggaatggacagtaacaaaatggaatggaatagsgattcgaacggaatgcaatggaatggaatggaatggactcgaatggaatagagtcgaatggaatggagtcgaatggaatgtaatcaaatggaatggaatcaaatggactggaattgaattgaattgtaaggagcagaatggaatggggtgttatcaaaagatatcgaatggaatggaatgcagtggaatggacttgaatggaatggactggaatggaatggaatcgaatggaatggaatggaatggagtggactcgaatggaatggaaacgaatggaacggaatggaatggattggaatagaaagtaatagattggaatggaatcgtttggaaggaaatggaatggaatggattggaatggaatagaattgaatgtaatggcatcgaatcaatggaatggactcaaatggaatggacttgaatg

SEQ ID NO: 687495 - DNA, 675 bp, Homo sapiens
atgcaatggactggaatagaactcgaatgcaatggattgcaatgtaattgattcgaaattaatggaattgaatggaatgcaatcaaatggaatggaatgtaatgcaatggaatgtaatagaatggaaagcaatggaatggaacgcactggattcgagtgcaatggaatctattggaatggaatcgaatggaatggtttggcatggaatggactcaaatggaatggacagtaacaaaatggaatggaatagggattcgaacggaatgcaatggaatggaatggaatggactcgaatggaatagagtcgaatggaatggagtcgaatggaatgtaatcaaatggaatggaatcaaatggactggaattgaattgaattgtaaggagcagaatggaatggggtgttatcaaaagatatcgaatgraatggaatgcagtggaatggacttgaatggaatggactggaatggaatggaatcgaatggaatggaatggaatggagtggactcgaatggaatggaaacgaatggaacggaatggaatggattggaatagaaagtaatagattggaatggaatcgtttggaaggaaatggaatggaatggattggaatggaatagaattgaatgtaatggcatcgaatcaatggaatggactcaaatggaatggacttgaatg

SEQ ID NO: 687496 - DNA, 675 bp, Homo sapiens
atgcaatggactggaatagaactcgaatgcaatggattgcaatgtaattgattcgaaattaatggaattgaatggaatgcaatcaaatggaatggaatgtaatgcaatggaatgtaatagaatggaaagcaatggaatggaacgcactggattcgagtgcaatggaatctattggaatggaatcgaatggaatggtttggcatggaatggactcaaatggaatggacagtaacaaaatggaatggaatagggattcgaacggaatgcaatggaatggaatggaatggactcgaatggaatagagtcgaatggaatggagtcgaatggaatgtaatcaaatggaatggaatcaaatggactggaattgaattgaattgtaaggagcagaatggaatggggtgttatcaaaagatatcgaatggaatggaatgcagtggaatggacttgaatggaatggactggaatggaatggaatcgaatggwatggaatggaatggagtggactcgaatggaatggaaacgaatggaacggaatggaatggattggaatagaaagtaatagattggaatggaatcgtttggaaggaaatggaatggaatggattggaatggaatagaattgaatgtaatggcatcgaatcaatggaatggactcaaatggaatggacttgaatg

SEQ ID NO: 687497 - DNA, 588 bp, Homo sapiens
tttatttttttaaacaaaagaggacatctagatatgttcaaatgagctaaaaatatataaaccagtggagaggaagatactatagatacagaaaacagtgatgtacttgaaggagtcaggtgccagagaaaatgtaacagcaggataaagttcccaatcggaagagttatctttgcaaagatgtattttcggtgcttttcctctttcagaataaaaattatctgcattttgcaaataaatgcagattccagaagaaatgtcacgcataattttctctattttatttatgtgttttaagcttggaatggcttatttgttctcttacacatgccactgataattaaggactattcagcatcagtcattgacacgtatttgtcttagatttttacctggaactatttttcttttttttttttttttttttgagacagagtctcgctctgtcacccaggctggagtgcagtggygctatctcggctcactgcaagctccgcctcccgagttcacgccattctcctgcctcagcctcctgagtagctggacgacaggcgcccgccaccacgcccggctaattttttgtatttt

SEQ ID NO: 687498 - DNA, 633 bp, Homo sapiens
caaaattgcctgggctcagcctcaactttgctccatgattggagcaagaactaacagtggcgagaagtcagacagcaggagcaggcccccaggagtgtagagatgcctgggtctgcacctgtgggttgggcgactgttgctgtgcctgggagggtaggggtcctgcctgytcctggctcccaggagcgcaggggtgcctgggtctcagcctcagcttgggaagctatagttgcgcctggggagctcctgccccaccaacttgaaagaggcggcccttcagcttgtcctgggctcccacttgtccccagctcctgcccactctgtggagtgtgcagtcccagccctacctcctgtctgcattttccccagcagcagcagtggcagcccctggccaacctcaaacgagtgaacccgacactcctggggccagccctgtgaattctggctgtgccttcagcagggtgctcatggactcctgggatgcggcagggagtgaggttgaggcagcgacagaggctctgggcctgggagcacgtcctgcccagccatgcaagggtgcgggtcatgcagttggctgcctcagggacatggggtacaggggacccaccgctgccactgctgcttgtgcagctg

SEQ ID NO: 687499 - DNA, 1024 bp, Homo sapiens
  misc_feature 317, 318, 319, 320, 321, 322, 323, 324, 325, 326, 327, 328,329, 330, 331, 332, 333, 334, 335, 336, 337, 338, 339, 340,341, 342, 343, 344, 345, 346, 347, 348, 349, 350, 351, 352,353, 354, 355, 356, 357, 358, 359, 360, 361, 362, 363: n = A,T,C or G
  misc_feature 364, 365, 366, 367, 368, 369, 370, 371, 372, 373, 374, 375,376, 377, 378, 379, 380, 381, 382, 383, 384, 385, 386, 387,388, 389, 390, 391, 392, 393, 394, 395, 396, 397, 398, 399,400, 401, 402, 403, 404, 405, 406, 407, 408, 409, 410: n = A,T,C or G
  misc_feature 411, 412, 413, 414, 415, 416: n = A,T,C or G
atgcataatttctacctcataatttaatacttcattgtattaacgtaaggtttcagacgatttgctttacaaccatatgtggttgcctctattagatagtaagtcccttcaaaacaagagcaccactttatacttctctactggtccatggcctccaggacagcctgggcgactgaagagccaaccagtaaattggtaccataatttaaaattcgtagtataaggtcaaaggcggggttcggacaacagaatttttactttcccctttatgttaagttttctaaggaaaacaatccttataactctgaaatatcttnnnnnnnnnnnnnnnnnnnnnnnnnnnnnnnnnnnnnnnnnnnnnnnnnnnnnnnnnnnnnnnnnnnnnnnnnnnnnnnnnnnnnnnnnnnnnnnnnnnnctgggctggagtgcagtggcacggtggggggtcactgcaaacactgcctcctgggttcaagcgattctcctgcctcagcctcctgagtagctgggattacaggcacgcaccaccatgcccagctaatttttgtatttttagtagagacggggtttcaccatgttggccaggctggtcttgaactcctgacctcgtgattcgcccaccttggcctcccaagtgctggaattacggctcaactattaaatgaaattggtaatttatctcagtaagaatggcttgaagatattatttcctcccctgccccccccccagaatcatattcttgaagtgcttatctttttattgctcaccatatacttattgtagtcatcaaatattttagatattacccttgggtacattaaatatactaggattatgcagttacaccacagtagcttaacttttcctatccaaactctcattttctgaactcagctacatgaggatactttttgagatggagtctttctctgttgcccaggctaargtgcagtggcgcgatctcggcttactgcaacctccgcctcctgggttcaaaccattctcctgcctcagcctcctga

SEQ ID NO: 687500 - DNA, 591 bp, Homo sapiens
cacttcaattagtttggaccatagcatgacatgacctactttagtgaaatatatgcaaacattttcaggcctgatgcccactctaaaatctaaatactggtgaaaaactgataatttttaccagtgcacattctttcaagtagtgagtcacatgtcaagaacaacagaaattattaaaatgtttactctatcatttacatctgttttgtattttatactggaaattaacattgaaaactggaaatcaatacaaagactggatgattactgtctgtactaggggaaccagtaactgagaaacccctgagttgtaagctttgtgatatttaaaaagccagaagaaaaatgatcattaaaaaaagaaatctgagagccaaaatctgagatgctgaaggctcctagaattcagggacagattgcaagtgctctgygcccaaacatagaagtaaataagctacaaaaccaaactgttcctttctttctaacaactggacattcttttttcactgcaccggaaggctgcatcagaaaaatgccccttaattagtttcatctgtgtttatcatgagtaatattttttaaatagatctt

SEQ ID NO: 687501 - DNA, 636 bp, Homo sapiens
ataaaataacaaacccagtgcagatatggtaattactagaaattttacctatacaaatatttgcaagcagtttcataaaaatcaaattattattttgattttagttttattttgattaatttgagtaaaattattttgatttgttttaaaaataatttttaattattttgattaatttgattttagtttagtaagttcctttctttctgaaaagtttattctattgaaaaacgacagtgagggcagccaagatggccgaataggaacagctccagtctacagctcccagcgtgagtgacgcagaagacgggtgatttctgcatttccatctgaggtaccggcttattcacactagggagtgccagacagtgggctcaggacagtgggtgcagcgcaccgtgcacgagctgaagcaggacaaggcattgcctcactcgggaagcgcaaggggtcagggagttccctttcctagtcaaagaaagrggtgacagacagcacctggaaaatcaggtcactcccacccgaatactgcgcttatctgatgggcttaaaaaacggcacaccaggagattatatcccacacatggcttggagggtcctacgcacacggtgtctcgctgattgctagcacagcag

SEQ ID NO: 687502 - DNA, 636 bp, Homo sapiens
ataaaataacaaacccagtgcagatatggtaattactagaaattttacctatacaaatatttgcaagcagtttcataaaaatcaaattattattttgattttagttttattttgattaatttgagtaaaattattttgatttgttttaaaaataatttttaattattttgattaatttgattttagtttagtaagttcctttctttctgaaaagtttattctattgaaaaacgacagtgagggcagccaagatggccgaataggaacagctccagtctacagctcccagcgtgagtgacgcagaagacgggtgatttctgcatttccatctgaggtaccggcttattcacactagggagtgccagacagtgggctcaggacagtgggtgcagcgcaccgtgcacgagctgaagcaggacaaggcattgcctcactcgggaagcgcaaggggtcagggagttccctttcctagtcaaagaaaggggtgacagacagcacctggaaaatcaggtcactcccacccgaataytgcgcttatctgatgggcttaaaaaacggcacaccaggagattatatcccacacatggcttggagggtcctacgcacacggtgtctcgctgattgctagcacagcag

SEQ ID NO: 687503 - DNA, 636 bp, Homo sapiens
ataaaataacaaacccagtgcagatatggtaattactagaaattttacctatacaaatatttgcaagcagtttcataaaaatcaaattattattttgattttagttttattttgattaatttgagtaaaattattttgatttgttttaaaaataatttttaattattttgattaatttgattttagtttagtaagttcctttctttctgaaaagtttattctattgaaaaacgacagtgagggcagccaagatggccgaataggaacagctccagtctacagctcccagcgtgagtgacgcagaagacgggtgatttctgcatttccatctgaggtaccggcttattcacactagggagtgccagacagtgggctcaggacagtgggtgcagcgcaccgtgcacgagctgaagcaggacaaggcattgcctcactcgggaagcgcaaggggtcagggagttccctttcctagtcaaagaaaggggtgacagacagcacctggaaaatcaggtcactcccacccgaatactgcgcttatctgatgggcttaaaaaacggcacaccaggagattatatcscacacatggcttggagggtcctacgcacacggtgtctcgctgattgctagcacagcag

SEQ ID NO: 687504 - DNA, 636 bp, Homo sapiens
ataaaataacaaacccagtgcagatatggtaattactagaaattttacctatacaaatatttgcaagcagtttcataaaaatcaaattattattttgattttagttttattttgattaatttgagtaaaattattttgatttgttttaaaaataatttttaattattttgattaatttgattttagtttagtaagttcctttctttctgaaaagtttattctattgaaaaacgacagtgagggcagccaagatggccgaataggaacagctccagtctacagctcccagcgtgagtgacgcagaagacgggtgatttctgcatttccatctgaggtaccggcttattcacactagggagtgccagacagtgggctcaggacagtgggtgcagcgcaccgtgcacgagctgaagcaggacaaggcattgcctcactcgggaagcgcaaggggtcagggagttccctttcctagtcaaagaaaggggtgacagacagcacctggaaaatcaggtcactcccacccgaatactgcgcttatctgatgggcttaaaaaacggcacaccaggagattatatcccacacmtggcttggagggtcctacgcacacggtgtctcgctgattgctagcacagcag

SEQ ID NO: 687505 - DNA, 593 bp, Homo sapiens
tatcttgtatttcaagccagctaaggtttgtgatttcctttttttatattttaccaatcattagtatatatttagataagagtggatgaatcacaatctccctgggccatcttcagcggttctcagttgtttacaatatattgaaagaaaaataaggtttgtactatatgtgttaggkccatttaactgcaaacataatttttgagaacgaatcaccataaaatattatactgatctgcatgattgtttcataggtttattcacttactgaaaattcataaagctgtactctgaaatttgtacatttttgtgtatgacgctacacttcactattaaggtttaccccctcctcataaaagcaaaaagaaagatatacaggtcaacattaagaggcgtcacatatatgccaaagaccagagacaactgcacatgaaaaataaaataaatgcaatttactgaaacattagatatacaagaagctcacaatgatacttaaagagaaaatgtcactggacactgctggaaactatcaacagcatcttttgaatattcccagtttaaatgaaaaaattaggtattctttattttcaaca

SEQ ID NO: 687506 - DNA, 607 bp, Homo sapiens
ggaaatgtctgttcgttttctttttctgccacctttgttcttttgggcactagtgtagaaactcatctttaaaaattatttggtggtctcactgaaattgaagacatgaatttacttctgatttatttacttttatatgtagttttgattttaaagttaaaatctgagaatacttcttatattgatatattcatatgtaaacacctaaaaaatgtgtgtcattttagatggaaataaactgtttacatttaccaagtacttaaaatgttccagtcactgtgctaagttgtttacatacattatttcacataatcctcacagcagcccaaaatgcgatccctacttgacagaaactaaagcttggtaagtttgtggttggcccarggtctcataccagtaagggagagatcagaggactccagaatccatgaacttaacctttatggtgagctgtgtattttacattttataaacagataaattttttctggggaggaaaatatgtatttaaaatgagtaatccatatttatatctgtagtctttaagcctttagataggcgttagtgccaggagtttggggaaactggaagtctacatgatattaaa

SEQ ID NO: 687507 - DNA, 629 bp, Homo sapiens
gaagatgaaagttgtgcacttacatccaaaatcagtaaaagagcccagcacatgtatttcttttgcaaaaaaaaaaatgcagtaaatgggatgatatttgcaaaattatttgagttcctttacaaatgttggagaacgaatattaaccatgatcctaggaaaagtattgcagaattcatctctacgggagagtgtttaaactaaagccttctctgcttctagccattctccaggatatctttattttcctagccatyagcagggtaatcaggacattcagtttcacttctgacatccaatattgattgatgagcatgaatggataactgacatctcactggcagaaactgcagtttcccctcggccttctcctctgagagccagcacaactcttcctgaattcaaggctgaatcatctccaaggtaatttgcttagcaaaagtagtcttttttcatacactgtgctcagcttgagttcacctttctcaccttcaaatattaaaactcaccccatagaaaatgaatctgggagcctaatcagaatcttcgccttctattctgagataggctcattctcctgagatcatatttgttcagaagacattgaccccaagagtaattggcttcca

SEQ ID NO: 687508 - DNA, 629 bp, Homo sapiens
gaagatgaaagttgtgcacttacatccaaaatcagtaaaagagcccagcacatgtatttcttttgcaaaaaaaaaaatgcagtaaatgggatgatatttgcaaaattatttgagttcctttacaaatgttggagaacgaatattaaccatgatcctaggaaaagtattgcagaattcatctctacgggagagtgtttaaactaaagccttctctgcttctagccattctccaggatatctttattttcctagccattakcagggtaatcaggacattcagtttcacttctgacatccaatattgattgatgagcatgaatggataactgacatctcactggcagaaactgcagtttcccctcggccttctcctctgagagccagcacaactcttcctgaattcaaggctgaatcatctccaaggtaatttgcttagcaaaagtagtcttttttcatacactgtgctcagcttgagttcacctttctcaccttcaaatattaaaactcaccccatagaaaatgaatctgggagcctaatcagaatcttcgccttctattctgagataggctcattctcctgagatcatatttgttcagaagacattgaccccaagagtaattggcttcca

SEQ ID NO: 687509 - DNA, 629 bp, Homo sapiens
gaagatgaaagttgtgcacttacatccaaaatcagtaaaagagcccagcacatgtatttcttttgcaaaaaaaaaaatgcagtaaatgggatgatatttgcaaaattatttgagttcctttacaaatgttggagaacgaatattaaccatgatcctaggaaaagtattgcagaattcatctctacgggagagtgtttaaactaaagccttctctgcttctagccattctccaggatatctttattttcctagccattagcagggtaatcaggacattcagtttcacttctgacatccaatattgattgatgagcatgaatggataactgacatctcactggcagaaactgcagtttcccctcggccttctcctctgagagccagcacaactcttcctgaattcaaggctgaatcatctccaaggtaatttgcttagcaaaagtagtcttttttcatacactgtgctcagcttgagttcacctttctcaccttcaaatattaaaactcaccccatagaaaatgaatctgggagcctaatcagaatcttcgccttctattctgagataggctcattctcctgagatcatatttgttcrgaagacattgaccccaagagtaattggcttcca

SEQ ID NO: 687510 - DNA, 608 bp, Homo sapiens
accagcatttcttaatggaatgaaatagcatggaatagcatagcactgctcagcatagactagaattgaaaccatcagggtgcctcaactgtcttgtgaatcttttatttcaggtagatgygtatgtgactgtatgtatgtgtgaggaaaatgattctacagtagaatatgtcagaacttttggaaaacactcttccagcatgcctttctgtacctccatcattgggaagctgaatgctatgattccaggaatcccttgagaaaggattccagatgtgatttggatttagccattagatgcccgagtgtgagatgtggacgatggcagtggtcacacctctactgccacagctatttctgatggatgctcttggacttctgtggcatcattagcagaggatgcagaatatggtcactattctgtggttcctgagaggcagggtaaaaggcacacattttgtggtccagatagcagcaggtgcagtagggttctagaattagcagtaggagggaaggcaccctgaaagcggtggcttcaggattagggtcgtatcaatgcaattctgcatccacctaggcgtagcagcagcagctctcttggtggttta

SEQ ID NO: 687511 - DNA, 608 bp, Homo sapiens
accagcatttcttaatggaatgaaatagcatggaatagcatagcactgctcagcatagactagaattgaaaccatcagggtgcctcaactgtcttgtgaatcttttatttcaggtagatgcgtatgtgactgtatgtatgtgtgaggaaaatgattctacagtagaatatgtcagaacttttggaaaacactcttccagcatscctttctgtacctccatcattgggaagctgaatgctatgattccaggaatcccttgagaaaggattccagatgtgatttggatttagccattagatgcccgagtgtgagatgtggacgatggcagtggtcacacctctactgccacagctatttctgatggatgctcttggacttctgtggcatcattagcagaggatgcagaatatggtcactattctgtggttcctgagaggcagggtaaaaggcacacattttgtggtccagatagcagcaggtgcagtagggttctagaattagcagtaggagggaaggcaccctgaaagcggtggcttcaggattagggtcgtatcaatgcaattctgcatccacctaggcgtagcagcagcagctctcttggtggttta

SEQ ID NO: 687512 - DNA, 649 bp, Homo sapiens
tcttcacagcagctctaccatgctgaaagtgagccccatgctgctcaggcttttacgaagggaagggaccacctccccttccctacacagaatggcaccatcccggaaaaggaagacagacaaaccatggaggtacctgctctggtctgggggaagagactctcccctcagcccattttggtggtagtcatcagaggggcatactggtggcctgcagccacactgtggccaaaaaccaaaggaccaagtctttatgaaatgaaagtcatgagccctgcaacaggggtttgatagggaagcaaatcacttttctgctggctcagggcgaaaagcaaggacactccccagcccctcccctaaggcctcagcacacctacacctcaacaccatctcttcccacccactcctcccccaaaacgcatcaaggcacctgctttcactggacrtcagcctacctgccagctcttactcttaagcaccatttactggactgcagtttcaactgcactaccaaatacaaaatctgctaccagaagagcttagtgctattccacaaaataagtgccccaggactctgcacccccagccctacagaagatagaatatctaaacaggagaaagaattttagatcctgacaaccagtctttc

SEQ ID NO: 687513 - DNA, 1427 bp, Homo sapiens
caaatttgtaattctagaacacgaaatagtaagaaatgtggaccaagtttataaactaagttccactgtaatggttacaataatgaaaattaaagaatggttataaaggtatgatatggactatatgaaaatataaagtaaaagctggcaaactttttcttaaagggccagattgtacataacttaggcttgtgagctacatggtctctgtcttatataactgtgctgttgtagtgcaaaagtaacaagagacaatatgtaattaaatggtatggctgttctaatattttgtttataaaaataggtggtcaactgtgggtcatagtctgctaacccctaatatagagaatcaaaatttttttaaggaagtggaggccgggcgtggtggctcacgcctgtaatcccagcactttgggaggccgaggcaggtggatcacttgagatcaggagttcaaaaccagcctggccaacatggcaaaacccccgtctctaccaaaaatacaaaaattagccaggcgtggtggcaggcacctgtaatcccagctacttgggaggctgagacatgagaattgcttgaacctgaggggcagaggttgcagtgagctgagattgcaccactgcaccccagcctgagtaagagcgagactccatctcaagaaaaaaaaaatgtttttatggcaccagataaagatgaaatattttaaaagtttaaaactggcccagcatggtggctcatgcctgtaatcccagcactttgggaagccgaggcaggtgggtcacctgaggttgggagtttgagaccagcctgaccaacatagagaaacccagtctctactaaaactacaaaattagccaggcatggtggcacatgcctgtaatcccagctactcaggaggctgaggcaggagaattgcttgaacctgggaggcgggggttgcggtgagccgagatcatgccattgcactccagtctgggcaacaagagcaaaaactcaatctcaaaaaataaaaaagtttaacagcatactttatacttctccaaatctccacaaacagcatgctttactttaatatttcggggagaaaagtcattttaagaaagatgttggagtgaatcagcaatacagtcaatttttctattctgtttttggtaaagtctaatgatcctagatgtacctggggcattttccagaaaccaaaatccaaggtaacttctgtgatcaactatctttcaagccattaacttctgcagctacagcatcccttaaagtgtggcccaataatcttcataataatgrcacactgtgccatcaatgaagaccaaattatgtgtaatatattttttaaaaataaaggcaattttacggtacttttaacaagcaattaaaagttagcaagagctaattataaaagtaatttcacccaaca

SEQ ID NO: 687514 - DNA, 1312 bp, Homo sapiens
taaaaagaatggttttgtttttgtttttgtttttaatatggaggatgaaaatcacctaccaaacaacaattccatagctcttggtggcaaccataggcaaatcttgggatttgagaacttgaaaagaagctaggaattaaataatcaattagttttcagtcttgataccatacttctgtgttatatgctacaacttagtagttgctaattaatgataaagtagtgccatttgtaagagatttgcttatttataattaaagttgttttaagattatttttacttaagatttggcgtgtttccttgaatgagggagccaggataacatagagtcgttgcactcttgtgctaacttgcagtcagtcttatttggcctgtgtgtcttatcacaaaagaaaaaaaataaagatttgagaactgttactttggtacaacagttctgcttctcttctctgtgggttttgtttcattggctctttcttttctgtttttgttttgttttgtttttgagacaggatctcgccctgtcacgtaggctagagtacagtggtgcaatcatggctcactgctgactcagccttctgggctcaagtgatcctcctgcctcaccctcccaaacagctgggactaacatgcccagcctttttttttttttttttttttttttgagatgggatcccgccttggcgtcttaaagggctgggattacaggagtgagtcaccacatctggcccctcattggctctttcaaatgcttgatttgaagtccctttgtctttctctcagtttcacctccgaggtcccagacctcttttattcccctaaatatcttcttaaaggcagtgatgtgctctagctcccacttaagtaccatgattttttttttagctgaattatatgataatttgacaacactgtcttctctttgctttcaatttctttctggtgaatctgaatttcagaaacactcatcattgcctagagattcagattctytcattttaactgagatctggaatccctgataatgcactaatactgaataaaggcaacattttttcagaacttccatctccagggcccctgtaaatcataaagtttataacattttacataatttaggtgtcctgtgtgagatttcaaaatatctacattttaacaagtttaatcgatattctaaagattacagaaattatctgttgcttataacctatgtgcaaaatggcactaaaatataacaaaatttaaggcaattgtttttgcctcctaagaaacgtacaggctagctagtgatattttaaaaaacttgaaaac

SEQ ID NO: 687515 - DNA, 1149 bp, Homo sapiens
aatttcaagtttaccattactgtttttcaacgttattcaaaatgtccatattttgtttcattatttaactagatatcataatattttaagtccaaatatatttttaaaaaaaattactttaaaaacatataaatccatcgtttgtaaacaaaaagaagatatccacattaaaggaacaataagtaacagattcatgcagtgtactcagtctgtcactgaaaaatgctgtttcttcaaaagcaaagatttcagttttcattattatccttagtatttcaacatatactttctgtagacatgtgttactttcatgaataaattacatgttagaaatcaagcttagaaagtattctttaaccaatcttaagatgtaaggtttggttttattgatatgaattggttgtcaggaacataaaagataaatttattgattttgctttcttcatttatagggagttaatcaaattctcctcctttccatcaaatatcacccacacctttccactgtgtctaagggctgacagctaaatgcttacttcgagttatgtggttacttgagaaaaccaggtcattattggagaagagcaaagtgatgcctagagggacggatggggaaggagggtaggaattgctgaaaagggtgaggggtaaggtgcaaaaaagaacattacctatcccccaagtctgtctgtgtttgggacctttattctcagtcatatggctactggaaagatcttagaatctgttttacrtagaatctctttgaaaatataacatttataatcctttagggcagcaacttttttttttttctgactagacactggtatttgggagacattaaataaatgtttgcttaatgagaatgttacatatttaaataggtggtacttttattatagccattattgtaaataccttgatatttccatttggaatggttgcttcaacaggttgaaaagtagagaatcttaaagagtatgtgaaattaactttcagaatattctatcagttgagcctagagtaagtcagatgtaacagatgaaattaaacgagcaaatttcccagttaaaatatcagtgaagatatctgaagacttgcaaatctgaaattacaacatgcaatggtagtgttacaattcagatgaca

SEQ ID NO: 687516 - DNA, 607 bp, Homo sapiens
gtatgaatagtattttaagtgaaatataacataatataatgtggaaacattattttactatagaacatactttctaaaaataaagtaatttcacacactgaaatgttagaatggaaataatgtcatgctgaataacaaaataaaaacccccatgactttcaaagtccacttcaaattaaatatggcatactgctgaatagatatatgaagattaaaaaaataactagcccaaaatagaaggttttcatacacaaatacgatttatgtagagatttcttttaacataattgcaatgattctgtgagaaactaaagtgaatgttttatttaagaattttkttcatttggtcatcacatttttgttgaacacctactttgtgctaggctttgttgtaagtgctggggacacagaaaaaaaaagacaatcctgccctcgaggagctcacagtctagtgggggaaacagataggttgacattgattttaaaattataaaaattattaaacaactttataaacttcacttgcaatcaaacaaactttgggtgttatgaatggatggtaaaaagggatgatgtccaatgcagtgaaaaaccatctgcttcgata

SEQ ID NO: 687517 - DNA, 1036 bp, Homo sapiens
gagatggagttttgtacttgttgcccaggctggagcacagtggcgcaatcttggctctctgcaacctccgcctcctgggttcaagcaattctcctgcctcagcctcctgagtagctgggattacaggtgcttgccaccatgtccagctaattttgtatttttagtagagacggggtttctccgtgttcgtcaggctggtctcaaactcccaacttcacgtgatccgcccacctcggcctcccaaagtgctgagattacaggcatgagccaccgcgcccrgcctatgaagttcagattctaatgggggtaaggggatcaaaacaaaagtaaacagacaaaactgttacaaatagtagggaccatgacagtacctctttcactgggttgctgtggggattaaatgagataacacgtatcaaggccttagtgcaaaaactggtccctagtccatgctcaattaactccaagtattaaaatttttgttatgatctcaccccaggaagatccatctttccagcattaaaaagcagcatactgctgacaaaaggatgtccacccagtatttatttactgtctcaaggtaagcattatcttcaaaacccaaaggcacatgtgaacagcagttggggctggggatagggggagggatttaggactatcatcactaagagcacaggagggctctggagtctgagaggactgggtttcaatcacagctcactgtgcattagctgtgtgatcctaggcatattatgtagcttctcctaggcttggctttcccatctgtaaaatgagctaataatgatgccacagattggttttatgagcagctaatgaaatgatgtatgtaaaccatttagcatagttcctgttgcatagtaaactctgggtacacataatatactttctaaattataaaattagggtagttcaattcatctccaaacacatcttggagtgcattttcaagggtctgtctggattcccttagcctgcttcccctccttcacatcctataacactcatttaaaaaaaa

SEQ ID NO: 687518 - DNA, 1376 bp, Homo sapiens
tggtgtccttacacgaggagaaatttgaacgcagacacatgtactcagggagaacatcatgggaatgtaagggcagagatggtggcgatacttctacaggccaaggaatacaaaagttgccagaaaaccactggagagaggggcatggaacagattcccacagctctcagaaaaccaaccctgtggacaccatgttcttgagcttcacacctccagaactgtgagacaacaaatagctgttgtactttaagccacgcagtctgtgatactttattatagccgctctagcaaactaatacaattggtctctgtaggtgtccagaactataatatataagctccagaggtggatcagcagggtacatgtggccactgagcccaagacggaagaaaacccataggaaaaagcaggcacaagaggtgcacaagaaatcctcaatccttcctaagcctatttctggttccttcctgaggtcttgtttccaaggtatgttcatcacatcccacattctgcttgagctagtgctagaggatttctgtttctcctaactgatacctcaggggactgactatttatagatcttgaatctccaatccacaataatagtaacagagcagaccactagcatgtagaattcaataacatcttattggataagacaatccataagtatgcaaatacatttatctgacacaaactgatcagtagccacaaatccaagaaggtggttgctttaaaattcacaggaacttctaggcagaatgagactgcctagaaataagaagggaagaaggagacattatttggtgccaaaattagacaatatcagacaaaattagataatatcagatttggctgtaaggcaaaggacagaataaaatgggaccagtttgtacttttgctctctgcccctatacctttcctcctctcctttggtaaaagtcaccctctccctacctcttccccttccaaccacatgattttgctgcaacttccaatgacaattcctattcgccctcaccctagggtcattcacacgtctcatgccccctttcccaggccatagtgattatttcagtaaaaatctatcatccaagtctggcctgtcagaatctttctcttggattttgtgcactgtcaatttgtcagctcaygtggcctgtttcggatttatgaagtggtagaaagagaagaagaggaagagagaagacaaacagacccttgatggttttgaagttcctgaatcctggcatccccaggctagttagacctctgctctttataaccttcctcttggctgcagttagttcaagttggttttctgttgcttacagcccaaaagctctgatttgtagagagaggatataaggcttta

SEQ ID NO: 687519 - DNA, 607 bp, Homo sapiens
tactgaattttttttaaagctaggtcctcatactcctttccccatctagtatatattccatgggtacctaatggggttaccaacttatcgcagtttgccctgttctttcctggttttagcactgaaagttctatgtcctaagaacccctttccctttcaggcctgggcactgtacttcctaagtacttggccagtataaactcacaagctcaaatgccttcagaggctgtcagggactgaaaatgagaggtgacctggcttagggtaaagtggaaacctgtcagaaggcattgaaagatgaataaattgggtcaaggagctaaagtcatttggtggctagcattgcagccttgagacaacaacgtctggctaaagttaactgaagaaggggcagggataattctactgtgtatttaactytgattatttttcccccaaaacaaaaatgaaatgattaagtaccaaatccttattagagctgacaagtcactaccctgagattattaacaagttacttaacatctctggatctccatttccttatatatgaaattgaaatttaaaaagaaaccactggctacacagaattttgggaattgaattagat

SEQ ID NO: 687520 - DNA, 1376 bp, Homo sapiens
aattaaactattttcacaactgtaggctaattatataagaacagagatgtgtttactatactgttgtctttgtgccatgtgaaggtcaaatgacattgtatggacaaaagcttctcagtgcttaaagacaacgggtgggagacggcagtatcacaagatatatggcagtcaggagtgctaagctcaaaacaactgttcatagcaatcaataacatcgtcacattgaaatggtcattccagggcaagattgtccatcaaaatcttgctctgaaatacaacttgatgttatccatgctaattgaagttgttttgattttttggctttatttttatttaatttataaattaattttgtttttgcagtcataagagaactgcaaatatagaaaatacatatccagtttgatatttgtgcatctttacataacaaaatagcgagtggatcacgaggtcaggagatcaagaccatcctgactaacacggtgaaaccccgtctctactaaagataaaaaaaattagccaggcgtggtggcgggaacctgtagtccccactactcggtaggctgaggcaggagaatggcgtgaacctgggaggcrgagcttgcagtgagctgagattgcgccactgcactccagcctgggcgacagagcgagactccttctcgaaaaaaaaaaaaaaagaataatttaaatcaacattggggatccaaaatatgtttttccttttatatgtcttataatgttagaccttacttaagtttgagaaaccctagtttgaagtgtcactgaaagggctaaggaggcaaatattcatgagtgatatagaacagagcagtgattaaaggctttagtatcagtcttaattgaattacagtctgatttctatgctaaataatcatcatggaacttaacttttctaaacctttgtttttctaggataaaatgggaatacaaagaataatcatctagagcagctatggtgattcattgagatagcccttataaagtgctttgccctttaagtggcagaatagaggtatagtgaagaatgggaactccggagcaagacagtctggctcagatcctaaggatgccgcttgctaattgtatggtaggttacttgacctccttgcacctcagttttctcatctgcaaaataggaatgataatagtgtcaacctcatagagttgatataaagaaaactgagttaattaatgcaaggtacataggacattgcattagtaagcacactatgtttcttcttactattagcacagtgtttgatacaatagaccttaaaaaagtttagctgattttaaggcaggctttagcttaatttggcaccacaacaaaatctattccacgtacagggatt

SEQ ID NO: 687521 - DNA, 1335 bp, Homo sapiens
tagttattgaggaaatacccagataaaaaatttattctaggcattttcagttctttaatgataatgacttaaaatgtgatctccaaaggaattaagacaccttaaatacattcaaataagtgtttatattctgattggtgaaaatcaaacatgtgttttccagtgaaaggatgataatctttggttttatttctctcatttttaagatgtcaaaatttaataaaaaatctcatttggtccttatgattacttttatgccaggtcacaattaacagcatgatsagaaaaacagcattatgagaaaaacgcatacacttagagagaagaaagtcttcacttattcccatagatgacaacagagatgatatttactaacttctatacaaaagatactttaaataacattatgtatattttaaacatttgaagtgcttatcattgaactaaaacccataatggtttctttgttcaaatgcactgatttatttctcgaatttcatggaaaaacttttctcctgttgggacttgcaccatcacagaataatttctaaagaactcatttgtttattggatagagtagctctcacttcaacattcatttcatcctgtataatttgtctaatcaaactaacacatttctttttttttctcccaggaatttgcttagcagagggcttgggacccaattcagtataatgagatgtgaggggaagtccacaggagtacttctgggaaacattacaggatgctaataaagtgcatatctattttactctgaaaatttctgtgtccaggtttcaaatgtagaactattgctgccattttcctataatccaaggatggagacaacagcatgtatgcaacagaaaagatgtgtcaagaacctggacctgctaccttattgttaaggcagaaaatcaaccaatttaggagcaatgtcgcaattctgaacattctgttgtatttattatagctgatttactatagcgtaaatccaatgaatagctgattctattatttgtagctgaaaggtatacatataaatatacattttctcacaaatattttaaataattccgtgagaagaaaataatatgtctgggtatatgtggaactcgtgaagcatttgattaaaattaccataaaaacaacagtaatcatatcaagtttagcttagtttgtttgttttgagacaggatctcactctgttgcccaggtgggagtgcagtggcacaatcatggatcactgcagcctcaacctcccaggatcaagcgatactcccgtctcagcctccctaatagctggtaacacaggcttgtgccaccgtgcccaga

SEQ ID NO: 687522 - DNA, 654 bp, Homo sapiens
ccattgcacttgccattctgtgttttttgacagtgccattaccctgcagtttccaccaaagtgcagattacaaagaggatactgcaaaggactgggtgctgggttctgcttgacttagcagttctctaagtgaggctttatgtgtgtgtttgaaaactgcatttgtgacctgatgattgtttttgtggctttcctgtgaagtacgaagtgtgctgagatctgtccagrgggggtaagccctatggcagtgaagggagaggggcatccaccaaggtcgcctcttttggcagtctttctatgatcagaggctgagcagctaggcttgaaagctaataaagctttgagagaggagaagttaaatgttaagtcatacttttcatttaaaggtgcttacagtagagagacgcaattaccattatcctcgttaacaggtggcacaggcagcccccacgacaatgtttttgtaccagccctaaaggcaatgatagagtgatattgaacttttccatttctgaaagagagagagggtgtgtgtgtgtgtgtgtgtgtgtgtgtgtgtgtgcgtgtgaaaaagaagtttgtattttgtttgataattttggcttagggactgaacaaattatctcaacccacaggatccctcataaattcttt

SEQ ID NO: 687523 - DNA, 654 bp, Homo sapiens
ccattgcacttgccattctgtgttttttgacagtgccattaccctgcagtttccaccaaagtgcagattacaaagaggatactgcaaaggactgggtgctgggttctgcttgacttagcagttctctaagtgaggctttatgtgtgtgtttgaaaactgcatttgtgacctgatgattgtttttgtggctttcctgtgaagtacgaagtgtgctgagatctgtccagagggggtaagccctatggcagtgaagggagaggggcatccaccaaggtcgcctcttttggcagtctttctatgatcagaggctgagcagctaggcttgaaasctaataaagctttgagagaggagaagttaaatgttaagtcatacttttcatttaaaggtgcttacagtagagagacgcaattaccattatcctcgttaacaggtggcacaggcagcccccacgacaatgtttttgtaccagccctaaaggcaatgatagagtgatattgaacttttccatttctgaaagagagagagggtgtgtgtgtgtgtgtgtgtgtgtgtgtgtgtgtgcgtgtgaaaaagaagtttgtattttgtttgataattttggcttagggactgaacaaattatctcaacccacaggatccctcataaattcttt

SEQ ID NO: 687524 - DNA, 1049 bp, Homo sapiens
cggggcagactgcttgagcccaggaattcaagaccagcctgagcaacatagggagacccagtctctacaaaaatgtttttaaaaaattagccgggtgtggtggcactcacctgtggtcccagctactcaggagactgaggtagggaggtcgaggctgcagtgagctgtgattacaccaatgcacttcagcctgggcgacagacattgtctcaaaaaacaacaaaaaatgttcccttggcaagtaaacagtaggagaggaatctccttccagccatgtggattgctgggaagaaggcaatatgctaatggtgatcaagtaagaaagtgctctcctatagcgtatcctggaatggagaccatcctttgagtattttgtatctgcagtttgagatactctgtgtagtttacaaacacttaaaaaggaggaataaattaacatttattgagcacttgcactcatgatgtatgtgaagttatttaatattcataataatactataataaaaaattgctatctctagtttgctgctgaggaaaattcaattcagtgttagtaacctgcccaagattacgagactgagaaatgacagaaataktacctgacctaaatccaatggtatagcagcccattcttttcactacaaattggaggtgtagtaaacaaaaaattgctatcagagaatctttcagagaatctaaaaactgcaagtgacagtaaaaaagtagagtttacattctgtatagaaaaacaaaagtcctttttacaagtatctctgttaaatgattcctctcctaggctacaggatatgtgcaacaggtacacacagtgggcacatggaaagaaaatatgtatacttaccattggtagacaataaaaactgagcagcatttttctggggtaaccacctaattttgttgatcttttcttctatttctaaacttttcaagtagtcaaactctggttcatggctctggaaggtgctgtaaacattatattctcctctgctatgagactggattttgttctaaaatgaaaacaaaaatatatg

SEQ ID NO: 687525 - DNA, 1154 bp, Homo sapiens
tttgaactactctggttagcattaatatctcagcaaaagtgagaattataatcatgttcagaatttcatcttttgacctattatcacacgattaaaaacattttcataaaaaaatttgaaagtctagttcaaagaaccacctatggaaaaagtttaagtaaaaaatagaatgagatattattgacagtcaactattttaagtaaaagtgagttacccagtgaaatgtttagaacttcttgataataaaaacagcctattactattctccatatcaaaaggaaacttcactgaatcatcttgaaagtctatgttttgggttgttttttccagcagcctgatgatctgggttgttcattcatggatggttgtatttgaacccttggacagcagttatcagttattagagggcaagtctgccaatgttaagaatacatgtcccacaaaacgatccacatatcggggatacacaaggggtaaaaatcagactcagagccttggtctcatcaccatacccatacacaaaattagacagcctattccattaacatatataaatactccagtatcactttaaagctccacaaatcttttacctaaaatgactcacccagtctcacaaaatttatcattatagtctacaaggaaaccacaataccattaagcaggcaactcgatttttaatataaatcctgcattttagactggtttttcatttaacacttaaagagactataatatatagtactatgtacactagggcgtagagggatagacagaatccccacattcaagtaacttgtgtacgtcaaactttagtcaaagtagaaactggttatggtctacacaattaaggtaagcaatatgaagggccaagggcgagccacacattgtatttgatgagttaagaaaagcacaaaacaacagaaatattttctgaaacaaaacatgaacatcttcctgtagactcgtggacaacaacacaggtctactaaacatggtatcttacagaatccaaaaacaaaatcatagaggtatayggcagtttcgtggactgcaagaagctccatctctttgcaacaggaaataaattaatgtatcacaaaaggagaaaattctgtctaaaaagctcaagatgccaggctgagcacatgca

SEQ ID NO: 687526 - DNA, 1415 bp, Homo sapiens
ttttcagtgtatatttaaataaagattttaaaatatataccacacatatgttgcagccactatggaaaacaacgtggagattcctcaaaaaagctaaaaatagaactaccatataatccagcaatcccacttctggattttatcccaaagaactgaaaatgggacctcagagaggtgtttggacagccatgcccattacagctttattctcaagagccaaaaggtggaagtaacccaatcaatggttccaacagtctcttcgtctccctaactggaaggcagtatttcaacctgagaaaacattgacagtacataaaactaaacattacaaagtgatatgtacaacatgagtctcattctgtaaaacaaaacaaaaatccccaacaaaacacacacacatctacccacccaccaaaactaagcaatattattttcccttaaatgaacaaaaaattaaaaatgtgataatgaccattgttttagtgacagaaaggcaaagtcacatactactggtagaagtataagctgttcccacaagccacaagtttattgaaccttgtcacctaagttataagatggagtatgttcttcccaactattcaagtgcccctttctactcaatggttccaacagtctcttcatctccctgactgggaggcaatatttcaacctgagaaaacattgacagtaaataaaactaaacattacaaagtgatatgtacaacatgagtctcattctgtaaaacaaaacaaaaatccctgagaaaaccacacatacatacacacacacaggtcttcatttttcattcctgttatgggatggttttgattttattctttgtggaaatgatacacatttttcctattttctgcaataaacatactaagaatagtcaagacttaaaggcaaacttctgaaagaatttcacttaacatttttcaacagctacttctaaatataagtaactccattgtgcttttayaggctgagtatcccttatccaagatgcttaggaccagaagtgtttcagatttcacatttttttccatattttggaatatttacatattcatgatattatcttagggaggggacccaagtctaaatacaaaattcagtggttttgtatataccttatacatatagcctgaaagtaattttatacagcattttaattaattttgtgcatgaaacaaagttttgactgtgacccatcacatgaggccaggggaattttccacttgtggtatcacatcagcattcaataagtctccaattctggaatactttggattttgggttaggaatgctcaacctgtactaactttctccttccttaaatgaaactctgcaaaaatgtaggaaatatttactttgctccgtggaaaaaatttaaaaatttaagaaaataata

SEQ ID NO: 687527 - DNA, 1415 bp, Homo sapiens
ttttcagtgtatatttaaataaagattttaaaatatataccacacatatgttgcagccactatggaaaacaacgtggagattcctcaaaaaagctaaaaatagaactaccatataatccagcaatcccacttctggattttatcccaaagaactgaaaatgggacctcagagaggtgtttggacagccatgcccattacagctttattctcaagagccaaaaggtggaagtaacccaatcaatggttccaacagtctcttcgtctccctaactggaaggcagtatttcaacctgagaaaacattgacagtacataaaactaaacattacaaagtgatatgtacaacatgagtctcattctgtaaaacaaaacaaaaatccccaacaaaacacacacacatctacccacccaccaaaactaagcaatattattttcccttaaatgaacaaaaaattaaaaatgtgataatgaccattgttttagtgacagaaaggcaaagtcacatactactggtagaagtataagctgttcccacaagccacaagtttattgaaccttgtcacctaagttataagatggagtatgttcttcccaactattcaagtgcccctttctactcaatggttccaacagtctcttcatctccctgactgggaggcaatatttcaacctgagaaaacattgacagtaaataaaactaaacattacaaagtgatatgtacaacatgagtctcattctgtaaaacaaaacaaaaatccctgagaaaaccacacatacatacacacacacaggtcttcatttttcattcctgttatgggatggttttgattttattctttgtggaaatgatacacatttttcctattttctgcaataaacatactaagaatagtcaagacttaaaggcaaacttctgaaagaatttcacttaacatttttcaacagctacttctaaatataagtaactccattgtgcttttacaggctgagtatcccttatccaagatgcttaggaccagaagtgtttcagatttcacatttttttccatattttggaatatttacatattcatgatattatcttagggaggggacccaagtctaaatayaaaattcagtggttttgtatataccttatacatatagcctgaaagtaattttatacagcattttaattaattttgtgcatgaaacaaagttttgactgtgacccatcacatgaggccaggggaattttccacttgtggtatcacatcagcattcaataagtctccaattctggaatactttggattttgggttaggaatgctcaacctgtactaactttctccttccttaaatgaaactctgcaaaaatgtaggaaatatttactttgctccgtggaaaaaatttaaaaatttaagaaaataata

SEQ ID NO: 687528 - DNA, 1366 bp, Homo sapiens
tttcctctgaatttacatggaaggagcggtagatgatgagacatataagatcctcacatgaaagctctgagctccatataagggtttctttgttatgtaaattccacatacaaataaatggtgatgcatttttatgtttgtacattgkttttagataagtaaattgaaataggtgccatcaacatttggctcagaaacattcttaacggcatctttgatttttatgggaagattttttaactacttttgaatttgtccactttgggagtgtgatgctgcttggcatattctgtgaagagatgatagctcagattattcattttgttgtctttctggtatttaggtggataagacagtaacaatgctatgcatatatcgcttgtcttttaggaatcgtatattcttgtgcaggtagaaactgtgtttgatcagttgaagtacttacgtctaattttctccccaaatttattttctaacgtgtttcagaagtttaagttttgaaacttcaaggttttgcattcatttgagatggtcttaggcagcggaggcattttccacaaagttgttgcattgtttcattcctgagaaatgttgaagtttgagttttaatggtattgtgtgtcttgaattacagtaggaattttccaaacaaaactcagataaatttaaacatgtacttgtgagttttaaaaatttggtgaaaattcataaaccttttttccctagattgtgttgtcctcatatttctgacctgtctgtagggtactgtttgttctggagattttttttcaggtggtgggtggtagccgaactctcttatttgcttgtgtcagtgtcatccttaattgtctgttttagagtgtggtgaatcctatggcaagccaactggtgtagattatacttgtcatattttgcagagctctctcacgttccttttctattggatcctcatctgtttcttagatgagaaaccagaaacaaaagagactgactgatggtcatgcacatagtgtaaatcaaggttttctgatgaagtcagtggtgtttgacttgttcagagaagtaagtcctgacttcaagggaggagttgtgtattactcatgttgtaactacattacctgttgaatagtaaacactccagtattggatcattagttctgtgcagttgtgtaatactcaccaagttatgaaagtgctgtatacttggaaaatgttctttggttgaattccatttattcccttaggaaagttcccctaaatgctgagcactgagggtacttggtgtctggaacataaactctgcccacaaggagctcatagtttgcttgttaaacattacgcagaaagatcacatggcttttattta

SEQ ID NO: 687529 - DNA, 1366 bp, Homo sapiens
tttcctctgaatttacatggaaggagcggtagatgatgagacatataagatcctcacatgaaagctctgagctccatataagggtttctttgttatgtaaattccacatacaaataaatggtgatgcatttttatgtttgtacattggttttagataagtaaattgaaataggtgccatcaacatttggctcagaaacattcttaacggcatctttgatttttatgggaagattttttaactacttttgaatttgtccactttgggagtgtgatgctgcttggcatattctgtgaagagatgatagctcagattattcattttgttgtctttctggtatttaggtkgataagacagtaacaatgctatgcatatatcgcttgtcttttaggaatcgtatattcttgtgcaggtagaaactgtgtttgatcagttgaagtacttacgtctaattttctccccaaatttattttctaacgtgtttcagaagtttaagttttgaaacttcaaggttttgcattcatttgagatggtcttaggcagcggaggcattttccacaaagttgttgcattgtttcattcctgagaaatgttgaagtttgagttttaatggtattgtgtgtcttgaattacagtaggaattttccaaacaaaactcagataaatttaaacatgtacttgtgagttttaaaaatttggtgaaaattcataaaccttttttccctagattgtgttgtcctcatatttctgacctgtctgtagggtactgtttgttctggagattttttttcaggtggtgggtggtagccgaactctcttatttgcttgtgtcagtgtcatccttaattgtctgttttagagtgtggtgaatcctatggcaagccaactggtgtagattatacttgtcatattttgcagagctctctcacgttccttttctattggatcctcatctgtttcttagatgagaaaccagaaacaaaagagactgactgatggtcatgcacatagtgtaaatcaaggttttctgatgaagtcagtggtgtttgacttgttcagagaagtaagtcctgacttcaagggaggagttgtgtattactcatgttgtaactacattacctgttgaatagtaaacactccagtattggatcattagttctgtgcagttgtgtaatactcaccaagttatgaaagtgctgtatacttggaaaatgttctttggttgaattccatttattcccttaggaaagttcccctaaatgctgagcactgagggtacttggtgtctggaacataaactctgcccacaaggagctcatagtttgcttgttaaacattacgcagaaagatcacatggcttttattta

SEQ ID NO: 687530 - DNA, 1366 bp, Homo sapiens
tttcctctgaatttacatggaaggagcggtagatgatgagacatataagatcctcacatgaaagctctgagctccatataagggtttctttgttatgtaaattccacatacaaataaatggtgatgcatttttatgtttgtacattggttttagataagtaaattgaaataggtgccatcaacatttggctcagaaacattcttaacggcatctttgatttttatgggaagattttttaactacttttgaatttgtccactttgggagtgtgatgctgcttggcatattctgtgaagagatgatagctcagattattcattttgttgtctttctggtatttaggtggataagacagtaacaatgctatgcatatatcgcttgtcttttaggaatcgtatattcttgtgcaggtagaaactgtgtttgatcagttgaagtacttacgtctaattttctccccaaatttattttctaacgtgtttcagaagtttaagttttgaaacttcaaggttttgcattcatttgagatggtcttaggcagcggaggcattttccacaaagttgttgcattgtttcattcctgagaaatgttraagtttgagttttaatggtattgtgtgtcttgaattacagtaggaattttccaaacaaaactcagataaatttaaacatgtacttgtgagttttaaaaatttggtgaaaattcataaaccttttttccctagattgtgttgtcctcatatttctgacctgtctgtagggtactgtttgttctggagattttttttcaggtggtgggtggtagccgaactctcttatttgcttgtgtcagtgtcatccttaattgtctgttttagagtgtggtgaatcctatggcaagccaactggtgtagattatacttgtcatattttgcagagctctctcacgttccttttctattggatcctcatctgtttcttagatgagaaaccagaaacaaaagagactgactgatggtcatgcacatagtgtaaatcaaggttttctgatgaagtcagtggtgtttgacttgttcagagaagtaagtcctgacttcaagggaggagttgtgtattactcatgttgtaactacattacctgttgaatagtaaacactccagtattggatcattagttctgtgcagttgtgtaatactcaccaagttatgaaagtgctgtatacttggaaaatgttctttggttgaattccatttattcccttaggaaagttcccctaaatgctgagcactgagggtacttggtgtctggaacataaactctgcccacaaggagctcatagtttgcttgttaaacattacgcagaaagatcacatggcttttattta

SEQ ID NO: 687531 - DNA, 545 bp, Homo sapiens
ttttttgtattttttttttttagtagagacggagtttcaccgtgttagccaggatggtctcgatctcctgacctcgtgatccacccacctcggcctcccaaagtgctgggattacaggcatgagccactgcacccagccttgatgggcattttttaaatattaatgtttaaaaagagtttgaaaaagttayttaacctcattgtacctgttttgtgtttgttttgtggggtttattttgttttgttttgttttttggtggtggtggttgtagtggcgtttttttctcatctgaggtgagaataatagtaaccacctacaggcattgttgaaagaattaattaattcatttaataaatatttagagagtacatattatgtgctagacactgttttagacaccaaggtatcagcagcggacaaaacaaaaatcccttctttagtgaggttacattctagtgcagagaaatagataaaacaaagtaaataaaatacacaatatgtcagatggtgacgaatgccatggagaaaaagtaaatcaggtaat

SEQ ID NO: 687532 - DNA, 683 bp, Homo sapiens
ttgaagtgagcgagaccacaaacccactggaaggaagaaactccagacacatctgaacatctgaaggaacaaattccgggctcagcatctttaagagctgtaacactcactgcgaaggtccgcagcttcattcttgaagtcagcaagaccaagaacccatcggaaggaataaattccagacacacataaacatattgatatgagtgtattgtaaaaatttgcatagatagcacaaagatgaattctttaataacatttgtgatattttgagaaaaactaaattacttcaatttcttattatttatacaacatctaaacttcaagtgtattataagacacaaaaatgtgtttataacactgcaattgatagaacatacccagttgaccttgatatgaatcttttgtcatgtgctgaccttgtatcaacagagtttccagaaacacggagtaaytttaaaggcattgggaaataaaaataacatttgatctttaaaaacataaaatgacaaattaaaaaaagaaaaacaaagtaagaatttaattagctggtcttgataccaaatatgaattaaatattttacatgagttgttaagactgttttctttttcttttctttaatttgatcaaaataaaaacaagacatgcataacccatagaaatttgtcatgtggcaaatctaagc

SEQ ID NO: 687533 - DNA, 982 bp, Homo sapiens
gaacagccaggcgaggtggctcacacctgtaatcccagcactttgggaggccaaggcaggaggatcacctgaggtcgggagttcgagaccagcctgcccaacatggagaaaccccatctctactaaaaatacaaaattagccaggtggggtggtgcatgccttcaatcgcagctatttgggaggctgaggcaggagaatcacttgaacccgggaagtggaggttgcagtgagccaagattgtgccattgcactccagctgggaaacaagagcaaaattccgtctcaaaaaaaaaaaaaaaaaaawaaaaaaaaatatttatatatacacacacacacacacacacacacacacacacacacacacacagatgacaatgtcttaaatatttttgagtgagtacaatttctaaatagtttaatgaataaaaagctaggtgtgggaataaatataataagtctttatatatattattaaaaagttttcatatctagagaaaaaataatgtttagtcttaaattctgtatccagtcaaaatttattgaatgaagacattttaagatctacaagaactcagaaaatttgttaacagaaacctcctagatcagaactaaaagatgtattcttttttttattattatactttaagttttagggtacatgtgcacaatgtgcaggttagttacatatgtatacatgtgacatgctggtgcgctgcacccactaactcgtcatctagcattaggtatatctcccaatgctatccctccaccctcccccaaccccaccacagtccccagagtgtgatattccccttcctgtgtccatgtgatctcattgttcaattcccacctatgagtgagaatatgcggtgtttggttttttgttcttgcgatagtttactgagaatgatgatttccaatttcacccacgtccctacaaaggacatgaactcaacattttttatggctgcatagtattcc

SEQ ID NO: 687534 - DNA, 982 bp, Homo sapiens
gaacagccaggcgaggtggctcacacctgtaatcccagcactttgggaggccaaggcaggaggatcacctgaggtcgggagttcgagaccagcctgcccaacatggagaaaccccatctctactaaaaatacaaaattagccaggtggggtggtgcatgccttcaatcgcagctatttgggaggctgaggcaggagaatcacttgaacccgggaagtggaggttgcagtgagccaagattgtgccattgcactccagctgggaaacaagagcaaaattccgtctcaaaaaaaaaaaaaaaaaaaaawaaaaaaatatttatatatacacacacacacacacacacacacacacacacacacacacacagatgacaatgtcttaaatatttttgagtgagtacaatttctaaatagtttaatgaataaaaagctaggtgtgggaataaatataataagtctttatatatattattaaaaagttttcatatctagagaaaaaataatgtttagtcttaaattctgtatccagtcaaaatttattgaatgaagacattttaagatctacaagaactcagaaaatttgttaacagaaacctcctagatcagaactaaaagatgtattcttttttttattattatactttaagttttagggtacatgtgcacaatgtgcaggttagttacatatgtatacatgtgacatgctggtgcgctgcacccactaactcgtcatctagcattaggtatatctcccaatgctatccctccaccctcccccaaccccaccacagtccccagagtgtgatattccccttcctgtgtccatgtgatctcattgttcaattcccacctatgagtgagaatatgcggtgtttggttttttgttcttgcgatagtttactgagaatgatgatttccaatttcacccacgtccctacaaaggacatgaactcaacattttttatggctgcatagtattcc

SEQ ID NO: 687535 - DNA, 982 bp, Homo sapiens
gaacagccaggcgaggtggctcacacctgtaatcccagcactttgggaggccaaggcaggaggatcacctgaggtcgggagttcgagaccagcctgcccaacatggagaaaccccatctctactaaaaatacaaaattagccaggtggggtggtgcatgccttcaatcgcagctatttgggaggctgaggcaggagaatcacttgaacccgggaagtggaggttgcagtgagccaagattgtgccattgcactccagctgggaaacaagagcaaaattccgtctcaaaaaaaaaaaaaaaaaaaaaaawaaaaatatttatatatacacacacacacacacacacacacacacacacacacacacacagatgacaatgtcttaaatatttttgagtgagtacaatttctaaatagtttaatgaataaaaagctaggtgtgggaataaatataataagtctttatatatattattaaaaagttttcatatctagagaaaaaataatgtttagtcttaaattctgtatccagtcaaaatttattgaatgaagacattttaagatctacaagaactcagaaaatttgttaacagaaacctcctagatcagaactaaaagatgtattcttttttttattattatactttaagttttagggtacatgtgcacaatgtgcaggttagttacatatgtatacatgtgacatgctggtgcgctgcacccactaactcgtcatctagcattaggtatatctcccaatgctatccctccaccctcccccaaccccaccacagtccccagagtgtgatattccccttcctgtgtccatgtgatctcattgttcaattcccacctatgagtgagaatatgcggtgtttggttttttgttcttgcgatagtttactgagaatgatgatttccaatttcacccacgtccctacaaaggacatgaactcaacattttttatggctgcatagtattcc

SEQ ID NO: 687536 - DNA, 982 bp, Homo sapiens
gaacagccaggcgaggtggctcacacctgtaatcccagcactttgggaggccaaggcaggaggatcacctgaggtcgggagttcgagaccagcctgcccaacatggagaaaccccatctctactaaaaatacaaaattagccaggtggggtggtgcatgccttcaatcgcagctatttgggaggctgaggcaggagaatcacttgaacccgggaagtggaggttgcagtgagccaagattgtgccattgcactccagctgggaaacaagagcaaaattccgtctcaaaaaaaaaaaaaaaaaaaaaaaaawaaatatttatatatacacacacacacacacacacacacacacacacacacacacacagatgacaatgtcttaaatatttttgagtgagtacaatttctaaatagtttaatgaataaaaagctaggtgtgggaataaatataataagtctttatatatattattaaaaagttttcatatctagagaaaaaataatgtttagtcttaaattctgtatccagtcaaaatttattgaatgaagacattttaagatctacaagaactcagaaaatttgttaacagaaacctcctagatcagaactaaaagatgtattcttttttttattattatactttaagttttagggtacatgtgcacaatgtgcaggttagttacatatgtatacatgtgacatgctggtgcgctgcacccactaactcgtcatctagcattaggtatatctcccaatgctatccctccaccctcccccaaccccaccacagtccccagagtgtgatattccccttcctgtgtccatgtgatctcattgttcaattcccacctatgagtgagaatatgcggtgtttggttttttgttcttgcgatagtttactgagaatgatgatttccaatttcacccacgtccctacaaaggacatgaactcaacattttttatggctgcatagtattcc

SEQ ID NO: 687537 - DNA, 2160 bp, Homo sapiens
atgaaatgaaatagagaatctagattcaaataattttcagtaaawgggaagtgttcttaccataattataattgatatcttgggctctaaacgaattatttcttttattggctttggcttctgtaacctctcattgattcttaccattattttcactttctgaggatgcaaattcagtaatttaagtaagctgtaggccaggaaggttttattgttgttatttcattaatctttttttgctttctttttaaatagtgacagtcgaatacatccagcaaattacctagtatttataaatttttatttgctattttactagaaagttcttaaacactataattttcataaagtaattacacaactttagctatatactttgcaagatcacatattaatatatttgtttatcttttgttttcacagtaaataatttcccttactaaaagaataccactaacagatatctactcatattattttttacaattgctccagtgccattttatgactttgtaaaactgacaaagtaaatctttttttctgtgacgtataaggtcttgccaatttgctttttctgtgacattctcctagcacatggtgcatcaacttatggattaaaaagcctaagcatttattaaataagagaagtaaattagttgataataaaaataaaatagaaactatctcctctacatgagtctatgtagatatgaataacaaggaataaagaataattattaaggtagcaataaatataaaatgttggtataattcatttaggtcttatatataaacccattcattatttgtacacataactgctgtgcttgttaagtcttgcctttaactcctccaagtaataaagaataagtaaaataatgagtaatataagagtaagtagaagacttcacagcctcagatgttcatggaccatagatgtgagcattatttctttagtataggctatcagtttcaaacaggtgtttaaaattaaaagctgagcattagattgaatattatgttaaaaaaaaaaactaaaaataccacatgcttcttgatgggttcaccaagaaaatagtctaatgattcacaagctttagaatgtggggctggttaaaaacatagatgataaaacttcactggtaaagtcagatttattacagattgcaagaatctgccttttcactagtaccacatttccatctaatgtgttattagagaaatactaacctagggaattttctcaaatttttcacatgtagtaattgcttttttacattgcccaaagacaaagaggcacagaagacctattctcacgaaagagactcacggtaaacaaccgaacaaaatgacaattaataataagaagcaactgccaaacaggttagaatgtttgtgttgtctttacagaatattccccctgggaagataaattatttcatgtgaccgtagttcttgtaatatggaattaaacatggggaagaggtttatttgatcagatagatttaagaaattgtgaatggatgatttactcacctgcactacaggacttctcaaaccacaaaatttaggtatgaattccagagtatcttgtagaaatgtagattctgattctgtagatgttgcgtgggctcccaatttctgaatgtttaacaagctctcaggtgatatagatactgatgttgctggtccaaggaccacacctgaaggaacaaagcactaataagaccctggaaaaatcaaagattctagtcagctggtcaatatacttttcttaagttcccagtttttgcctaataaacttttccaagaaaaaatacatttcaattaaatatgtaaaaaatttatccatatacatataactatataactgatatatacatatatgtgtatcaatgcttttttgagaatattctttgggaatagatgagctaaataaatgcatgtaattactgaatttcatagactatatatattctgatacttagtatgtttgctaatcttttctttctttctcagcaacctttagagggacttattattagtctatatactgactaaactccacatatttctttgaacattgattgattccttcaacaataacaaactatcatttatatacaagacattgccagtttatatgaaactacgaagacc

SEQ ID NO: 687538 - DNA, 631 bp, Homo sapiens
ttttcagttgtgacacacaaaacttcctcttactatctaacaggtgatgaggtggattttatgtcacttaaaataataagcttcccaaaagatactttgatgctcagaggtgtttgcttttaaggatgacttattataataatagtattgtttatgtgagccagtgaggcagcaaatggaatcatacatagcaatcattttcaactttttaaaatatgaaactagagttgtctccatttgaaagatttgcaacgctatatttatagactaagaggtacatcatatctagacgtaaattttcagaagactactcaagtggtcactaatattgatatttatcttcagaaatatctttcaaatccataatcatctctttttaatcaatatcactgcycagattttttttattttatttatttattattattatttttttttagatagggtctttctctgtcgcccaggctggagtacagtggcatgatctctgctcactgcaacctccacctcctgggttcaagagattcttctgcctcagcctcccaagtagctgggattacaggtgcactccaccacgccgggctaatttttgcactttttagtcgagacggggtttcgccatgttggccag

SEQ ID NO: 687539 - DNA, 612 bp, Homo sapiens
tggttccactgtctatatgagtaaactcctacttgccaagtcataaaacaaaaatagagacattgtaccaatagcctaatattatggagaaaggcaattataatttattgaatactaagtcaattgttgartataatttattgtgccagtacattttacatgtgtcatctcatttaatctttgtaacattgctttaaggcacaaattagagtctatattgtaaaggggaggcaaccaatgttgagaatgtatacgtttactgccacacagatggttagtgtcaggactgagattcaaacccaattttacatggtggccttattttttattctttctgcatgtgtgcataggaggatattaacttgtgaaataaaaagatgcacacaatattcagtttacttccttgggtttggcaagcacttgagtcgtcatagtcccagttgtttcatgtcactttctgtggatttctgtgtcaatcaataagatgtctttgcatactgcaaaattggaggcctttaatgattagctttggtattaccgatgctcaaaatataataatagcaaaaatcacattaattagaccatttgcaaaagaatgtgattatccagatc

SEQ ID NO: 687540 - DNA, 612 bp, Homo sapiens
tggttccactgtctatatgagtaaactcctacttgccaagtcataaaacaaaaatagagacattgtaccaatagcctaatattatggagaaaggcaattataatttattgaatactaagtcaattgttgaatataatttattgtgccagtacattttacatgtgtcatctcatttaatctttgtaasattgctttaaggcacaaattagagtctatattgtaaaggggaggcaaccaatgttgagaatgtatacgtttactgccacacagatggttagtgtcaggactgagattcaaacccaattttacatggtggccttattttttattctttctgcatgtgtgcataggaggatattaacttgtgaaataaaaagatgcacacaatattcagtttacttccttgggtttggcaagcacttgagtcgtcatagtcccagttgtttcatgtcactttctgtggatttctgtgtcaatcaataagatgtctttgcatactgcaaaattggaggcctttaatgattagctttggtattaccgatgctcaaaatataataatagcaaaaatcacattaattagaccatttgcaaaagaatgtgattatccagatc

SEQ ID NO: 687541 - DNA, 1281 bp, Homo sapiens
gaatccttttctgaacatagctggtgatatgataagcatatactaaaaacatttccacttaacttcgagcttcgctaagacctcttccccyacttctgatcgaatgacgcacttcaatccagcagtcaggtaccagccttcgcaagacttgctaacattgagataaacttcacaaaagatgcatctccctccctgtaaaggttgaaagaggaattatcctaggtgggtgtggtggcccatgcctctaatcccaagtactggggaggctgaggtgggaaaattactttacgccaggagttcaaggctgtagtgagctatgatcacaccactacatgccagcctgggcatctcttaaaaaaaaaagattatgctaaagatggaaaggagttactcagaagagtgagcctctcccctgcctctccttctcttcagcactcttagaaggactcttccagctcacagcagagccaaggttcttctagtggccatgtagctgcatgaagaaacagccccaaaacaactctcttaaacaaataaacactccagtgcttgcactttatgttcccaatctctgccaccattaatcacattcagagtttgtctttaagagcctgcagtgaaggagtgagaggtgggaggaaaggaaggaaaataaactcctgagcccagttagatccaagaggcacagggaagatggaaacccgcctcgcctgccaaaagggacctctggatgccggtgagaggtgcccacgatggaaacaaggggacggtttcaaacagaaaccaacagagagcccggagagagcactgtcatttcagcatcacccgaacgtcagtaggaaacccaggatggggctgacagcgcctcatccacatatgtatatggctactgttgaggaaaaaactctgggaaacacaaatgtgagttggttaaggccgcgtccaaagagacacgaatcttgacttcagggatgcaagaatgaggaggaggtctcatgcccaggcctccccagccttacatcacctgcttatcaagtctgaatcggatggggagaggagtctgttgttccgtcgtctcccccagctgggagcggaacaaggagtcaacaaaaacccttcagctttttatctgctgtttgtgatcatttcctttccatttttcaaaactccaaactcccttcagaccctaaataacttcatcatcattttcacatttgcaaatgaaacattctgttccaaagaaatctaagtgaatgtgaggtcactgggttgcccggggcc

SEQ ID NO: 687542 - DNA, 1281 bp, Homo sapiens
gaatccttttctgaacatagctggtgatatgataagcatatactaaaaacatttccacttaacttcgagcttcgctaagacctcttcccctacttctgatcgaatgacgcacttcaatccagcagtcaggtaccagccttcgcaagacttgctaacattgagataaacttcacaaaagatgcatctccctccctgtaaaggttgaaagaggaattatcctaggtggstgtggtggcccatgcctctaatcccaagtactggggaggctgaggtgggaaaattactttacgccaggagttcaaggctgtagtgagctatgatcacaccactacatgccagcctgggcatctcttaaaaaaaaaagattatgctaaagatggaaaggagttactcagaagagtgagcctctcccctgcctctccttctcttcagcactcttagaaggactcttccagctcacagcagagccaaggttcttctagtggccatgtagctgcatgaagaaacagccccaaaacaactctcttaaacaaataaacactccagtgcttgcactttatgttcccaatctctgccaccattaatcacattcagagtttgtctttaagagcctgcagtgaaggagtgagaggtgggaggaaaggaaggaaaataaactcctgagcccagttagatccaagaggcacagggaagatggaaacccgcctcgcctgccaaaagggacctctggatgccggtgagaggtgcccacgatggaaacaaggggacggtttcaaacagaaaccaacagagagcccggagagagcactgtcatttcagcatcacccgaacgtcagtaggaaacccaggatggggctgacagcgcctcatccacatatgtatatggctactgttgaggaaaaaactctgggaaacacaaatgtgagttggttaaggccgcgtccaaagagacacgaatcttgacttcagggatgcaagaatgaggaggaggtctcatgcccaggcctccccagccttacatcacctgcttatcaagtctgaatcggatggggagaggagtctgttgttccgtcgtctcccccagctgggagcggaacaaggagtcaacaaaaacccttcagctttttatctgctgtttgtgatcatttcctttccatttttcaaaactccaaactcccttcagaccctaaataacttcatcatcattttcacatttgcaaatgaaacattctgttccaaagaaatctaagtgaatgtgaggtcactgggttgcccggggcc

SEQ ID NO: 687543 - DNA, 1133 bp, Homo sapiens
cagcagcttctagactctggaagtactgaatccactacttcctgaatatgtgaattcccaggggagtatagtgttgcccatctcacctggaaaaagggagagaaatccctagacaacacccccaagtggtcctcyagccaccctgaaccctgacttctacaacagctcattccatccttgagcagttcagattcttagaaagttcttcactcctaccagtgactggcagagatccagggatgctttatgtggtttctaataaactgatttaataaaatgctttccagaaggggaatttgtactttttagggacatttcactccccacagattcaggcatgctgggagcctgaattcaagcttttgcctgtgacgccgggacttcctgcccactggtagatcttaaaaggcaaatgcctttttttctgattttgccctccaagatacttagagatttttgttctcattctaggatggagcccaaaggcaggcaaaccaaaaagtaaagctctccaaaccatgtcagataaataactgatgaaggaatacagctccatcgcctaaagaaggaaagatgtaagcagatgtgacagttcgtcttcagacagaggcatgtcatgagagtgagataacagactccttctgtgaggctccagagggcagactttggaccagaggcagatggaagctacaaggggatagagtggaaatcaatatgtggaagaattttgtagcagagatgttcaacccaaggaagtcatggaagattgtgaattggtgtctccctgggaaacacgacactcattataaatgctcttgggtaatctcctccaacactggccctgggctgcttatgtgacctgtggcacaaccagaggcttacatggcacttgcacattggggcttgtccatttagaatccagccaccatgttctatagaaacccaagctggccactagcaaggccacaagatcaacaaggtcacaaggccacaaggtcaacatttccagttgactgccagccacacaagcagggccatcttggatcttccaaaaattctagctcagaaaaggaaagtgactagctgaccattataataatagtaagtcagagtcacatcaagaatccaggact

SEQ ID NO: 687544 - DNA, 1133 bp, Homo sapiens
cagcagcttctagactctggaagtactgaatccactacttcctgaatatgtgaattcccaggggagtatagtgttgcccatctcacctggaaaaagggagagaaatccctagacaacacccccaagtggtcctccagccaccctgaaccctgacttctacaacagctcattccatccttgagcagttcagattcttagaaagttcttcactcctaccagtgactggcagagatccagggatgctttatgtggtttctaataaactgatttaataaaatgctttccagaaggggaatttrtactttttagggacatttcactccccacagattcaggcatgctgggagcctgaattcaagcttttgcctgtgacgccgggacttcctgcccactggtagatcttaaaaggcaaatgcctttttttctgattttgccctccaagatacttagagatttttgttctcattctaggatggagcccaaaggcaggcaaaccaaaaagtaaagctctccaaaccatgtcagataaataactgatgaaggaatacagctccatcgcctaaagaaggaaagatgtaagcagatgtgacagttcgtcttcagacagaggcatgtcatgagagtgagataacagactccttctgtgaggctccagagggcagactttggaccagaggcagatggaagctacaaggggatagagtggaaatcaatatgtggaagaattttgtagcagagatgttcaacccaaggaagtcatggaagattgtgaattggtgtctccctgggaaacacgacactcattataaatgctcttgggtaatctcctccaacactggccctgggctgcttatgtgacctgtggcacaaccagaggcttacatggcacttgcacattggggcttgtccatttagaatccagccaccatgttctatagaaacccaagctggccactagcaaggccacaagatcaacaaggtcacaaggccacaaggtcaacatttccagttgactgccagccacacaagcagggccatcttggatcttccaaaaattctagctcagaaaaggaaagtgactagctgaccattataataatagtaagtcagagtcacatcaagaatccaggact

SEQ ID NO: 687545 - DNA, 1507 bp, Homo sapiens
taattccagcactttgggaggccraggcgggtgaataacccgaggtcaggagtttgagatcagtgtggccaacgtggtgaaaccctgtctctactaaaaatgcaaaaattagctgggcatggtggcaggtgcctgtaatctcagctactagggaggctgaggtaggagaattgcttcaacccaggagatggaggttgcagtgagctgagatcatgccactgcactccagcctgggcaacagagcaagattccgtctcaaaaaaaaaagaaagaaatagaactgttcaagtaaaatgcttgcctccaatccatgttacttctcttccctcacctagtaaaatcttatttcctgctgcatcttcagaaatttgtactgacatgggccacaagacatcctgtagttactaagcttcttgtgctacttgcatacagattttcccaataccttaatgtcagccattacatacaagcagtaaaacagagaacacaacggatacttggagaaattttttaaataaaaagaagaaaaaatctcaaagcactctcaccaggattcatactataaaatgtgagaagcaaataaactttttactgagaaactttgtggtgggtgggcatgaactgtaaagaacataaagaaacagaagatgaaaatccctgtctccagtgatctaatgttcctgttaactagaaaaaacaaacacacaagtaaaacagtcaagagaacagtcacaaaacagtaaataagtaggtgctaaaggacaaccatgggcaataaacaccaactcagaaaggaaaagagtccactcagggttagccagagaaaaacaattacatgtcatagaatatgaaatgaaatttcaggtgggccttgaagatggaaaagaaatactagtttaaagctgtccccctaggcagtattggactaaaccatccatgcagccggaagtcattagcatctaaagtagtgaagagaataaggtactacaaaggaggagaatggcatgaacaagggagtggaagccagaaaatacaaggaaaatgtattaaagagtgaataagaaaaagagaaattccactgaagccagcgtacacaaacagcaggaaagattgctagaaaggtacattagagcctgcttttagaggccccagaatgtctctgcatacagagattgaataccaccaatatgtaagtagaattttatcatcaaatgctggaaggaaaaactggctttgacatactgagaggtggcactgcctggagaaaccaacatctaaactaagacctaaagaataattaggaatttgtccgacattaggggaagggatatagatggggtagtcgagttttccatgggataaggcaccatttgagagtccagtggatactttcatcttcttcacacctacttgctttttctagtcaacagacaggggacagagggaggctgaacatacaatttactactttcaccaattatctgttttagaactgaaagactaatac

SEQ ID NO: 687546 - DNA, 625 bp, Homo sapiens
tgcagatacccccaaaattttatactcattcttgatatgtctctttctctcacaccccacagctagtcagaatatcctactgcctctatattcaaaatatatccagagtcaggcgtttctcattgttctcactgctaccaaccaactccttccagattactgtaagactcccaatcagtatctctgcttccacccttgcattcttcccctctttgcagtttatttcaaaygagcctgccagtaaccctttcaaaacccacatatgattctttatttcagttacgatgaaatctaagtccttgaagtggcctctaaacatgaaaagacgtttcttcctgtcctctgttacctctctaacttccaatacaactttccctcatgttcatgccactcccatcacactggtttcttcgttgtgccccagacaccccagacacttttccatcttagcaccagctgatctgtcacctaggaatgtcttatcctgagagagctgccctactgaagaatctctaatttatttgtcttttaaaaataaaatttatattgaagaatagtttaaaatttgtagtcaaattgtgacaatagtacagagtgttcccatctacccgacattcattttctc

SEQ ID NO: 687547 - DNA, 625 bp, Homo sapiens
tgcagatacccccaaaattttatactcattcttgatatgtctctttctctcacaccccacagctagtcagaatatcctactgcctctatattcaaaatatatccagagtcaggcgtttctcattgttctcactgctaccaaccaactccttccagattactgtaagactcccaatcagtatctctgcttccacccttgcattcttcccctctttgcagtttatttcaaatgagcctgccagtaaccctttcaaaacccacataygattctttatttcagttacgatgaaatctaagtccttgaagtggcctctaaacatgaaaagacgtttcttcctgtcctctgttacctctctaacttccaatacaactttccctcatgttcatgccactcccatcacactggtttcttcgttgtgccccagacaccccagacacttttccatcttagcaccagctgatctgtcacctaggaatgtcttatcctgagagagctgccctactgaagaatctctaatttatttgtcttttaaaaataaaatttatattgaagaatagtttaaaatttgtagtcaaattgtgacaatagtacagagtgttcccatctacccgacattcattttctc

SEQ ID NO: 687548 - DNA, 625 bp, Homo sapiens
tgcagatacccccaaaattttatactcattcttgatatgtctctttctctcacaccccacagctagtcagaatatcctactgcctctatattcaaaatatatccagagtcaggcgtttctcattgttctcactgctaccaaccaactccttccagattactgtaagactcccaatcagtatctctgcttccacccttgcattcttcccctctttgcagtttatttcaaatgagcctgccagtaaccctttcaaaacccacatatgattctttatttcagttacgatgaaatctaagtccttgaagtggcctctaaacatgaaaagacgtttcttcctgtcctctgttacctctctaacttccaatasaactttccctcatgttcatgccactcccatcacactggtttcttcgttgtgccccagacaccccagacacttttccatcttagcaccagctgatctgtcacctaggaatgtcttatcctgagagagctgccctactgaagaatctctaatttatttgtcttttaaaaataaaatttatattgaagaatagtttaaaatttgtagtcaaattgtgacaatagtacagagtgttcccatctacccgacattcattttctc

SEQ ID NO: 687549 - DNA, 545 bp, Homo sapiens
cagggaggctcccagccactaccaagagagagcagtggcccctgggcaggaaggagaccacagagggtcactctttcaaaaggaagaaaatagtgttgcgttatctgaggtcctcctctggaaccagcctgtgcatggcgccaaggtgtttcctgaaaatgcttaaggagctcagaggcctgccccagtattatagcaagragagagctaaacctagcgggagggagtggccacagaggaggaagagggcaggacagctttgttactgtttttcttttcttttctttttggcaaattattattgcagtaaaatataccataaaattcaccatctgaactagttttaagtgcacagttcagcagtaccccgcatacctacaatgttggacaatgcccatgaccatcccccggcaccccaccaaaccctctcatcaccccaaacaaaagccatgtacccaccataactcccctacagcaataactcccctacagcaataactcccctacagcaatgcctcccctccatcttccatctccatgaattc

SEQ ID NO: 687550 - DNA, 1930 bp, Homo sapiens
tggctcaagaaggaatggcggagaatttgagaacctggactcaggatattgaagctcagtctttaggcgcttcctggccatcctccactgccagggttcctgtggctctgactgagggcagctctcatcccctccctgctctctgtctccagagcctctgcctcctgcagccctcctcacctgaatccattgtccttgggcaggaatagcgtccattcctagccagagtgtctaacttcttacatctactaggttttgatatggggcttcccaagcccccgactcacagcctgcagagaaaacagtaacatctgccgggcaccctagggcaaccaaagagagtctttgggaccagagggtgggagcagcagcacctgccaccccaacagctgagtgagggaagccaaccaggacttattgtcagcacagccaccaggacactgctctgttttaagagcaactaaaaatttacacaaagtccaaaatgtggttttaaaaattccccgcataggcaccaacgcataaactgcagttagggagtctatgcagggtcaaccctctagagcagggatcagcagatttcctgtaaagagtcaaatactaaatattttaggctttgcaggccataaggtctttgtcacaatgactcagctctgcagctgtatggcaaaaacagctacagaagtgtggctgtgttccaataaagctttatttataaaaaccaatggagggctggacttggcgcgtggatcatggccgatagacccttgcactggagacatgttggagacctggcgcatttggcagcagtgtcttccctctctgggcccttctctctactgggtgctggttttctgccttggataggtacccagccttctcacactctctccccactccttcatagaaggacctgacaaattcagtccacctgagatgaggataaaggggttacatttacctgaggttggtggctctcagccctggttgctcagtgacagcccctggggacatttaaaacatctcgatgcccaggtcccactccagagactctcatgcatttggtctgggtgcagcctgggcatcaaagatgttaaaagctccccaggcgagtctacaacgtggtcgagaaccactgcctcagactaaaaggagaaaaagtgagtatttttagaacaagcaggccagagaggtagaatttctttttcctcttgtgggtgggaaagggccaaaaacatgcccagagcccttggagcctgccacacaggacagcctgggccaccctccgctgatgctggcaccgggtagatttcaccatggtctgccaagatccatttttatttccctcttgatatctagtacatttctctgtggcaacacatatatgctcattaacaccgattcwtcatcagaaaagcacgtaagggcctaatatctaatcagttggttcatctatcaatgctcaaaacaaaatgttgaccaagtcctgccttagagagggctgtagtctatcaaggtcgagacaaggtaagcacagatgaaataataataggcttagccatattcactttatgcaataaggcagtggttcccacactgcacagtataatgacctgaggagattttaaaatcccaatgcctgggtcaagctccatgctaaaaacatcagagtgtctagggatggaagactagcaccagtctctttcaacccacccctccacaggagcccattgtgcagcaaaatgtgggaaccattgttgtagggttccgctactcaaagtgtggtctgaggaccagccgcgttggtctcacctgggagctggctggagatgcagaagttcaggcctaccctagtcctcctgaatcagaagctgcatgttcaccagatctgcatgctattcatatgcacgctaaagtttgagaagtaatg

SEQ ID NO: 687551 - DNA, 2257 bp, Homo sapiens
tgggaccagcccaagagacctagttctgcaggtgccaccttgtctctggagcagagaactggcactccacatcctgctccccaccccccatcagccaggctgaacctcccagtacaccctgcatggacgaactctcccccagaattcacttctctgtcccactctgagcatgcacctccccctgaagcatctcacactcctacttcaggtggtgctrgggccccactttccaggaaacactggcccttctcctgtcccagcacctctcatcctgcagccacaatgttcagtcaccctcctagtattcactgagtatttctagtgtgccaggcaccagcctggggactgaggatacagcagtcagtcactgggcacagctttgtccttaaaaggtttgcagtgaaggagttgaacttaaaccaatggccacatgaatccacagtgacaaactggggtgcgtgccgttactgccccccatcttgggctctgggaggtgggaacccctctactttctgcacctctgtatcccaggggctgcatagtgcctggtgctggagggccctcggtcgtcaaggagaaatggatgtctgaaaaggaaggcgctggaagcctcccttctcccgggctaggggcctgcagggacagctgaagtccagggcaagaagggaaccccccacccaaggcagtcatggctcacattctgaggtttcagagcagctcctcctctcctcccccacagtggaggaagccagccatttgcctgggtggagtatctgcgggtcaggtctttagaaatctaaatgtccacataggccaccactcacccctgtttaccacctgcagtcccagctttcatgtgagccgaggagggagccccttgagagtataaccagaggcttgatctgcgttctcagacctcctgggtggctagacaaggccctttcagctgccatgggaaggcgggtggactgtgctggtgcggggctgccctgatcccacaatggccccctgactccaaggcccagaggacacctgaaccacatctggctgagcctcctcaggccctgtgccttctctctgcagccaaggagacagaggtggagtgggcttttctggacagcataattcatggcccctcaccacccaaacccgagaggtgcaagaaaagaaagcgatgggctgggctcagcaaaacctgctttccctcttaacacctccagggatgtcttttttcacctgacttcattttctggcaaactatgtttgcatcccttcctggcaggcagttctagacccggcctgcacagccctgccccctgcttcctccctgaggtttgcactcagctccatccactcaaggcccatctggctctcggtccccaaccagcacctggttgggtttggcagcctccgagatgcccccataggatcaggttcagctaccacttccacacacaagttctgggccccggcttagcaatgcaggctacaaaggggccagggtgtgaagtgcctccttagcacagctcccagcagtggtctttacacttggttctccctggctgacttctcttgctgccagggcttcagtgatgggagccggcagcatggagggagaggggcaaccgcagatgtggtaaacattctgcagcagaggtctgagggctcttgccaagctggggtgcagcccccatggagtgggaagtgcagggtgggagaagggagaaggtttaaggtcctttaacccttcccagccagactcaacactgctatctcaaggaacccagaagcaccattctcatgagccatgacagtgctggagaccttggggtctcagaggaccccgtcaccaatcccacagctccaaaatggtcttcagtttttacatccaagccaattcctttttacctgaaatgtggcccttttattagtagtgtccttgtaagtaaaattctatttattaaacagacatttctttttttttttactttttattttattttattttttaatcattttttcttttttttatatactttaagttttagggtacatgtgcacaacatgcaggttagttacatatgtatacatgtgccatgttggtgtgctgcacccattaactcgtcatttaacattaggtatatctcctaatgctatccctcccccctccccccaccccacaacaaaacagacatttcttaatgtgccaagcatgttgtctttattaggtcaggggttctcaaaccggaatgtgcat

SEQ ID NO: 687552 - DNA, 2257 bp, Homo sapiens
tgggaccagcccaagagacctagttctgcaggtgccaccttgtctctggagcagagaactggcactccacatcctgctccccaccccccatcagccaggctgaacctcccagtacaccctgcatggacgaactctcccccagaattcacttctctgtcccactctgagcatgcacctccccctgaagcatctcacactcctacttcaggtggtgctagggccccactttccaggaaacactggcccttctcctgtcccagcacctctcatcctgcagccacaatgttcagtcaccctcctagtattcactgagtatttctagtgtgccaggcaccagcctggggactgaggatacagcagtcagtcactgggcacagctttgtccttaaaaggtttgcagtgaaggagttgaacttaaaccaatggccacatgaatccacagtgacaaactggggtgcgtgccgttactgccccccatcttgggctctgggaggtgggaacccctctactttctgcacctctgtatcccaggggctgcayagtgcctggtgctggagggccctcggtcgtcaaggagaaatggatgtctgaaaaggaaggcgctggaagcctcccttctcccgggctaggggcctgcagggacagctgaagtccagggcaagaagggaaccccccacccaaggcagtcatggctcacattctgaggtttcagagcagctcctcctctcctcccccacagtggaggaagccagccatttgcctgggtggagtatctgcgggtcaggtctttagaaatctaaatgtccacataggccaccactcacccctgtttaccacctgcagtcccagctttcatgtgagccgaggagggagccccttgagagtataaccagaggcttgatctgcgttctcagacctcctgggtggctagacaaggccctttcagctgccatgggaaggcgggtggactgtgctggtgcggggctgccctgatcccacaatggccccctgactccaaggcccagaggacacctgaaccacatctggctgagcctcctcaggccctgtgccttctctctgcagccaaggagacagaggtggagtgggcttttctggacagcataattcatggcccctcaccacccaaacccgagaggtgcaagaaaagaaagcgatgggctgggctcagcaaaacctgctttccctcttaacacctccagggatgtcttttttcacctgacttcattttctggcaaactatgtttgcatcccttcctggcaggcagttctagacccggcctgcacagccctgccccctgcttcctccctgaggtttgcactcagctccatccactcaaggcccatctggctctcggtccccaaccagcacctggttgggtttggcagcctccgagatgcccccataggatcaggttcagctaccacttccacacacaagttctgggccccggcttagcaatgcaggctacaaaggggccagggtgtgaagtgcctccttagcacagctcccagcagtggtctttacacttggttctccctggctgacttctcttgctgccagggcttcagtgatgggagccggcagcatggagggagaggggcaaccgcagatgtggtaaacattctgcagcagaggtctgagggctcttgccaagctggggtgcagcccccatggagtgggaagtgcagggtgggagaagggagaaggtttaaggtcctttaacccttcccagccagactcaacactgctatctcaaggaacccagaagcaccattctcatgagccatgacagtgctggagaccttggggtctcagaggaccccgtcaccaatcccacagctccaaaatggtcttcagtttttacatccaagccaattcctttttacctgaaatgtggcccttttattagtagtgtccttgtaagtaaaattctatttattaaacagacatttctttttttttttactttttattttattttattttttaatcattttttcttttttttatatactttaagttttagggtacatgtgcacaacatgcaggttagttacatatgtatacatgtgccatgttggtgtgctgcacccattaactcgtcatttaacattaggtatatctcctaatgctatccctcccccctccccccaccccacaacaaaacagacatttcttaatgtgccaagcatgttgtctttattaggtcaggggttctcaaaccggaatgtgcat

SEQ ID NO: 687553 - DNA, 2257 bp, Homo sapiens
tgggaccagcccaagagacctagttctgcaggtgccaccttgtctctggagcagagaactggcactccacatcctgctccccaccccccatcagccaggctgaacctcccagtacaccctgcatggacgaactctcccccagaattcacttctctgtcccactctgagcatgcacctccccctgaagcatctcacactcctacttcaggtggtgctagggccccactttccaggaaacactggcccttctcctgtcccagcacctctcatcctgcagccacaatgttcagtcaccctcctagtattcactgagtatttctagtgtgccaggcaccagcctggggactgaggatacagcagtcagtcactgggcacagctttgtccttaaaaggtttgcagtgaaggagttgaacttaaaccaatggccacatgaatccacagtgacaaactggggtgcgtgccgttactgccccccatcttgggctctgggaggtgggaacccctctactttctgcacctctgtatcccaggggctgcatagtgcctggtgctggagggccctcggtcgtcaaggagaaatggatgtctgaaaaggaaggcgctggaagcctcccttctcccgggctaggggcctgcagggacagctgaagtccagggcaagaagggaaccccccacccaaggcagtcatggctcacattctgaggtttcagagcagctcctcctctcctcccccacagtggaggaagccagccatttgcctgggtggagtatctgcgggtcaggtctttagaaatctaaatgtccacataggccaccactcacccctgtttaccacctgcagtcccagctttcatgtgagccgaggagggagccccttgagagtataaccagaggcttgatctgcgttctcagacctcctgggtggctagacaaggccctttcagctgccatgggaaggcgggtggactgtgctggtgcggggctgccctgatcccacaatggccccctgactccaaggcccagaggacacctgaaccacatctggctgagcctcctcaggccctgtgccttctctctgcagccaaggagacagaggtggagtgggcttttctggacagcataattcatggcccctcaccacccaaacccgagaggtgcaagaaaagaaagcgatgggctgggctcagcaaaacctgctttccctcttaacacctccagggatgtcttttttcacctgacttcattttctggcaaactatgtttgcatcccttcctggcaggcagttctagacccggcctgcacagccctgccccctgcttcctccctgaggtttgcactcagctccatccactcaaggcccatctggctctcggtccccaaccagcacctggttgggtttggcagcctccgagatgcccccataggatcaggttcagctaccacttccacacacaagttctgggccccggcttagcaatgcaggctacaaaggggccagggtgtgaagtgcctccttagcacagctcccagcagtggtctttacacttggttctccctggctgacttctcttgctgccagggcttcagtgatgggagccggcagcatggagggagaggggcaaccgcagatgtggtaaacattctgcrgcagaggtctgagggctcttgccaagctggggtgcagcccccatggagtgggaagtgcagggtgggagaagggagaaggtttaaggtcctttaacccttcccagccagactcaacactgctatctcaaggaacccagaagcaccattctcatgagccatgacagtgctggagaccttggggtctcagaggaccccgtcaccaatcccacagctccaaaatggtcttcagtttttacatccaagccaattcctttttacctgaaatgtggcccttttattagtagtgtccttgtaagtaaaattctatttattaaacagacatttctttttttttttactttttattttattttattttttaatcattttttcttttttttatatactttaagttttagggtacatgtgcacaacatgcaggttagttacatatgtatacatgtgccatgttggtgtgctgcacccattaactcgtcatttaacattaggtatatctcctaatgctatccctcccccctccccccaccccacaacaaaacagacatttcttaatgtgccaagcatgttgtctttattaggtcaggggttctcaaaccggaatgtgcat

SEQ ID NO: 687554 - DNA, 2257 bp, Homo sapiens
tgggaccagcccaagagacctagttctgcaggtgccaccttgtctctggagcagagaactggcactccacatcctgctccccaccccccatcagccaggctgaacctcccagtacaccctgcatggacgaactctcccccagaattcacttctctgtcccactctgagcatgcacctccccctgaagcatctcacactcctacttcaggtggtgctagggccccactttccaggaaacactggcccttctcctgtcccagcacctctcatcctgcagccacaatgttcagtcaccctcctagtattcactgagtatttctagtgtgccaggcaccagcctggggactgaggatacagcagtcagtcactgggcacagctttgtccttaaaaggtttgcagtgaaggagttgaacttaaaccaatggccacatgaatccacagtgacaaactggggtgcgtgccgttactgccccccatcttgggctctgggaggtgggaacccctctactttctgcacctctgtatcccaggggctgcatagtgcctggtgctggagggccctcggtcgtcaaggagaaatggatgtctgaaaaggaaggcgctggaagcctcccttctcccgggctaggggcctgcagggacagctgaagtccagggcaagaagggaaccccccacccaaggcagtcatggctcacattctgaggtttcagagcagctcctcctctcctcccccacagtggaggaagccagccatttgcctgggtggagtatctgcgggtcaggtctttagaaatctaaatgtccacataggccaccactcacccctgtttaccacctgcagtcccagctttcatgtgagccgaggagggagccccttgagagtataaccagaggcttgatctgcgttctcagacctcctgggtggctagacaaggccctttcagctgccatgggaaggcgggtggactgtgctggtgcggggctgccctgatcccacaatggccccctgactccaaggcccagaggacacctgaaccacatctggctgagcctcctcaggccctgtgccttctctctgcagccaaggagacagaggtggagtgggcttttctggacagcataattcatggcccctcaccacccaaacccgagaggtgcaagaaaagaaagcgatgggctgggctcagcaaaacctgctttccctcttaacacctccagggatgtcttttttcacctgacttcattttctggcaaactatgtttgcatcccttcctggcaggcagttctagacccggcctgcacagccctgccccctgcttcctccctgaggtttgcactcagctccatccactcaaggcccatctggctctcggtccccaaccagcacctggttgggtttggcagcctccgagatgcccccataggatcaggttcagctaccacttccacacacaagttctgggccccggcttagcaatgcaggctacaaaggggccagggtgtgaagtgcctccttagcacagctcccagcagtggtctttacacttggttctccctggctgacttctcttgctgccagggcttcagtgatgggagccggcagcatggagggagaggggcaaccgcagatgtggtaaacattctgcagcagaggtctgagggctcttgccaagctggggtgcagcccccatggagtgggaagtgcagggtgggagaagggagaaggtttaaggtcctttaacccttcccagccagactcaacactgctatctcaaggaacccagaagcaccattctcatgagccatgacagtgctggagaccttggggtctcagaggacccsgtcaccaatcccacagctccaaaatggtcttcagtttttacatccaagccaattcctttttacctgaaatgtggcccttttattagtagtgtccttgtaagtaaaattctatttattaaacagacatttctttttttttttactttttattttattttattttttaatcattttttcttttttttatatactttaagttttagggtacatgtgcacaacatgcaggttagttacatatgtatacatgtgccatgttggtgtgctgcacccattaactcgtcatttaacattaggtatatctcctaatgctatccctcccccctccccccaccccacaacaaaacagacatttcttaatgtgccaagcatgttgtctttattaggtcaggggttctcaaaccggaatgtgcat

SEQ ID NO: 687555 - DNA, 512 bp, Homo sapiens
cattgcttttataatatcatctccaaagtactgccgtcagcatgccccacatccaagctttccaattccctgcagcccactctagtaacactcaaagaatagctctaaggaaataaaaactacagaaaaagtcgtgatagccaacactttaacataaaaaatgcctaaaaccttttaaactaaattgtttcttaaaacagaagattttgctaattagaattaaggcagactgtactgagattatgtcaaggaaagcatttttgtctgtgtttaatttactacagttktatttaattacacagttaagaagagtaaggaaagtctcaggagggtgatcttcgagtactcaacacctaggcataagaaactttggagtttcctgtatattctgtttttcagacacacaaggtctcaacctttgctataaagagatactacatttattttgaatactgagaaaaatgacattcttcagtaaatgcacatggcaactcatgtatagaaacaagctc

SEQ ID NO: 687556 - DNA, 584 bp, Homo sapiens
ttcatggtgtttattctactattgatgcacttggaggtttttgcaacttttgtctctatcgggaatgctataataaacattcttgcaaatcctgtcatactagagcctttttggtttttttcatatataaactagattcccaaaaatgtgattagtggattaatttttgatggatactggcagattttttttccctwatagttacagatgtcacatttccccagcaatgaatgaaggtggccatgtctcctccacttctattgcagtgtgttagtagtctctttaatttgtgttactcaactacatgaaagaggatatcatatcatatatttaagttgcattttaatgagcattaatgaagtttagcatattttcaaatatgtgttggccatttacatttcttttgaattgcctttctacaccttaatttatttctgttggatggtttgtctttaaggactcattgtaaaacagatattaactattatgaatgttgtacatattttcccgatttgtactcttttattactttttaatattacttatgatgtatttttaaatgttctgtagtcgaatctgtcttt

SEQ ID NO: 687557 - DNA, 609 bp, Homo sapiens
aaactgtccataggaaactggaatgtcacacagagtaagggacaattcttcatgatatgaaaccactgcacatgctgcaggacacctgtcaacccaggccctgcctatctataatggccaacaggaaaccccggtgatgatgacagccagagacacaccccacaacctccaaagagatgatcacagccagagacataccccacaacctccaaagagaagctgaacttgcttcatgtctaagatccgtaggtgagtttaactgtayttaggggggcccttctccagcctgggtgggcttctggtcagaagtggtcattttatgttctttcttccagcagaaaatgctacttttctgcactgagatctttcatgtaaagacccgaaggtgggttcaatgaggatggaaagcaccaggtggggagtctccttgaggaatggatgggttcttaaaagagacgaggggagcaggcagggattctttgctcttttcacaatgggatagtgggacaggctccacatgaaacttgtagccacacccaccttccatctgatcacccagctgggggctctggccagggatctgatcacccacctggggactctggccgg

SEQ ID NO: 687558 - DNA, 1069 bp, Homo sapiens
gtgaacccaattccatagaagcatgctgccttgtgagaaaatatctcctgattagtctagaggtgtttccatttttatcatattatctcaattaatttatatatgctattcttgtatattttcaattacgtctttctcagaatgcaaagttaaattgccattgactttacctcagttaatcgtcattgttaaattgctatcatttgtcagctgatgaaaaatttaaatgcctcatttaggagcacatcattatttcagcaaatttatgacattgtgtatctattttcatacagtctttgagctttatattcctaacaaaatgtcttkttggacttcttctgtcttagatggtttgaacagccacaattcttgttttaggtattcttatctagtcctattgcttgatctcttgactgttcaaaaatctgaattctatgattttgtttgtactttaatttatacctgcaaggctgattttgccaaagtcttaatcattccaatctgttgctcaaaacctggtcaggatccactgtttctttttttaaatgttatgttttcacataatggtaaagaacttccatatccaaactcaaattacctttatggccttctttatttctacgcttctgcatgtaataatttggactgcttgtatttacttaaaagaaaatgtcagatatttatttcatttgcctaaaatatttctcattttgatatatagttgttgagatcacactagtcttcacattccagactaaataccaccatccaccatctcaaacaagcatcgcctgttcatacaaaccacaagtaatatctccgttccttgtatttaattctgctgccttgccttagaatatgcatttgattttgactaaaatatctacatctgccagcatataaatagaaataaaaatttaaatacaacttcctgtatgttcagctagggatagcatatgataaatgtgattataacacaggaagtaaacctaaaaggatgtagtcctcattaatcttgtagtcctgaacaatgtataaattgttttccgccctccaaaatgcagaatat

SEQ ID NO: 687559 - DNA, 1069 bp, Homo sapiens
gtgaacccaattccatagaagcatgctgccttgtgagaaaatatctcctgattagtctagaggtgtttccatttttatcatattatctcaattaatttatatatgctattcttgtatattttcaattacgtctttctcagaatgcaaagttaaattgccattgactttacctcagttaatcgtcattgttaaattgctatcatttgtcagctgatgaaaaatttaaatgcctcatttaggagcacatcattatttcagcaaatttatgacattgtgtatctattttcatacagtctttgagctttatattcctaacaaaatgtctttttggacttcttctgtcttagatggtttgaacagccacaattcttgttttaggtattcttatctrgtcctattgcttgatctcttgactgttcaaaaatctgaattctatgattttgtttgtactttaatttatacctgcaaggctgattttgccaaagtcttaatcattccaatctgttgctcaaaacctggtcaggatccactgtttctttttttaaatgttatgttttcacataatggtaaagaacttccatatccaaactcaaattacctttatggccttctttatttctacgcttctgcatgtaataatttggactgcttgtatttacttaaaagaaaatgtcagatatttatttcatttgcctaaaatatttctcattttgatatatagttgttgagatcacactagtcttcacattccagactaaataccaccatccaccatctcaaacaagcatcgcctgttcatacaaaccacaagtaatatctccgttccttgtatttaattctgctgccttgccttagaatatgcatttgattttgactaaaatatctacatctgccagcatataaatagaaataaaaatttaaatacaacttcctgtatgttcagctagggatagcatatgataaatgtgattataacacaggaagtaaacctaaaaggatgtagtcctcattaatcttgtagtcctgaacaatgtataaattgttttccgccctccaaaatgcagaatat

SEQ ID NO: 687560 - DNA, 601 bp, Homo sapiens
tgctttttctaatagtatgtggcttcgtatattttatgatcatttgtgctactgttagaaaacgatggtctcttttccttctttaataaaattttttagcattaaaatgacaacacagtayagagtttttagaatttttcctactatctcggaagtatattatattttgccaattttatcagcatgcttcattgtaaaatagttaattaaatgtaacatttcctttcttcattagaacaaaaataatgttggcagattagacacattgatgactgttatttgtggaaaatacttaaaatccagtttgaaatatataactgaataatgttgatgtatattatttgtagttaaaataagaaatatgtagcaaataagagataattattttagaatattaatagtcttttataaacacagattgacacaagtatactatatcggcatctaaaagctgtcaaatagttttgccatgagtggtatgatttctaatatgttcaactactcttagtaaatttggaaccaactagagtacaataacttctcattttgcttgttaggtttatttctagaacattcaatgtcattaaagccaggggaaaaa

SEQ ID NO: 687561 - DNA, 915 bp, Homo sapiens
taaacaagtaatttttgtagatttaattatgtatgtcataactagagtatgccaactttctgtctcaataatcacattttaaaaatatattgattaaggaaaaaaagaagtctcatttgccagtgaacctttggatatttattaagataatttatggctttaatccaatttttaaaaatctttcatctatcttaaagtggcttcaagattttaaactctttcctgtggcttttatctttaattttatcctgtagtgaattgtaaaagtaatgaacaagggcaattggatgactcctcttacatatacactcaggaaagctctcagtcatctatatatccaaatttgtgtaaaatatatttgttattatattcattattataatattattatatttattttataaagtcacatatattaagrtagaagcatttctgtttaaaaattatcaggcagtgacagtaggaaaacttgtaggcaagctaattaacaactagatccttcctatcattcaaggttttcacggatgctctcagtatttaaattatacattaatattgttaggcactgaataatcatctattctgaagttggaatttttgtttgtatcgtagattccattaaactttagtttttaatttttttttattattatactttaagttttagggtacatgtgcacattgtgcaggttagttacatatgtatacatgtgccatgctggtgtgctgcacccactaacttgtcatctagcattaggtgtatctcccaatgctatccctcccccctcccccgaccccacaacagtccccagagtgtgatgttccccttcctgtgtccatgtgatctcattgttcaattcccacctatgagtgagaatatgcggtgtttggttttttgttcttgcgatagtttac

SEQ ID NO: 687562 - DNA, 643 bp, Homo sapiens
taagtgggcattgccacgtcttaattagtatcctctgatcagagattattcatgaggacagtgcagtgttggtgcaccaaatctatataggctggagcrcgccccccaggaggaggtttttgctctctggggaatgctagattctgtaatggatcagtagccacactggtttctccagtgaaatccaaggatctgctaattcataaaaaaaaaaaaaaaaaaaaaaaaggagtctgagaatcaccaatgattctccccaacatgcccatcgaaatacacacaggatagaatagatgtgtttattcattttgattatcttataatcagctgtttccctccctgggtactggatctgctattgactagctgtgatacctttgagaatcacttcacttcctggatcctcagtttcctctcctaaaatggccagataagttcagagtttgaggatgaggaataaccgtcctaaaatgttttgccctaggaacccactgcccttgctgcagcctagccccatctctgtcgttgaagcacggacattatcttgtctgtagaaccatgcacggaagtgttatcacgcttgggcctcaaaaatgcctctgcttctatggattaattctgtgtgtagtcaaaatgcaaatat

SEQ ID NO: 687563 - DNA, 679 bp, Homo sapiens
cacttaaagttacggttcccaagaacctatggatgacaataagtgaagacgtactgtgtagtgttttcttcaatagacgatattaccatctttcaatgaaggcaactggtcctttcaccttcaaacacctatcccagtgccagttactgggaatacagagagaaaacacacactctttacctgaagtcaggaagctggtgttaygtaagcacaaggaaaatcttagagaagcacgagaaggaggagaggcccctgagatcccgaatacatggattctcagtgcttttgtttggcttatgatgaaacaaatacgaacagggaggaaaccgtcaacctgcccagaagctgccagcacacaaggcccagaggtactttattggatgccaaattcttttaacacaccatgagaaaagaagttgacaactttcccatgcattttggaaggtgtgttagaacgattcaacacacacccacacacacacacacacacacacacacacacacacacatttattgggttgggggagccttaaaacttacaaatctaaccagagctgactccgtccctcctcagtcatagagcagagtttacagctaggggaaggtggcaatcaccagggcaaactgggctcacgctggatgggcaagagccacatgcttcttagcacagcaatgccag

SEQ ID NO: 687564 - DNA, 647 bp, Homo sapiens
tgtctcattttattctcatagcaaccttaggagatagctacttcaaggttccagttttacagatgagactaggtagtgtacccaagaacatggcagctaaagaatctgaagtcggattaggacccaggtccagctgattccaaaactcaattattatttacccttcctgccatgctgtcagccgaggagggctctcctaagtctctccactgacactgggtgaggctccccgtcacctcccatcttctctttcttagcctaaggttgcacagctgccaagtaagtggtgggatcaaatttctttctttctttctttttgaggcagagtttggctcttgttgcccaggctggagtgcaatggagcaatctcggctcacggcaacctctgcctcctgggttcaagtgattctcctgcctcagcctcccaagtagctgggattacaggcatgcgccaccatgcccaattttgtatttttagtagagatggggtttctccatgttggcgaggctggtcttgaactcctgacctcaggtgatctgcctgccttggtctcccaaagtggtgggattacaggygtgagccaccgcaccggcctaaatgctacacaatttaagagcttgtttggattaatgcaggacccacagct

SEQ ID NO: 687565 - DNA, 2757 bp, Homo sapiens
caagagtttgacatctattccattctagagggcttgtggcaagtatgtggggaggaatggccartccccagataaaggccacctgcttgttgctttcctgcctgtgactttatccccagatgattcagagaagataggctctccagccgcccgcatgttccctctcactgtggatgtaattggggttcaggtgaaagtcctcacctcacttcctggtgttgtagcttcaggagtctgcagggtggcaaagtcaagtgattcgagccaggattgtcttacgtggggcccagctttggagggttctgaaagctccttgaaagtgactgtaaagctatgacagagattcccagacttcgagattttacaaagaagccaaggaataaagaaagcttttaatgggggattaaagaaagatgcccaatttaaaaaacaacaaacttttttccctgtaatagcgttaaaaataaactactaacgggctgggtgcagtggctcatgcctgtaatcctggcactttgggaggccgaggcgggtggatcacctgaggtcagtagtttgagactagcctggccaacatgccaaaaccccgcctctactaaaagtacaaaaattagctgggcgtggtggtgcacagctgtaattccagctattcaggaggctgaggcaggagaatcgcttgaacccaggaggcagaggttgcaatgagccgggattgcgccactgcactccagcctgggcgatggagcaagactccgtctgaaaaaaaaaaaaaaaaggaataatgaaacagctaccatcagctaccatcacctaccatcactggttcataaaagaaagaatgctttaacacaaaagacaagacataattttaaaagcaaggacatttcttcccaggagaaaatattttatgtaaaaggtataatgtgaatatgcatgtatatacacatacacacacacatctgtccttacttttctttcatttcaccacgaagcaaagaatagtttcttgtgaactggcagttgtctgtggactggcatttggggactgatatgagaactttgtccctgaactttgacgttctctggtgtgacttggagagtgcctccactaagttatttctttgaaatcaggactcaggactacattgttgctttaggagagcttttgccctcttgagttacagaactcgttccctgctggcctcggtttgtggtagagaacacgtgagaaggtcagagctgagaggctcttgggaaccacaggacccaaggggtctgctggttaatcctcctaattttgtgcagaacagtacatgattattccagacagatgggaatgtgcccgtatgttcagaacctcagaggaaggattccaaagcctccctagacattgcattctaatgctcaggaatgctcactctcacagaggaaatttatagacccttagatagccatttagagccagaacgggtctaacatgacttggtttgaatttccttatattacaaagttgataatcagccttgatgacacaaaggacatgcaggggttcactcaagttgtttctggagagaccgacactactctatctgacccacgcagcctaacactgcagccttacacagggaacctaacactgcagcctcgcacagggatgcacatctcagatgatgggcgggccgggttcaggtctcctgatgtaaatcacacttaacccactccctgagatgatacagtgattcatctcgcacctaatcccactcccttgaaatacagggatgcataatttcccacctaaccccaccccctgagatgcagtgctaacgggtgaatatcccccctgccccacatttgagctgaggaaaagtcaacatttcctttcctgagcgccttcacctgatgggcttggatccgttattttattttccaagctttcttttaatcatgcttgaacttttaatcctttatttaaaggccttatcttttttttttttttttttttttttttgagatggagtctcgctctgtctcgaccaggctggagtgcagtggtgtgatctcagttcactgcagcctccgcctcccgggttcaagaaattctcctgcctcagctttccgagtagctgagattacaggcgtgcgccaccacaaccagctaatttttgtatttttagtagaaatggggttttaccaagttgaccaggctggtctcgaactcctgacctcaggtgatccgcccgcctcagctcccaaagtgctgggattacaggcatgagccactatgcctggcctaaggccttatcttaatatttaattgtttgatgttttttcaagcataattccattttcatgtgtcattccaaatatgtacaatattctaatgcccagttgatactgagcatttacacaatacatgcattatcttactctgtgtgttaaaagtctacacatcacatcgtcttacttgtatgtatttgctgtgtacctttcaatttgctgtgttttgtcttctaacctttgaattgttttatatctgggctatttaacttagtttgttggttttggataatgtctttatagtgggttaagtgacaccctctcaaaagatacgtccagatcctaacccctggaacatatggatggtaccttatttggaagaaggctctttgcagatataattaaggatcttgagatgaggaaatcaccatgggttatcctggcgggccctaaatccaatgacaagtgtctttatgggag

SEQ ID NO: 687566 - DNA, 2757 bp, Homo sapiens
caagagtttgacatctattccattctagagggcttgtggcaagtatgtggggaggaatggccaatmcccagataaaggccacctgcttgttgctttcctgcctgtgactttatccccagatgattcagagaagataggctctccagccgcccgcatgttccctctcactgtggatgtaattggggttcaggtgaaagtcctcacctcacttcctggtgttgtagcttcaggagtctgcagggtggcaaagtcaagtgattcgagccaggattgtcttacgtggggcccagctttggagggttctgaaagctccttgaaagtgactgtaaagctatgacagagattcccagacttcgagattttacaaagaagccaaggaataaagaaagcttttaatgggggattaaagaaagatgcccaatttaaaaaacaacaaacttttttccctgtaatagcgttaaaaataaactactaacgggctgggtgcagtggctcatgcctgtaatcctggcactttgggaggccgaggcgggtggatcacctgaggtcagtagtttgagactagcctggccaacatgccaaaaccccgcctctactaaaagtacaaaaattagctgggcgtggtggtgcacagctgtaattccagctattcaggaggctgaggcaggagaatcgcttgaacccaggaggcagaggttgcaatgagccgggattgcgccactgcactccagcctgggcgatggagcaagactccgtctgaaaaaaaaaaaaaaaaggaataatgaaacagctaccatcagctaccatcacctaccatcactggttcataaaagaaagaatgctttaacacaaaagacaagacataattttaaaagcaaggacatttcttcccaggagaaaatattttatgtaaaaggtataatgtgaatatgcatgtatatacacatacacacacacatctgtccttacttttctttcatttcaccacgaagcaaagaatagtttcttgtgaactggcagttgtctgtggactggcatttggggactgatatgagaactttgtccctgaactttgacgttctctggtgtgacttggagagtgcctccactaagttatttctttgaaatcaggactcaggactacattgttgctttaggagagcttttgccctcttgagttacagaactcgttccctgctggcctcggtttgtggtagagaacacgtgagaaggtcagagctgagaggctcttgggaaccacaggacccaaggggtctgctggttaatcctcctaattttgtgcagaacagtacatgattattccagacagatgggaatgtgcccgtatgttcagaacctcagaggaaggattccaaagcctccctagacattgcattctaatgctcaggaatgctcactctcacagaggaaatttatagacccttagatagccatttagagccagaacgggtctaacatgacttggtttgaatttccttatattacaaagttgataatcagccttgatgacacaaaggacatgcaggggttcactcaagttgtttctggagagaccgacactactctatctgacccacgcagcctaacactgcagccttacacagggaacctaacactgcagcctcgcacagggatgcacatctcagatgatgggcgggccgggttcaggtctcctgatgtaaatcacacttaacccactccctgagatgatacagtgattcatctcgcacctaatcccactcccttgaaatacagggatgcataatttcccacctaaccccaccccctgagatgcagtgctaacgggtgaatatcccccctgccccacatttgagctgaggaaaagtcaacatttcctttcctgagcgccttcacctgatgggcttggatccgttattttattttccaagctttcttttaatcatgcttgaacttttaatcctttatttaaaggccttatcttttttttttttttttttttttttttgagatggagtctcgctctgtctcgaccaggctggagtgcagtggtgtgatctcagttcactgcagcctccgcctcccgggttcaagaaattctcctgcctcagctttccgagtagctgagattacaggcgtgcgccaccacaaccagctaatttttgtatttttagtagaaatggggttttaccaagttgaccaggctggtctcgaactcctgacctcaggtgatccgcccgcctcagctcccaaagtgctgggattacaggcatgagccactatgcctggcctaaggccttatcttaatatttaattgtttgatgttttttcaagcataattccattttcatgtgtcattccaaatatgtacaatattctaatgcccagttgatactgagcatttacacaatacatgcattatcttactctgtgtgttaaaagtctacacatcacatcgtcttacttgtatgtatttgctgtgtacctttcaatttgctgtgttttgtcttctaacctttgaattgttttatatctgggctatttaacttagtttgttggttttggataatgtctttatagtgggttaagtgacaccctctcaaaagatacgtccagatcctaacccctggaacatatggatggtaccttatttggaagaaggctctttgcagatataattaaggatcttgagatgaggaaatcaccatgggttatcctggcgggccctaaatccaatgacaagtgtctttatgggag

SEQ ID NO: 687567 - DNA, 2757 bp, Homo sapiens
caagagtttgacatctattccattctagagggcttgtggcaagtatgtggggaggaatggccaatccccagataaaggccacctgcttgttgctttcctgcctgtgactttatccccagatgattcagagaagataggctctccagccgcccgcatgttccctctcactgtggatgtaattggggttcaggtgaaagtcctcacctcacttcctggtgttgtagcttcaggagtctgcagggtggcaaagtcaagtgattcgagccaggattgtcttaygtggggcccagctttggagggttctgaaagctccttgaaagtgactgtaaagctatgacagagattcccagacttcgagattttacaaagaagccaaggaataaagaaagcttttaatgggggattaaagaaagatgcccaatttaaaaaacaacaaacttttttccctgtaatagcgttaaaaataaactactaacgggctgggtgcagtggctcatgcctgtaatcctggcactttgggaggccgaggcgggtggatcacctgaggtcagtagtttgagactagcctggccaacatgccaaaaccccgcctctactaaaagtacaaaaattagctgggcgtggtggtgcacagctgtaattccagctattcaggaggctgaggcaggagaatcgcttgaacccaggaggcagaggttgcaatgagccgggattgcgccactgcactccagcctgggcgatggagcaagactccgtctgaaaaaaaaaaaaaaaaggaataatgaaacagctaccatcagctaccatcacctaccatcactggttcataaaagaaagaatgctttaacacaaaagacaagacataattttaaaagcaaggacatttcttcccaggagaaaatattttatgtaaaaggtataatgtgaatatgcatgtatatacacatacacacacacatctgtccttacttttctttcatttcaccacgaagcaaagaatagtttcttgtgaactggcagttgtctgtggactggcatttggggactgatatgagaactttgtccctgaactttgacgttctctggtgtgacttggagagtgcctccactaagttatttctttgaaatcaggactcaggactacattgttgctttaggagagcttttgccctcttgagttacagaactcgttccctgctggcctcggtttgtggtagagaacacgtgagaaggtcagagctgagaggctcttgggaaccacaggacccaaggggtctgctggttaatcctcctaattttgtgcagaacagtacatgattattccagacagatgggaatgtgcccgtatgttcagaacctcagaggaaggattccaaagcctccctagacattgcattctaatgctcaggaatgctcactctcacagaggaaatttatagacccttagatagccatttagagccagaacgggtctaacatgacttggtttgaatttccttatattacaaagttgataatcagccttgatgacacaaaggacatgcaggggttcactcaagttgtttctggagagaccgacactactctatctgacccacgcagcctaacactgcagccttacacagggaacctaacactgcagcctcgcacagggatgcacatctcagatgatgggcgggccgggttcaggtctcctgatgtaaatcacacttaacccactccctgagatgatacagtgattcatctcgcacctaatcccactcccttgaaatacagggatgcataatttcccacctaaccccaccccctgagatgcagtgctaacgggtgaatatcccccctgccccacatttgagctgaggaaaagtcaacatttcctttcctgagcgccttcacctgatgggcttggatccgttattttattttccaagctttcttttaatcatgcttgaacttttaatcctttatttaaaggccttatcttttttttttttttttttttttttttgagatggagtctcgctctgtctcgaccaggctggagtgcagtggtgtgatctcagttcactgcagcctccgcctcccgggttcaagaaattctcctgcctcagctttccgagtagctgagattacaggcgtgcgccaccacaaccagctaatttttgtatttttagtagaaatggggttttaccaagttgaccaggctggtctcgaactcctgacctcaggtgatccgcccgcctcagctcccaaagtgctgggattacaggcatgagccactatgcctggcctaaggccttatcttaatatttaattgtttgatgttttttcaagcataattccattttcatgtgtcattccaaatatgtacaatattctaatgcccagttgatactgagcatttacacaatacatgcattatcttactctgtgtgttaaaagtctacacatcacatcgtcttacttgtatgtatttgctgtgtacctttcaatttgctgtgttttgtcttctaacctttgaattgttttatatctgggctatttaacttagtttgttggttttggataatgtctttatagtgggttaagtgacaccctctcaaaagatacgtccagatcctaacccctggaacatatggatggtaccttatttggaagaaggctctttgcagatataattaaggatcttgagatgaggaaatcaccatgggttatcctggcgggccctaaatccaatgacaagtgtctttatgggag

SEQ ID NO: 687568 - DNA, 610 bp, Homo sapiens
gcatcttttaggttttttatttctctgtaccataggaattgtctcctcatatttgagtatttaacttctaggatattgctagtgataatgtctacattgcacatttgatttcggttttctgtgggaaggagtgagacactttgcctctatattacaatttcagaacaagtagtcctctttattacatattccttttcaatatggtgagcaagtagcacttttattgtatatatttataaggtacagtgtgatttttgacatataaatgccttgaataataaataaatcaagctaacacagaagtttaatattatgaattcttcccctaattactgctctaatagaatcmataaaagtttacaaaattgaatttttattcagttcaaaatactctctaattgattttggagttttctttttgaacactgtgttattttgcaatgtggatttagttttcaactatttctgtagttcatggagatatttctgttatttattccaagtttaatttcatcattgtgagaaaatagtttggacaatttgttattttaaacatataaagacttattttatagtttacaatatgatccatccctataattatattgag

SEQ ID NO: 687569 - DNA, 653 bp, Homo sapiens
aaaacttaagcatttcatatgtctgttcaataaattgactactttatcaatcataaaatgatcttatttaatttaatttcctttgatctgaaatctacctatggtggcactaatgtaataactccagatttctttataaagtattacttaaaaataaattttattgtgtataaagtatataagatactatgatattcaaatagtgaaaaattactatagtgaagcgagttaacatatacaacattgcactttgttctacatatttttgtaagtgtgtgcggcaagagtagctataatctattcagttagtcaaaatcccaaatatattacattattattaactatagccctcatattgtagcttagatctctagacttgtttatccgacatatctactgttttatattctttgacttacatttctcatttcttgccactaccctaccatgaccatggtaattgctgttttattttctctttatatatcactttttwaaaaaatgcactatttttcttcctgtgtctggctgatttcatttagcataatgtcttcctggtttattcatggcatgtcaaatggcagaatttcctctttttataagaatagtgtgatggttaatattaggtgtcaacttgattgtattgaaggatg

SEQ ID NO: 687570 - DNA, 673 bp, Homo sapiens
ttctaggagcatgtatttttgtttcagcttgaacagacaggattttattgagtaatgtatgtggagacattaatcacacaaaggagtcattttcatttatgaaattctccttttcataatcccattaattgaacagcttacatgactttcaaaaccacaaggctccataaattcatatatcccagacttatttattataaataatctggaaaaatgtggtgtgtcctactaaaaacatttgattgaaaaatatccttcatagtctttttgctagcaaatagcattagcattttcaccaggaggactgtgtagtggtcattagcttctttgygagggtatttgattggaataatttatacctctgtggggtcctagtagagagggaggggctgtaggcctgctatttgcaattatctccataggcactaaaatgacacttacaacattcaccaacttttatcaacagataaattattaagagaaataattttgaagtaaggaaattagaaaaaatataaaggcaaataaatgacccattgggaaaaaaaaaagacatatctctggaaaataaaaagagatacaaccataaaactaaataagaaaaataatttttatacctaaattgtaatctacatgtgtttcaaaatagagcatatgaaaatgcacctcttat

SEQ ID NO: 687571 - DNA, 1101 bp, Homo sapiens
tggtgctattatatgtcactgtgacctcaaactcctgggctcaagaaattctcccacctcagcctcccaagtagctgagatttcaggcataagccaccacactaggccagtaacttctaaatatgtaacaaggtgtgtataaaacacatgggtcatgcacattttcagataattaagccatttcagaactttagaaaccagagtttaagtgttttattataaaatatcttactattcacctaacaaaatcyagacatctgtgttttgtcagcattcaattttctattttcataaattgtcatattcaaaggtatcgggtattttccatttatttttaagaaatatatatgttctgtggtataatgtaatattggacacatgttggtattctgattaaatcttttgtttactgaaagataagcattgctcataccttagaataccctagaatatatatttttttcctaaaaaaattaaatttatataagtgtatagacattaagaggacaggttctgaactcacacagtcggagttcaaatcttgacacttagggccgggcgtggtggctcacacctataatcccaacactttgggaggccgaggtgggcggaccacgagatcgagagcatcctggctaacacgtgaaaccctgtctctactaaaaataaaaataaaaaaaatttagtcgggtgtggtggtgggcgcctgtagtcccagctactcaggaggctgaggctggagaatggcatgaacccagggggcagagcttgcagtgagctgagatcacaccactgcactccagcctgggcaacagagcaagactccatctcaaaaaaaaaaaaaattcttgacacttaatacttccattatgttggaccttaatcaacctctctgagtcacaatatcctaattagttaaatagggttaaaacacatagtattgttaggagcattaattgagctaatataatgcaaacttataatagaacttgaattaacatgtaatatgtattttgttattgttgttgttatttattacacattttatgtaagaatagttgttaaatgaaattcaaatattgtaccccctacaaaagactg

SEQ ID NO: 687572 - DNA, 1590 bp, Homo sapiens
  misc_feature 553, 554, 555, 556, 557, 558, 559, 560, 561, 562, 563, 564,565, 566, 567, 568, 569, 570, 571, 572, 573, 574, 575, 576,577, 578, 579, 580, 581, 582, 583, 584, 585, 586, 587, 588,589, 590, 591, 592, 593, 594, 595, 596, 597, 598, 599: n = A,T,C or G
  misc_feature 600, 601, 602, 603, 604, 605, 606, 607, 608, 609, 610, 611,612, 613, 614, 615, 616, 617, 618, 619, 620, 621, 622, 623,624, 625, 626, 627, 628, 629, 630, 631, 632, 633, 634, 635,636, 637, 638, 639, 640, 641, 642, 643, 644, 645, 646: n = A,T,C or G
  misc_feature 647, 648, 649, 650, 651, 652: n = A,T,C or G
gcccaggctagagtgcaatggtgcaatctcagctcactggaaccttcaccccccacccccacaccctgttcaagtaattctcctgcctcagcctcccaaatagctgggattacaggtgtccgccaccacacccagctaatttttgttatttttagtagagatggggtttcactgtgttggtcaggctggtctccaactgttgccctcaggtgagccactgtgccccaccttttcctgggtttcataaggatctgaagtggtggattccttgtttttgctagtatctcatttagagttgagatggaccttaaaactcatctgttttaactcactttttaatagatgagttaaacttaatttacttaaggatgtacagttagagcctggaacttcaaccattattcactccccatgccctgtttccccccacttcgaaattaaatgcggttagcatcatatagttcattttccccctccatgctgctgtgtgattcttgactttgggtatgagtttttcatccttcatgcagggttctgtcagttcatggtatannnnnnnnnnnnnnnnnnnnnnnnnnnnnnnnnnnnnnnnnnnnnnnnnnnnnnnnnnnnnnnnnnnnnnnnnnnnnnnnnnnnnnnnnnnnnnnnnnnnggatttttgtctgctctgtcacaaggtgcattccaaggcctcagcccaatgccggcttgtagtagccattccttaaatctgttgaatacctggaattggagtgccacaaggaagctgtctggaggggtaaggggtgctgtcaattccttcccatcttgggagctgggaagcccagtcctgttggatttagtataagcttcttacagatgtttgggtctcctttctctgaggcgccctggttcactgggccaactcaggagttggtctgcccttcctcagaaatcccttcaagtttttctgttcctcttcctagactggtgctttttggctgggtcagtttcccaaatgggcctgtagctgctctgagctgggtcatccagccgtttagcagctgcttcaaccactgctaggctgccttttggagacaagagctcccagctcctccttctggcytagcttcccatcaaatggggccctgggtcctctcctcacaaggattttgggctcctccgcagttttgtagccagcctggattctggccttctgcagcctgctccctcccttcccttccgcccctgggaagagcgacccccaccactctcggagactgcactgcccgcctgtcagagtgggcactcaggtgacactgctgtggtcgtccccttcctccgtgatccattccggagggggtcattcttagtctaggcctgcaggcccggagctccagccatggtctcccctgtccctgaccggcggtctgggaggcagcaggtaggggatcccgggcaggcggaccaggcctgggtggggggcgagcaggaggcgcgggacagcacctgggggtcccagctgatgaagggtcggggtgggcagtggtttgggggccagacggatccgcggtgtgggcgcgccggggtgttgatggaggaggggccgag

SEQ ID NO: 687573 - DNA, 588 bp, Homo sapiens
tggcttgtgcctcctggctgctgctagggtgcccatcactagttaggtcccgtggtggagggagtccctgcagctgaggcaccatgcttgaaaggggaaagcggctgtaaccgaatttgctgcgggccctcacctgaattccccaccacagttcccctcattgctgacaccatgcgggagtaaccatcagaacgtctcctaccagggacctctcctgtcttcctggtcyttgtctaacgatcttctggtcccagcgatgtgctcaggacagtgaccgcacttctccaaccaccctcctcccctaagtggcactttttgcctggaacttaaatttttattttaaaagaggatgacctcaagcatcgtccagctctgaaaggccccgcgattccaacagaccagctcagaaaaactagaaatggccctaagaggtgacaaggaaaagtgaaggagtttacgaagcccggccagctccaactcctgcaggacgcacactccagctcccactaggggagctgtcggggccgtagatccctcgtcgcagagatgaggtcgagtaatttccaaaaggggatatttgctctcaca

SEQ ID NO: 687574 - DNA, 671 bp, Homo sapiens
gaacaccttgaggccaggagttcaaggttacagtgagctatgattgtacaactgcattccagcctgggcgacagagcgagaccgtgtttctyttgtttgtttttagaattagggtcttgctctgttgcccatgttggagtgcagtggcactcatagcccactgtggccttgaactcttgcgcttaagccatcctcttgtctcagccacacatgtagctgagacgacagttgtatgttactagacctggctgttcattttaatttttgtgtgtatatggtcttgctatgttgtcttgtctgttctcaaactcctggtcttaagtgatcctcccacctcagcttcctgaagcgttggaattataggcaggaaccattgcacctggcccttgtctctttaaaaaaaaaaaaaaaaaaaaaaaaaaagtgaaagaaggcaccacttgtcaaggatgctgtgaagttggccagtgcatcattctgatggtagtgttaattagaatgtatctttggacagcaatttggcactaggtataaagaccttgatgtatcctaaacatttttaagttatttcaacaaagatatatgttcatagctaagataattattcaaggtgttcacatggccctctgcacaaggggtgccacacctgtgggtgtatcagacatgagata

SEQ ID NO: 687575 - DNA, 671 bp, Homo sapiens
gaacaccttgaggccaggagttcaaggttacagtgagctatgattgtacaactgcattccagcctgggcgacagagcgagaccgtgtttctcttgtttgtttttagaattagggtcttgctctgttgcccatgttggagtgcagtggcactcatagcccactgtggccttgaactcttgcgcttaagccatcctcttgtctcagccacacatgtagctgagacgacagttgtatgttactagacctggctgttcattttaatttttgtgtgtatatggtcttgctatgttgtcttgtctgttctcaaactcctggtcttaagtgatcctcccacctcagcttcctgaagcgttggaattataggcaggaaccattgcacctggcccttgtctctttaaaaaaaaaaaaaaaaaaaaaaaaaaagtgaaagaaggcaccacttgtcaaggatgctgtgaagttggccagtgcatcattctgatggtagtgttaattagaatgtatctttggacagcaatttggcactaggtataaagaccttgatgtatcctaaacatttttaagttatttcaacaaagatatatgttcatagctaagataattattcaaggtgttcacatggycctctgcacaaggggtgccacacctgtgggtgtatcagacatgagata

SEQ ID NO: 687576 - DNA, 623 bp, Homo sapiens
tctataaaatgagaaggtagttgattcacaaaactccatccatctggcattatgctaggcactgagaagacaatggtgagtaaagcactgctcttgatcagtgttctttaatagagcctagaatttgcttgtgataaaatactttcctttttctaaccaagtatcatttcaattcaacctatttttgatttatcttgttctttcctctattttttaagtctaatagctgtgcgagcttattgttacatggggtctaattgtaaactaaagaatcatamatggttattacataatgttattatttactaaagtgaatactccaaatattcacaaatagcctagttaaaactatttaactgtatattaaaaacaactcaatcaagataaaatagggaaacatggacaacatttagaaatgcgcattcgtcttaggagagggaaaagacaataatgtttgtgtgaatttggcttaccagatgagacagaaaacattgaaacaaattctgatagaaatcttgtcattatacatggaaccaacccaaatgcccatcaatgataggctgaataaagaaaatgtggtacctatacctcctggaatactatgcagccacaaagagaaatga

SEQ ID NO: 687577 - DNA, 679 bp, Homo sapiens
tctgtggtcatggctagtgctgtgatactggtttaagtgaaattatctttcagagtccattccttacatcctgaatacatgtactgcatgtatctgataggtggtctgaaaggttcttctttttcttaagataagattttaaaaagactttatagaagattgcctcagaaaaatctcatcgaatagcatcattcttcctttttccctattatctcttgacccataaatagtcttatagtagctgtaaaagcctttccccttatggttaaaattaaatacagtaaaacattttcccccacttcttccaattctgatattttaacagcaacacagcaagttctaattagcctaagttaaataaccattactaattttacaccaagatcaatatgggggatttctttttttttatctgtgtaattttttttatatactttaagttctagggtacatgtgcacaacgtgtaggtttgttacataggtatacaagtgccatgttggtgtgctgcacccattaactcatcatttacattaggtatttctcctaatgttatccctcccccagtcyccaccccacgacaggccccagtgtgtgatgttcctcaccctgtattcaagtgttctcattgttcaattcccaccgaagaataagaatatgcggtgtttggtttttctgtcc

SEQ ID NO: 687578 - DNA, 937 bp, Homo sapiens
aatcgcatccccctgtttccccccaggctgtcgcttagctttctgtccccactgccattttctttatcatccaaacttaagtccatcaagatggggacaggaaaaaaaaaactgaagccagatattacgtatgtgcacttgctattatttctattaataggacctcctttggcatgaaaaagtttaatgtcattgtcrttctcagaaacgagttttgaatgttggatgagggagcccttggcccatcttgcaggaacaaggcacatgctatcatttcatgaactgagctctgctcgcctgcaaagggccttgcaatctctcactattccttgaagaagggggtgggagtggagagcagaaggaggagaagaaaatagagagcaggaggaagtgagaaatgggatcgggtgtaggaaaaaagctgaggggctgggcaggcctggattggcaccccagctcaggacagtggcctttataaagtcatctaacctccctgaggttttgtttcctcatcaaatgagaaaagcacaatccatgaagcaggattgagggaggattagaaatgagaatgttaagtgcctgctctctaaatgcacaataaataataactagcattattggctaaacataagctggtaaatgggggagattttaagatgagttttagggaacaatattttcccccaagatagggaaactaaagtaataaacaacatcatttattgactaaaatatttttgtgtgctgtcaccttaattaaatgacataaaacaattgagtgatttataaatatatataagccagcaaccaacaactgctgttatattttttctttctgaaataagaaatgaagctctatcaatctattaaagaagtaatttctagaacatgtataccactcaatgaaaaagaatctttttatttgttttgaactctg

SEQ ID NO: 687579 - DNA, 937 bp, Homo sapiens
aatcgcatccccctgtttccccccaggctgtcgcttagctttctgtccccactgccattttctttatcatccaaacttaagtccatcaagatggggacaggaaaaaaaaaactgaagccagatattacgtatgtgcacttgctattatttctattaataggacctcctttggcatgaaaaagtttaatgtcattgtcgttctcagaaacgagttttgaatgttggatgagggagcccttggcccatcttgcaggaacaaggcacatgctatcatttcatgaactgagctctgctcgcctgcaaagggccttgcaatctctcactattccttgaagaagggggtgggagtggagagcagaaggaggagaagaaaatagagagcaggaggaagtgagaaatgggatcgggtgtaggaaaaaagctgaggggctgggcaggcctggattggcaccccagctcaggacagtggcctttataaagtcatctaacctccctgaggttttgtttcctcatcaaatgagaaaagcacaatccatgaagcaggattgagggaggattagaaatgagaatgttaagtgcctgctctctaaatgcacaataaataataactagcattattggctaaacataagctggtaaatgggggagattttaagatgagttttagggaacaatmttttcccccaagatagggaaactaaagtaataaacaacatcatttattgactaaaatatttttgtgtgctgtcaccttaattaaatgacataaaacaattgagtgatttataaatatatataagccagcaaccaacaactgctgttatattttttctttctgaaataagaaatgaagctctatcaatctattaaagaagtaatttctagaacatgtataccactcaatgaaaaagaatctttttatttgttttgaactctg

SEQ ID NO: 687580 - DNA, 931 bp, Homo sapiens
ttttcatttatttgttcaaggaaaagtattttaatgatatagatatattattatgattagctaatttttatctttactgtttaatgtttaatatcataatttatccattcatgattttttttacaaataattctttttctatttataaaaaattaaatatacaaaaagcatagaaaataaaataaaaatatttgggmaactaactgaaaaattcaacaaataatattttccaggtttgattcatattttaaaaagtgataatatcactaatatcctaaagtcctgtattgtcatctaattccactgactcctttcaaaatggtagccactaccttaaagttgtattttcttgctgtttgtactttataaaatatatgaagccatagaaacacagtaataatttctgggagaatattttctatatattatataattatctacatagattgttaagcctaatactcaacattgttttcaacatcattcatattagtacattcatttagcagctaaacctaataagtttaaatgagaattttgtattttatttttttccattctttccctaatgaattttggttgtgtgttttggttggaacaaaaggcaacataacagtggacatccttagagaagcattcttgtgcttatacaatactcctgaatacattcagtttatcccccttgcataggctggtccttctcagtctcctttgctgaggatacttcttcttcaagaaatataaacagttgagtgtctcaggactgttactgcacctttgttctttgtctctaaccactccctgaatacgatcctttgtctctaacgactccctaaatatgaacatgcaatactaaataaaatatcattcatatgctcataattttccaacatttttcttctgccctgaactttcaactgcttacttggca

SEQ ID NO: 687581 - DNA, 624 bp, Homo sapiens
tatgaaattaacctaacaatcaatggataattggattaaaaaattgtggtatatgtgtgtgtatgtgtatatatatataagccataaaaagagaacaaaattgtatcttttgcaacatcttgattggaactggagcccatcgaatgaaataactgaaaaagaaagtcaaataccacttgttctcacttataaatggaagctaaataacatgtacacattgacatagagcgtggaataataaaaactgagaactcagaagggtgggaggttggtaagggacgggaaatgtctttatgggtacaatggacaccattcaggtgatgactacactaaaagtccaaacatcactgttacatgatatatctatgtaacaaaacttgacttgtaacccttaaatctataaacataaaaaaattaaaattaaaaaacaaaattttaaagttttgcttttcatttttggamctttaattatccttgaattatatgttaaggtatgaccttttattagtccattctcacactgctgtaaaaaaccaccttggactgggtaatttattaaaaaaaaaaagaggtttaattgactcacagttcctcaggctgtacagaaaccatagctggggaggc

SEQ ID NO: 687582 - DNA, 1102 bp, Homo sapiens
aaattcttttttgaaatatatgtattagtgtcactcatttatgtaagctggacttaaattgatccacattaattttaaggtcaaaacgcttgtaatttatatttatctttcaggcagtagcagtcaaaactggagagatactgaagtaagcacataagggttcggtattaaccagaactggggttgaatctcagttctgctctctagagctgtaaaagctggattttttttatctgtacactaggcaaagtagtacttaccttttaaaactctaataaaattcaaatcaaatgttggtattaagtcttggcaaggagaaattgctgaacataytacttttcatcccattgcctaattcttcagtagattaattagtaattagcaaaccttattatctagtacaatttaactggaaataattatttttagtattactgaagtccagctcaaagtgtcatttataaatttactctataatttatttaacaaaattatgtttcatactaataagcaactattaatgttaaagtcaaagagttaaccatcatgtactaatcaggagattgtgctaggcttaagaatctaatacaaaggaaattctcattattagagggtcagaggattaatgagacattgtagcccatatcacttaatagatggttagaacttcattctcatttttttgtgggatcagaaatctgtaatttataccagtttctcacgtgatgttaacatggttggccaataaactatattctgagatatatccaaatacatcatagataattcccaactaaacataaggtggcactaaaacattcagtgatattcatttgaagtgcaaaaagattcctgacttaataaatcaatatttataaagtcaccattctgggaaaggcagtctgccaagtataatcaaagatgaagagatatctaagaatctgtgccaaccttattctagctggaaacaccgaagtgtaaacaacaactcatcagataatttgtttttcattgtgattataaaattgtcacagagtttaatgtcattttgcttcatctttatattacatgtttatgcaaatgttacccaacccaaggagta

SEQ ID NO: 687583 - DNA, 1102 bp, Homo sapiens
aaattcttttttgaaatatatgtattagtgtcactcatttatgtaagctggacttaaattgatccacattaattttaaggtcaaaacgcttgtaatttatatttatctttcaggcagtagcagtcaaaactggagagatactgaagtaagcacataagggttcggtattaaccagaactggggttgaatctcagttctgctctctagagctgtaaaagctggattttttttatctgtacactaggcaaagtagtacttaccttttaaaactctaataaaattcaaatcaaatgttggtattaagtcttggcaaggagaaattgctgaacatattacttttcatcccattgcctaattcttcagtagattaattagtaattagcaaaccttattatctagtacaatttaactggaaataattatttttagtattactgaagtccagctcaaagtgtcatttataaatttactctataatttatttaacaaaattatgtttcatactaataagcaactattaatgttaaagtcaaagagttaaccatcatgtactaatcaggagattgtgctaggcttaagaatctaatacaaaggaaattctcattattagagggtcagaggattaatgagacattgtagcccatatcacttaatagatggttagaacttcattctcatttttttgtgggatcagaaatctgtaatttataccagtttctcacgtgatgttaacatggttggccaataaactatattctgagatatatccaaatacatcatagataattcccaactaaacataaggtggcactaaaacattcagtgatattcatttgaagtgcaaaaagattcctgacttaataaatcaatatttataaagtcaccattctgggaaaggcagtctgccaagtataatcaaagatgaagagatatctaagaatctgtgccaaccttattctagctggaaacacmgaagtgtaaacaacaactcatcagataatttgtttttcattgtgattataaaattgtcacagagtttaatgtcattttgcttcatctttatattacatgtttatgcaaatgttacccaacccaaggagta

SEQ ID NO: 687584 - DNA, 2048 bp, Homo sapiens
  misc_feature 1767, 1768, 1769, 1770, 1771, 1772, 1773, 1774, 1775, 1776,1777, 1778, 1779, 1780, 1781, 1782, 1783, 1784, 1785, 1786,1787, 1788, 1789, 1790, 1791, 1792, 1793, 1794, 1795, 1796,1797, 1798, 1799, 1800, 1801, 1802, 1803, 1804, 1805: n = A,T,C or G
  misc_feature 1806, 1807, 1808, 1809, 1810, 1811, 1812, 1813, 1814, 1815,1816, 1817, 1818, 1819, 1820, 1821, 1822, 1823, 1824, 1825,1826, 1827, 1828, 1829, 1830, 1831, 1832, 1833, 1834, 1835,1836, 1837, 1838, 1839, 1840, 1841, 1842, 1843, 1844: n = A,T,C or G
  misc_feature 1845, 1846, 1847, 1848, 1849, 1850, 1851, 1852, 1853, 1854,1855, 1856, 1857, 1858, 1859, 1860, 1861, 1862, 1863, 1864,1865, 1866: n = A,T,C or G
caggggtgtggctcctatacctggccactgtgctcaaaccccttgctggagggggagcagctggtgagcaggtgcaggagccagggaaagtgcttttgggctcaggcccgacagctgcatctaggagtgtgttacaattaatgctgttttagctttgccatctggggatggcttatgtgttaaacagctcagtgaagagtcagtgtgacagcgttttttggttcctgcactcagtgtrtcctgatttctcgtctgggatccactaacaatcaggtcacagaaacagtttggaaggtgatgaatgcagaggatttcgttaagcagtggaagtggctgtcagtggaaggggagctcgaaaggggttggtgcaggaagaaggtgatctttccctgaagcccggccatctccagctgggcttctccgtgaagttgtgtgaaattgtggcatctgaagttaagtctagttgcttcttctctcaatgttcagcagcttgtctctctgccagctgaggtctagggtatatatggacacagcatggggagtggggtgggccaaaaaagtaacatttgggtgggaaaacagggataactgttctcaacagggcagcagtttccaggcttgagaactgagtctttggtaggaaatcgccctcttctacccagtatttccctgcctcctgtcctttaactgagatcaatttaactgagatcacatgaaccattagtaaaaaaaaaaaaaatacagtacttgaacctcattctttgaactccaaattctgtaacctcagttgcataggaagatgtatgggttgttgaatggggaatcacttgattttatgaaaacttgaatcaggttaatgctagccaaaaatttttcttgcaattgtacattcgataacaaaattaatgcagtgtattcagaattgtaaaattgcattttaaagttctgattaaatttcatgagaacagaaagaaatgaagataacattatcataatgacatcttattaaattttttttgaaattctgatggaaggaggcctaccagattaaaccattaaggaagatcatattccttctagtcctagggctctagagctctgctttacaagatttgatgtactttaaataaactcatgtctcaaactatcacaaattttcttcgggctttaccatctagattaacaaactatctaacaatacttctatacaatggaataagaatgtaagctattctcaaatattgcctctctagttgaagatcttggttcttcaaaaggaattaaagatgttcataaatccactgttgaatcattcagcatttctaagtagcacaaactattttggatgctgcatatagaacataaaaactactttgtcctttctataagttcatattttctgtctaaatgtacaacactaaataaagaattacatgcaaaatacttacatacaagtcactcccaagtattataggattatagagaataggatttcagtatggttttaagcaacagtactctggaattgactgcccaagttcaaatcttggctttactgcctgctagctgctcaagtttggaaattttagtttaaccctctgtgtctcattattcttatttgtaaaacagagactttagaaactcttgcttccatgagcttataagagaactgaaataaataacatatctaacttgctcaaaacagcacattgaacatggttatgtcacaaaaacagggtattaatgttacatataaaaggcttattnnnnnnnnnnnnnnnnnnnnnnnnnnnnnnnnnnnnnnnnnnnnnnnnnnnnnnnnnnnnnnnnnnnnnnnnnnnnnnnnnnnnnnnnnnnnnnnnnnnnagttgggaaggggaaagaaggtgggaaagatcattaatcatatattaaccatcattaattatatcataaatataaggagttgggagagaaagatgtgggaaagaggaaggaatgaggcttaaaagcaggcagcaaacattaaaaaatggatacatggataaagaacacttaagaaaaacttg

SEQ ID NO: 687585 - DNA, 565 bp, Homo sapiens
ttcctgtttgtgactttctttggatttagagattaccctgcttggggataagggaatgaatgacagtgaggtccttgagtaggacacagagtgtccccgtgacctttccagacttttccctgggaatcctggcaatcctggaggggaaagattaaggggakgtgtcttagctcaggcttccataacaaagcaccacagatgatgtggcttaaacaagagaaatttgttttctcacacttctggaggctggaagttcaaaatcaaggtgtcagcaaggttgggtctttctgaggcctgtctgcatagcctgtggatggtcttctccctgtgtcttcctattttcttccatctgtatgtacatgtcccgatttcttcttataaggtcaccagtcacctattggattggattagggcctacccatatgacctcattttaaattaattacctcttaagactctccagatacatcacattctgaggtactagggattaggacctcaacatatgaatctggtgtggtgtggttggggcacacagttcagcccacaacagaagggaattgtc

SEQ ID NO: 687586 - DNA, 576 bp, Homo sapiens
tgactcatttgtcgggtttgtgattttcagggaattgatgctgatttcacatcagaaaagcatcgagcagctgcaagaaacccttagacagaagctgctgagtgatgataactggaaggagaaggtaatggtagtgtggctttcatcagcatgcaacctatttgcattttaaaaattctgaccatttgtcagaagactcttccggatagatttatttgcttctatgcacactttagattccttctggaatttcctagaccagacatgcttatggaatgtgtcttttccaaaatattagacaacataatggaaaataaaaaattataacacattttggaatcttgtaagatagctcttggttctcatgaaaaagcatttttttkgcttttaaatattttcttatctcctcatcaactatcacaatctacatttgatcatattcttaaaaccagggaaataattcttacaacttctcttcttctcctataagaagataaaagaatggaaaatgttttagaattatttggttttggacttttgacatatataccctgacaaagtaaaatgaataagcat

SEQ ID NO: 687587 - DNA, 1233 bp, Homo sapiens
aggccttttcttttccttctctaaggcccagcttctttcattctttctcatttttattagcctcagggtattcaactgactggtctgcacttattccctttccttattcttaccaatctatgtttaaaaattgaaaaagaagattatcaaccctattttgtataatccaaaatattcawattagagcaatgaaagattgtttatccatccaactgatggaacagtttaacactgtggttaagatctagtgagatcgtctctcatacctactctttaagggactagaaattaaagtaacatttttggaaagcaatttgtcaatatgtaccaagagatattataaacttcccatcctttgattcagaaattttactaatggaattaacgtggatagcgattcagagagtcattcctcttctcaaactcctgagctccttctcttagtatgatggagtaaactttcctgcttttgcttttgtagaaatttcccatctccatattcacaccccactaggggttttcagatacacttcactggagaaaaggtctctgtttatgatcccctctagtacttctattcactgtaccctgtccttgaggtgctaacacagagtaaaacaagttagtgttagcatctgacatatgaaagcatttatgttcttgctttatgctagtaagttaatttggtggtaaaaatgattctatataatattctataagttcttgctaggaccatgatatctttctaatgaattaattatattgcagaggtatgtatatatgtatatattttctatagtataaatggacatttcatttcgttgaaagggcacgacttcttgttaataaatgttatcatttagctagcagtaaatcaagatccagaccagaaaagcaaaggactaataattatgccttggctgtgttagctattgagactatgaataaaaagttctctaaaagtcttctcatgagaaaggagaatcattaatatgacattttcatctccttcttgggtcactgtgcctttgccaaagaatgaaatgttctttttacaaatatataatacacattttaaaataaacttcatagcttaaatggttttaacatgcaaaaaagtagatagcaatttgtgtctgtgcttaattattttagagtatgtaaaaagcacacaataagatcaatagttgctatgcaacaaggatggcacattttaaaataactacgtattta

SEQ ID NO: 687588 - DNA, 1233 bp, Homo sapiens
aggccttttcttttccttctctaaggcccagcttctttcattctttctcatttttattagcctcagggtattcaactgactggtctgcacttattccctttccttattcttaccaatctatgtttaaaaattgaaaaagaagattatcaaccctattttgtataatccaaaatattcatattagagcaatgaawgattgtttatccatccaactgatggaacagtttaacactgtggttaagatctagtgagatcgtctctcatacctactctttaagggactagaaattaaagtaacatttttggaaagcaatttgtcaatatgtaccaagagatattataaacttcccatcctttgattcagaaattttactaatggaattaacgtggatagcgattcagagagtcattcctcttctcaaactcctgagctccttctcttagtatgatggagtaaactttcctgcttttgcttttgtagaaatttcccatctccatattcacaccccactaggggttttcagatacacttcactggagaaaaggtctctgtttatgatcccctctagtacttctattcactgtaccctgtccttgaggtgctaacacagagtaaaacaagttagtgttagcatctgacatatgaaagcatttatgttcttgctttatgctagtaagttaatttggtggtaaaaatgattctatataatattctataagttcttgctaggaccatgatatctttctaatgaattaattatattgcagaggtatgtatatatgtatatattttctatagtataaatggacatttcatttcgttgaaagggcacgacttcttgttaataaatgttatcatttagctagcagtaaatcaagatccagaccagaaaagcaaaggactaataattatgccttggctgtgttagctattgagactatgaataaaaagttctctaaaagtcttctcatgagaaaggagaatcattaatatgacattttcatctccttcttgggtcactgtgcctttgccaaagaatgaaatgttctttttacaaatatataatacacattttaaaataaacttcatagcttaaatggttttaacatgcaaaaaagtagatagcaatttgtgtctgtgcttaattattttagagtatgtaaaaagcacacaataagatcaatagttgctatgcaacaaggatggcacattttaaaataactacgtattta

SEQ ID NO: 687589 - DNA, 1233 bp, Homo sapiens
aggccttttcttttccttctctaaggcccagcttctttcattctttctcatttttattagcctcagggtattcaactgactggtctgcacttattccctttccttattcttaccaatctatgtttaaaaattgaaaaagaagattatcaaccctattttgtataatccaaaatattcatattagagcaatgaaagattgtttatccatccaactgatggaacagtttaacactgtggttaagatctagtgagatcgtctctcatacctactctttaagggactagaaattaaagtaacatttttggaaagcaatttgtcaatatgtaccaagagatattataaacttcccatcctttgattcagaaattttactaatggaattaacgtggatagcgattcagagagtcattcctcttctcaaactcctgagctccttctcttagtatgatggagtaaactttcctgcttttgcttttgtagaaatttcccatctccatattcacaccccactaggggttttcagatacacttcactggagaaaaggtctctgtttatgatcccctctagtacttctattcactgtaccctgtccttgaggtgctaacacagagtaaaacaagttagtgttagcatctgacatatgaaagcatttatgttcttgctttatgctagtaagttaatttggtggtaaaaatgattctatataatattctataagttcttgctaggaccatgatatctttctaatgaattaattatattgcagaggtatgtatatatgtatatattttctatagtataaatggacatttcatttcgttgaaagggcacgacttcttgttaataaatgttatcatttagctagcagtaaatcaagatccagaccagaaaagcaaaggactaataattatgccttggctgtgttagctattgagactatgaataaaaagttctctaaaagtcttctcatgagaaaggagaatcattaatatgacattttcatctccttcttgggtcactgtgcctttgccaaagaatgaaatgttctttttacaaatatataatacacatwttaaaataaacttcatagcttaaatggttttaacatgcaaaaaagtagatagcaatttgtgtctgtgcttaattattttagagtatgtaaaaagcacacaataagatcaatagttgctatgcaacaaggatggcacattttaaaataactacgtattta

SEQ ID NO: 687590 - DNA, 1233 bp, Homo sapiens
aggccttttcttttccttctctaaggcccagcttctttcattctttctcatttttattagcctcagggtattcaactgactggtctgcacttattccctttccttattcttaccaatctatgtttaaaaattgaaaaagaagattatcaaccctattttgtataatccaaaatattcatattagagcaatgaaagattgtttatccatccaactgatggaacagtttaacactgtggttaagatctagtgagatcgtctctcatacctactctttaagggactagaaattaaagtaacatttttggaaagcaatttgtcaatatgtaccaagagatattataaacttcccatcctttgattcagaaattttactaatggaattaacgtggatagcgattcagagagtcattcctcttctcaaactcctgagctccttctcttagtatgatggagtaaactttcctgcttttgcttttgtagaaatttcccatctccatattcacaccccactaggggttttcagatacacttcactggagaaaaggtctctgtttatgatcccctctagtacttctattcactgtaccctgtccttgaggtgctaacacagagtaaaacaagttagtgttagcatctgacatatgaaagcatttatgttcttgctttatgctagtaagttaatttggtggtaaaaatgattctatataatattctataagttcttgctaggaccatgatatctttctaatgaattaattatattgcagaggtatgtatatatgtatatattttctatagtataaatggacatttcatttcgttgaaagggcacgacttcttgttaataaatgttatcatttagctagcagtaaatcaagatccagaccagaaaagcaaaggactaataattatgccttggctgtgttagctattgagactatgaataaaaagttctctaaaagtcttctcatgagaaaggagaatcattaatatgacattttcatctccttcttgggtcactgtgcctttgccaaagaatgaaatgttctttttacaaatatataatacacattttaaaataaacttcatagcttaaatggttttaacatgcaaaaaagtagatagcaatttgtgtctgtgcttaattattttagagtatgtaaaaagcrcacaataagatcaatagttgctatgcaacaaggatggcacattttaaaataactacgtattta

SEQ ID NO: 687591 - DNA, 1233 bp, Homo sapiens
aggccttttcttttccttctctaaggcccagcttctttcattctttctcatttttattagcctcagggtattcaactgactggtctgcacttattccctttccttattcttaccaatctatgtttaaaaattgaaaaagaagattatcaaccctattttgtataatccaaaatattcatattagagcaatgaaagattgtttatccatccaactgatggaacagtttaacactgtggttaagatctagtgagatcgtctctcatacctactctttaagggactagaaattaaagtaacatttttggaaagcaatttgtcaatatgtaccaagagatattataaacttcccatcctttgattcagaaattttactaatggaattaacgtggatagcgattcagagagtcattcctcttctcaaactcctgagctccttctcttagtatgatggagtaaactttcctgcttttgcttttgtagaaatttcccatctccatattcacaccccactaggggttttcagatacacttcactggagaaaaggtctctgtttatgatcccctctagtacttctattcactgtaccctgtccttgaggtgctaacacagagtaaaacaagttagtgttagcatctgacatatgaaagcatttatgttcttgctttatgctagtaagttaatttggtggtaaaaatgattctatataatattctataagttcttgctaggaccatgatatctttctaatgaattaattatattgcagaggtatgtatatatgtatatattttctatagtataaatggacatttcatttcgttgaaagggcacgacttcttgttaataaatgttatcatttagctagcagtaaatcaagatccagaccagaaaagcaaaggactaataattatgccttggctgtgttagctattgagactatgaataaaaagttctctaaaagtcttctcatgagaaaggagaatcattaatatgacattttcatctccttcttgggtcactgtgcctttgccaaagaatgaaatgttctttttacaaatatataatacacattttaaaataaacttcatagcttaaatggttttaacatgcaaaaaagtagatagcaatttgtgtctgtgcttaattattttagagtatgtaaaaagcacayaataagatcaatagttgctatgcaacaaggatggcacattttaaaataactacgtattta

SEQ ID NO: 687592 - DNA, 622 bp, Homo sapiens
ctctagagatcacggattctccagatacagagaatgaactacccaagtcttgctttctccattaattttagtatgttctttctctgatgcttcacttcagaaaagaggtataattactatctttatgagtcagactcatggcccagcacctgctagaaaattaaaaartatcttccccatgtcacatcacaaagtgaggctcattgttttcacacagttgatggtgttcacttatttgccaaaatgacaatattggaggctttaaaagccatagtgataatgaaaaacaatgactagagacatttccaaatgtcaatacataaagatagtaacatgaacttgataaactcgggttttcattcttttaaaattcttcatagattaatataagagagtctgtttctcccaggcatgacaaagcagcagatgcaggcagttcagagttgttttcttaaaacataccccaggtagttacttaggcattaggtatggaacttagtaaatgctaactactttaggagattcaatacgtttgaatatattattgacataaagattaaagaacaattgtaaaactgatgtcataacataactgtcctgctcagcagagtataataaaaaa

SEQ ID NO: 687593 - DNA, 618 bp, Homo sapiens
atcttaaaagaactagaggacaccatacctcaggaggcaatgatataattacaataattttgcaactagagaatataaataaataggtaagaattatagaaaagaaccatatggaaatctggagttgtaaagtataataacagaaattacaattcattagagaggtttaatactagattttaactggtagaataaacaatcattgaatttgaagatagattgatagaaatcacccagtttaaaaaatacagaataaagaagtaagtaaaatgcagtttcagagaaatggcagaagccattgagaataccaacatatgtgcagtggtagtgccagaacataaggacaacgagctgagagaaaaaatatttaaagaaataatacctgaaaattttctatattatgaaaaaaaaatccaagaagtgtaaagaatttgaagtataataattgcaaatatattcccccttagacacatcaaagtaaaattatgaaagtaaaaaaacatcttggaagcatgaagagaataatggctgatayacaaggaaactctaataatacagtaataattaaggccacagtggaggtgtatgacatattaatagtgtagaagaagtaaattc

SEQ ID NO: 687594 - DNA, 1072 bp, Homo sapiens
tttttttgagatggagttttgctcgtcaccaaggctgcagtgcaatggcgcgatctctgctcactgcaacctccgcctcccaggttcaagcgattctcctgcctcagcctcctgggtagctgggattacagacacacaccactacacctggctaatttttgtatttttagtagagacgggggtttcaccatgttggtcagactggtctcaaactcctgaccttctgatcccccgccttggcctcccaaaatgctgggattacaggcatgagccaccgcacccggcctaattttttttattttatttatttattattattatttttttttagtagagacagggtttcactatgttggccaggtgatctatattttttatttagtaactgctcatcattgattatattggtggcttcaatgtagataatgctaggtttagctccaaatatgatctaaatatatcttaaccattgctaaccatgaaacaacagctagcacaatgttaacacagggcactattgggagatttagtactcaacatcatgcaagtcccttgtagaataatgaagttttgtgagctggtcacggtgctacagaatgaatgtgtgcagcccctcaaaatgtatatgttaaatccctaattcccaatgtgatggtatttggagacagggtctttgggaggtgattagtctagatgagatcctgaaggtggacccccataatgggactagtggcctcataagaagaggaaaagaccagatacccctcgactccaccatgtgaagacacaacaagaaggtggctgttttttaaccagggagaaggctatcaccaaatactgagtatgctagtaccttgctcttgaacttcccagcctccagaactgtgtgaaataaatatttagtctatactattgtattacagcatcctgaccttactaagacagatggttgtcttcatatgraaaaattaaaatgacaaaaggctttgttttgtttttggagacaaagttttgctgttattgcccaggctggagtgcaatggcacaatctttgctcactgcaacccctgcc

SEQ ID NO: 687595 - DNA, 608 bp, Homo sapiens
gagtctcagtctgtcacccaggctggagtgcagtggcatgatctcagctcactgcaacctctgcctcccaggttcaagtcattctcctgcctcagccttccaagtagctgagactacaggcgtgcgccaccacgcctggccaatttttgtatttttagtagagatggggtttcaccatgttggccaggctggtcttgaactcctgatcctcaagtgatccacccgccttggcctcccrgtgttgggtgtacaggcgtgagccaccgctcctggccctcattaccttttcaaactgtattgctggggtttaacaccactatttattttgctggattgagttatatgtggccaccttgcctaactgatttgttctagtggtttttctggtgactttcacagattttgtgtgcagctgttcccattgtgtgtagggggcaaactgtttctagttcccaccccgggacgtaggtgggggtgttcggcacaggtgcaggtgggctgggggtgggcgtcttgcatgtccttttctcactggacatcttatcttttaccaagtgcgaaatgtgccgtcaggtgtctgccagataccttttgtcagtgaggaagta

SEQ ID NO: 687596 - DNA, 880 bp, Homo sapiens
tgtattgatagtgcctacttcccacaataatcatgaaaattaaacagttaatatttgtaaaatgcagcacataatgagcaatatatatgtgtgttaaattgaaaataggcaataaacaaagaaataaacctataggacaacagatgatgataaatgctatgaagaaaactaaggtatgaaaaacatacatgttattgtggtgttctaggaaacagcaaggaggttattgctgctggaacagagtgaggaagaagggaagrcagtaggagtcattaataccactttaaatttctgttcaaagtggattgttctatagtaatacatacatactcttctaggaagcagcatacttcaacggcaaaccatggaagttgtaggctgccaggatattgctaacacctgttggttacctacaaacagaaagtcccttgaagaaagagaagatagtgtttctgtttaacagaagaatataaagtgactttctgattagggttaggggaggagatggaggaaacacatactattacttttgtgtgtcttcagtttctcccttctaatgtaagggtctacttcggttgatgctataaaacaaagagttctaaaaataatttattctgtgcaaataatccacagttggaattgggggtgctcttcttctcaaatagatctgagctaagttttagagctgtgtttaaccacagatgagaaatatttgactctaaaagaagcctcagaattagttagcaaaatcatactaatcttttataatagaaactttctacctatcagagaacaattccccatttcgccctttttccagcctctggtaaacaccgttatactctctgcttctatgagtttgactatttgagatacttca

SEQ ID NO: 687597 - DNA, 880 bp, Homo sapiens
tgtattgatagtgcctacttcccacaataatcatgaaaattaaacagttaatatttgtaaaatgcagcacataatgagcaatatatatgtgtgttaaattgaaaataggcaataaacaaagaaataaacctataggacaacagatgatgataaatgctatgaagaaaactaaggtatgaaaaacatacatgttattgtggtgttctaggaaacagcaaggaggttattgctgctggaacagagtgaggaagaagggaagacagtaggagtcattaataccactttaaatttctgttcaaagtggattgttctatagtaatacatacatactcttctaggaagcagcatacttcaacggcaaaccatggaagttgtaggctgccaggatattgctaacacctgttggttacctacaaacagaaagtcccttgaagaaagagaagatagtgtttctgtttaacagaagaatataaagtgactttctgattagggktaggggaggagatggaggaaacacatactattacttttgtgtgtcttcagtttctcccttctaatgtaagggtctacttcggttgatgctataaaacaaagagttctaaaaataatttattctgtgcaaataatccacagttggaattgggggtgctcttcttctcaaatagatctgagctaagttttagagctgtgtttaaccacagatgagaaatatttgactctaaaagaagcctcagaattagttagcaaaatcatactaatcttttataatagaaactttctacctatcagagaacaattccccatttcgccctttttccagcctctggtaaacaccgttatactctctgcttctatgagtttgactatttgagatacttca

SEQ ID NO: 687598 - DNA, 880 bp, Homo sapiens
tgtattgatagtgcctacttcccacaataatcatgaaaattaaacagttaatatttgtaaaatgcagcacataatgagcaatatatatgtgtgttaaattgaaaataggcaataaacaaagaaataaacctataggacaacagatgatgataaatgctatgaagaaaactaaggtatgaaaaacatacatgttattgtggtgttctaggaaacagcaaggaggttattgctgctggaacagagtgaggaagaagggaagacagtaggagtcattaataccactttaaatttctgttcaaagtggattgttctatagtaatacatacatactcttctaggaagcagcatacttcaacggcaaaccatggaagttgtaggctgccaggatattgctaacacctgttggttacctacaaacagaaagtcccttgaagaaagagaagatagtgtttctgtttaacagaagaatataaagtgactttctgattagggttaggggaggagatggaggaaacacatactattacttttgtgtgtcttcagtttctcccttctaatgtaagggtctacttcggttgatgctataaaacaaagagttctaaaaataatttattctgtgcaaataatccacrgttggaattgggggtgctcttcttctcaaatagatctgagctaagttttagagctgtgtttaaccacagatgagaaatatttgactctaaaagaagcctcagaattagttagcaaaatcatactaatcttttataatagaaactttctacctatcagagaacaattccccatttcgccctttttccagcctctggtaaacaccgttatactctctgcttctatgagtttgactatttgagatacttca

SEQ ID NO: 687599 - DNA, 1336 bp, Homo sapiens
  misc_feature 741, 742, 743, 744, 745, 746, 747, 748, 749, 750, 751, 752,753, 754, 755, 756, 757, 758, 759, 760, 761, 762, 763, 764,765, 766, 767, 768, 769, 770, 771, 772, 773, 774, 775, 776,777, 778, 779, 780, 781, 782, 783, 784, 785, 786, 787: n = A,T,C or G
  misc_feature 788, 789, 790, 791, 792, 793, 794, 795, 796, 797, 798, 799,800, 801, 802, 803, 804, 805, 806, 807, 808, 809, 810, 811,812, 813, 814, 815, 816, 817, 818, 819, 820, 821, 822, 823,824, 825, 826, 827, 828, 829, 830, 831, 832, 833, 834: n = A,T,C or G
  misc_feature 835, 836, 837, 838, 839, 840: n = A,T,C or G
aaaaaaagagagagcgagccaagggaacttgaatcagacaaacctggttcaaagtgattattcaacaaatgtaagctgttatcatcttgtcctccatcattcaaatatgtcctgtatagatcttccattaatttcaaatatctaatgatctacaccatcaaatattatgaaggtgatgtttagcaggtcattggctaagacaggctctacctcagtctctaatagagaaggaaagacaagtagcatttactaacacccacagtatgcttcatattgttgccagaaatttcaaatgcaccatctattgatgcatggaatcctttcaacattcttagaaggtgagtgttatcttaacttttcattttaggaaaatgaagctgagagtggttaagtatcttgcttaaggtaatattcataccatggggaggatcattatagttgaccagttaaatacgtgaattgaaggtaatatcacagatccctgctactcaaaatgtggtccactgaccagcatcgctggcattacctgggagcttgttagaaatgcagcgcctcaggcgtcaccctgtccctacggaagcagaagctgcatttttcacgtggatctcctggcgatttctgcgaacatttactgctgttatagaagagacccaagcacccatatccactacctctgtcattttaccagtgaggaaatacattaaaaagcataatcactttatgagcaaataaatgttaacnnnnnnnnnnnnnnnnnnnnnnnnnnnnnnnnnnnnnnnnnnnnnnnnnnnnnnnnnnnnnnnnnnnnnnnnnnnnnnnnnnnnnnnnnnnnnnnnnnnnctacaattaaatgaatttaaaaattgaacagtttaaacaataatgatactgaaaaataaggacaaagcaacaactcaacaaaagcaaaaattggccagggataaatcataaaattgatgagccacatcacaattattttatgactgacttattgtatttatagtaagactcctcccgcattcttgtcattcttaatcattttccactatgtatacatgtgttgtttaaggagactctgacaaactactaccatgatttgctcaaatgtttaatttagtgtctatctgattcttcaagttcagaaaatgttcactgtacaatactcttttccctcatcttggcctttatttattttattatttaaactcaaacaggaggcatcattttatcagagtyaccaacaaaattatttccacttgctttggttcctgtgtattaaagaaaaaaaagccatctccttcctcctccctgtctgcatttatgtttaacgagaata

SEQ ID NO: 687600 - DNA, 595 bp, Homo sapiens
tcctgaccttgtgatccacccgcctctgcctcccaaagtgctaggattacaggcttgagccactgtgcccggccgctctttggctttaaagtcagctttgtctcttctatcgctttcatttagtgagtattcgctttctttctttttgagacacagtctcaytctgttgcccaggctggagtgcagtggagcgatgtcggctcaccgcaacctccacgtcctgggttcaagtgattctcccgcctcagcctcctgagtagctgggattaagggctccctttaccatgcccagctaatttttgtatttttagtagagacaggatttagccatgttggctaggctggtcttgaatcccaacctcaggtgatccatctgcctcagccttccaaagtgatcaggagccagctggggataatgtgagtgagcatttctcaggcaactgttattggtccagagtggcaagtactgtaagcagtccatcgacagaagtcttctctcccatctgcgggctccgtggcctgtggctgccatctgtggccactaggacagcagaggtcccagctctcctgataagaggccagtgagatgcctcac

SEQ ID NO: 687601 - DNA, 657 bp, Homo sapiens
tacgacttccttccttggaagccccacagaggcatttgtcttggagctcctgggaggcaccgttccccacaggacacagtccaagcccctcagcagaccacacacaacccccacaggtgtggtccctcaggagtgcccccgcccacctctggggcctttgcccttgccgcctcctgcctctgccgtcactgcagagatgctgacaaggccaccctccctgcacctgccatgctctttsccctgctgtcctgtccgcttggaaggccacccttgtcctacactttctgatgaattcagagtctgaacagacctcccgtcctcctgaaatcctctctgatggccttcctgcccttttgacaggattgtcacttcctaagaacagcccgcttttcccaccagacacagcaggcaggaaggaccccgccagccctggggcctggccacttggcctgtgtgcgacatttgctggatgaaacaagaagagggaaagtataggctcaatccatggataaatgtgtaaatacaatgtggtatttccatacaatgaaatgttgaactcacccacagaaaggagcgaacacagacacgggctacggagcggaggaagcgtgaagacctaggctgagagcgtgaagtcagaaccaaaaggcctcacag

SEQ ID NO: 687602 - DNA, 657 bp, Homo sapiens
tacgacttccttccttggaagccccacagaggcatttgtcttggagctcctgggaggcaccgttccccacaggacacagtccaagcccctcagcagaccacacacaacccccacaggtgtggtccctcaggagtgcccccgcccacctctggggcctttgcccttgccgcctcctgcctctgccgtcactgcagagatgctgacaaggccaccctccctgcacctgccatgctctttgccctgctgtcctgtccgcttggaaggccacccttgtcctacactttctgatgaattcagagtctgaacagacctcccgtcctcctgaaatcctctctgatggccttcctgcccttttkacaggattgtcacttcctaagaacagcccgcttttcccaccagacacagcaggcaggaaggaccccgccagccctggggcctggccacttggcctgtgtgcgacatttgctggatgaaacaagaagagggaaagtataggctcaatccatggataaatgtgtaaatacaatgtggtatttccatacaatgaaatgttgaactcacccacagaaaggagcgaacacagacacgggctacggagcggaggaagcgtgaagacctaggctgagagcgtgaagtcagaaccaaaaggcctcacag

SEQ ID NO: 687603 - DNA, 657 bp, Homo sapiens
tacgacttccttccttggaagccccacagaggcatttgtcttggagctcctgggaggcaccgttccccacaggacacagtccaagcccctcagcagaccacacacaacccccacaggtgtggtccctcaggagtgcccccgcccacctctggggcctttgcccttgccgcctcctgcctctgccgtcactgcagagatgctgacaaggccaccctccctgcacctgccatgctctttgccctgctgtcctgtccgcttggaaggccacccttgtcctacactttctgatgaattcagagtctgaacagacctcccgtcctcctgaaatcctctctgatggccttcctgcccttttgrcaggattgtcacttcctaagaacagcccgcttttcccaccagacacagcaggcaggaaggaccccgccagccctggggcctggccacttggcctgtgtgcgacatttgctggatgaaacaagaagagggaaagtataggctcaatccatggataaatgtgtaaatacaatgtggtatttccatacaatgaaatgttgaactcacccacagaaaggagcgaacacagacacgggctacggagcggaggaagcgtgaagacctaggctgagagcgtgaagtcagaaccaaaaggcctcacag

SEQ ID NO: 687604 - DNA, 657 bp, Homo sapiens
tacgacttccttccttggaagccccacagaggcatttgtcttggagctcctgggaggcaccgttccccacaggacacagtccaagcccctcagcagaccacacacaacccccacaggtgtggtccctcaggagtgcccccgcccacctctggggcctttgcccttgccgcctcctgcctctgccgtcactgcagagatgctgacaaggccaccctccctgcacctgccatgctctttgccctgctgtcctgtccgcttggaaggccacccttgtcctacactttctgatgaattcagagtctgaacagacctcccgtcctcctgaaatcctctctgatggccttcctgcccttttgacaggattgtcacttcctaagaacagcccgcttttcccaccagacacagcaggcaggaaggaccccgccagccctggggcctggccacttggcctgtgtgcgacatttgctggatgaaacaagaagagggaaagtataggctcaatccatggataaatgkgtaaatacaatgtggtatttccatacaatgaaatgttgaactcacccacagaaaggagcgaacacagacacgggctacggagcggaggaagcgtgaagacctaggctgagagcgtgaagtcagaaccaaaaggcctcacag

SEQ ID NO: 687605 - DNA, 658 bp, Homo sapiens
aaatgtaactctagctgagtgtttaccaagcatttgaattattagtaatattctcgttaactgtttaaacctgttcataattgctgatattatcctcttcaaatgatacatcatattcttttctgaaattccccattttttctcctttctaaaatattaattttcctccttattttgaggagttagatgataaggtgtggaagcctatcctttctcgtggctgagcctttaactttccgaagtaatctctagaagtttttctatctataggtgcttgaggtctgatcacactattcaagaaaaggaattactacccttttatgacccgggatgagaatgcayatgcttcacacatccattcttggtgtatttgtttgctctattcattttcaaaagaaactgcatcattttgccatcattaccctttccacccaatccctttgtgcctccattacagcaacagtgcttggccctgtgcctggccccaagtagatgtttaataaatttgtttagggacacattcattaaacacatggatagatggagtgacaccctcacactctcctgaataatgtgataccattgctatggttccttctaatgaggcaaaccctgagaaatttcacctaattgtgcttccgacaacgttatctcagat

SEQ ID NO: 687606 - DNA, 658 bp, Homo sapiens
aaatgtaactctagctgagtgtttaccaagcatttgaattattagtaatattctcgttaactgtttaaacctgttcataattgctgatattatcctcttcaaatgatacatcatattcttttctgaaattccccattttttctcctttctaaaatattaattttcctccttattttgaggagttagatgataaggtgtggaagcctatcctttctcgtggctgagcctttaactttccgaagtaatctctagaagtttttctatctataggtgcttgaggtctgatcacactattcaagaaaaggaattactacccttttatgacccgggatgagaatgcatatgcttcacacatccattcttggtgtatttgtttgstctattcattttcaaaagaaactgcatcattttgccatcattaccctttccacccaatccctttgtgcctccattacagcaacagtgcttggccctgtgcctggccccaagtagatgtttaataaatttgtttagggacacattcattaaacacatggatagatggagtgacaccctcacactctcctgaataatgtgataccattgctatggttccttctaatgaggcaaaccctgagaaatttcacctaattgtgcttccgacaacgttatctcagat

SEQ ID NO: 687607 - DNA, 637 bp, Homo sapiens
ttcagccattcagccctatttcagtgagcggccgtataatgcagttttgaaacttggaggctctggagccagactgtgtgagatcctatcattgcactgcaaccaggaaaattactaaaatgatttgtgcctcagttttcttaacagtaaaatgggtataatgaaagtgtctacctcatagagttgttgtaaggactgagtgagttaatacrtagtgatgtatgcaacagtctgggatatatagatgcttacgaaacactaatatttttatatttatgtgcttctgtctgttacttgacaaatgtcaacaaaatttgatgtttagaatgaacaaatgcaggtgttcttttgggcaagaggaagggttcattttacctttcctctgaagaacttagtgcttacaacttggtagttaagcacatggaggccacaagtcaggctgcctggcttcaaattccagctcaccttcaaatcattggctaactttagatgtgtgcttgcgtggggaaagattccaagctcagtgaaaagcaatagatgaaaaacagagaacgcagcacattcctcagctactgccaagtcagaggagcttggtaaacaggatttccattgaaactctggagtaaagaccatattc

SEQ ID NO: 687608 - DNA, 626 bp, Homo sapiens
tcaaattcctgacctcaagtgacctcccatctcggcctcccaaagtgctgggattataggtgtaagctactgtacctggcctattttttaaatttttcgagatagggtcttgttctattgcccaggctggaatgcagtggcaggatcacagctcactgcagcctcaaactcctggcctcaagcaatcttcctgcctcagcttcctgagtagctgggactacaggcacatgccaccatgctaattattttcatttcatttcttttctcttttttttttttttgtgggaatggggtttcaccatgttgcctaggctggtctccaactcctgggctcaagcaatcctcctgcctcagtctcccaaagtgcttggattacagktctaagccactgtgcccagccctcttcctgtttttggtacccagctgcccagatagtatgctgaacaccacccactccatatccagcaccagaagacagcagaatgaccttagtttataatggcaaaagaaatgcccagttgagcccagcccaaattgatgccgacacagaatggcaagttaaatagttgtagtttacagcactacatttggggctagtttgatgttatttctattttgttaaaata

SEQ ID NO: 687609 - DNA, 648 bp, Homo sapiens
tggctcacccacctcggtcaggagttcaagaccagcctgaccaacatggagaaacctcgtctctactaaaaatacaaaattagccgggtgtgatggcacatgcctgtaatcccagctactctgggaggctgaggcaggagaattgtttgaatttgggaggcagaggttgcagtgagccgagattgcgccattgaactccagcatgggcaacaagagcaaaactctgtctcaaaaaaaataaaataaaattctcccatgttctcatctagtacttttgtgctttcacttttcatatttcaatctttcctccatgtagaaagtaaaaagttcctctttaaactttcccttcttgttaaggaataaatcataagtgttagaaataatagttttttttttaaagactaacttcctttaagcctccttactktatgctaataactttttgttaggctctatcctacgtagctgttaaacatgctcacaggcacgtagtacattctatgtccttgtaccttaagcaaaatatttgtgctggacatgctcacaggcacgttccagctcgcagcctatgccccttccttatttggcataagcaatttcctcttttcctttgtctttccattcctttcacctatttagaaaagtttt

SEQ ID NO: 687610 - DNA, 617 bp, Homo sapiens
ttttttgagacagagtctcgctttgttgcccaggctggagtgcagtggcacactctccgctcactgcaagctccgcctcccaggttcatgcgattctcctgcctcagcctctcgagtagctgggattacaggcgtgcgccactatgccaggctaatgtttgtatttttagtascaatggggtttcaccatgttggccaggatggtctcgatctcctgacctcaagtgatctgcccatctcagcctcccaaagtgctgggattacaggcgtgagcccctgcgcccggcctgtcacccagtctttaagaagcatatgctcatgttattgaagaagaacctacttattattgattgccttttgaaaatttgttgggaataatttacctgcaggatttagggatagtcagaaaattctaagaaatataattattttatttaccttctaaagccaaatattcttacacagaaaggtcctctgttgttctggttttactttgttgctgaggatctttccttcctgctggtctcttcctctcaggccactggccctgtgtgattccaccgtggctggccactgggaaggggcagcttggacccttggtcaggcctgacggccat

SEQ ID NO: 687611 - DNA, 668 bp, Homo sapiens
tgaaatatatatcctacaatttgasttttttctcatcatttgtgttacataagtgtcaattaaaaaaagcaatttcaattaatttgtaaatgagatttagaaagaaataagcagtaaattttaatcatgtctaaaaaggcacagcacacaataactagttctatttgaatattttaaataaagtacgagaggacagaatccttacttttgtggttgctctaaaatattgtctatttctacctttggaagtaggacatactgctttcattgaacatgggggctctggagctatattgtgtttgttgaaatcctggcttccttaaaccaataaagaaaggctttgagtgaggaaagattaacattttattttctggtaggacactcacttcactttgctactaagcttgctcacctgcatctggaccaatgggacagaagataggacactggagatgtggccaagagataggggtcagaatctgctcttctaggttccataccaagtaattcagaaaatgagcccatatttgtccgagaaagttggaatcttgcttgtttccatgtgggtcaggtgtgggccaatggatattctaacagtgcccctggacaagggggccaagctggatcaaacgatccaaagactcaacagcaacttcactgcaggaaat

SEQ ID NO: 687612 - DNA, 668 bp, Homo sapiens
tgaaatatatatcctacaatttgagttttttctcatcatttgtgttacataagtgtcaattaaaaaaagcaatttcaattaatttgtaaatgagatttagaaagaaataagcagtaaattttaatcatgtctaaaaaggcacagcacacaataactagttctatttgaatattttaaataaagtacragaggacagaatccttacttttgtggttgctctaaaatattgtctatttctacctttggaagtaggacatactgctttcattgaacatgggggctctggagctatattgtgtttgttgaaatcctggcttccttaaaccaataaagaaaggctttgagtgaggaaagattaacattttattttctggtaggacactcacttcactttgctactaagcttgctcacctgcatctggaccaatgggacagaagataggacactggagatgtggccaagagataggggtcagaatctgctcttctaggttccataccaagtaattcagaaaatgagcccatatttgtccgagaaagttggaatcttgcttgtttccatgtgggtcaggtgtgggccaatggatattctaacagtgcccctggacaagggggccaagctggatcaaacgatccaaagactcaacagcaacttcactgcaggaaat

SEQ ID NO: 687613 - DNA, 645 bp, Homo sapiens
cctaatgtaggtgacgggttgatggttgcagcaaaccacctgggcacgtgtaacaaaactgcacattctgcacatgtaacccagaacttaaagtaaaaagacaaacacccaccaccaaaaaaaaaatataacaataaattaaaaattaaaaaataaagtgtcaaggagggatgcaaagttgggggagtcttatggtatttatttatggtatttatttctagcaaatggctagaaatatggtatttatttctagcaaatggctagaaacatggtatttatttctagcaaaaggctagaaatcagattgccatgcttctaagggagcaccttctccagatggaaagggatttgacaaggcactgttggtaacaatttttkggggaggaaagcttacatttaatccttatgaagtgtgactgcttattaaattgatcaaagctctattagaacatgaacatgttactgataagactatcacatgaagcagttaagtaattaaaatctgatttgccatgctgcccatgaacccttaacaatgtgtttttgaatgaaggcagggaagatgagagaggtggcaccatgaaatttttgatttcaacaaactaaggaataggttaaaaaaaaaaaaggcaaaagatctgtttt

SEQ ID NO: 687614 - DNA, 654 bp, Homo sapiens
aaacggctagaagttcctctttttttttttttttttttttgatacagagtctagctctgttgcccaggctagagtgccatggcatgatctcgggtcactgcaacctctgccttctgggttcaagcgattctcctgcctcagcctcccgagtagctgggattacaggcacctgccaccacgtctggctaatttttgtatttttagtagagacggggtttcactgtgttggcctggctggtctcgaactcctgacctcgggatctgcctgccccagcctcccaaagtgctgggattacaagcgtgagccaccgcgcctggccagaagttcctcttaatcrtttgttttctttacactcactgtgacaacctaagtcaaggggggatttcagttacctcagttacaccatttctcctgcttttagattcatctcatatttctttcaatgtaatctctagtagtctaatacagaaattaaatggatttctagacattgtggtcatgttaaaacaccagttcttagaggaccaatatactctgcaaaatgacactaccaccctacatttataaagccctctgtttacaaagcattttcatgtaatgtaagtggatccttacagtaaccctgtgagcaagagagagcatggcttattaaa

SEQ ID NO: 687615 - DNA, 678 bp, Homo sapiens
gtgagccaccgtgcccagtcgtgacctttggtttgtaacagcccttcccaattaaagtgcatgtggcttaagaatcacatactctgcctctcaacttcaaattttttcttacttcacaaaaatgagcaagtattcccactgagcaccaatggtctcagcatcatgctaggcacatggacctgatgctgtatttctagttaatataaaaaatgataacccaggccaggcgcagtggctcacacctatagtccrgcactttgggaggctgaggcaggaggatggcttgaggccaggagtttgagaccagctgggcaacacagagagacctcatctctaaaaaaaaaaattcaaaaactggccaggcatggtggcacacatctgtggtcccacctactcaggaggctgaggtgggaggcttgcttgagcctgggaaatggaggctgcaatgagctgtgatcatgctactgctctgcagcctgggtgtcagagtgagaacttgtctcaaaaaagactaaaaaaaaaaaaaaaaaaaaaaagttaacgtaaatggaagaaagatggaacaaagttgtgcacaagtgttccatagtggcacaataatgattacttttagtgtttagtttttttcccaagcaaaatatataaccaatgtcaggtaagtttcttccaatggctttc

SEQ ID NO: 687616 - DNA, 617 bp, Homo sapiens
caaacaaacmaaccacagcttgtaaatagtagaccaatatgccagctcaagtgtctctgatttatgctcaatattaactgccaaagtcttggcacttctttctttcactctctcctcctcagcctccttgctagctcttcttccactcaaacctgtaaatattcactaagattccttctttgggcgtcttgtcattccacatatatcaaaggctaattcacttcccgatttcaatcagcggcaaagtctatcagcattatctttaaaatatatccaaaatcaaacccttctcaccacggcaaatgctactactctagtctttctttcatacagattattgtcaaaattcttcagcccttgcctcactatagtttattctcaacaaagtaacagagtgatcttttgaaaatttaagtcagaacatgtcactcctctagtcaaacatcatccattggtttcgtatctcactaagggtaaaaggctgaatcctatcacctaaaaggccctgcagctttgccctcccctaccattaccttattaccattgctcactctgataagccaaactggtcttgtgctattcctctaacactttgcacatagctcattccttcacgt

SEQ ID NO: 687617 - DNA, 511 bp, Homo sapiens
tagagacgggatttctctgtattggtcaggctggtagcaaactcccgacctcaggtgatccacccgcctcggcctcccaaagtcctgagattacaggtgtgagccaccgcacccagccagtatggtactattctygttggagtaaagggcaacacttaaagacatgtagtctgtgtacagggacaaagaaaaaggtgtgcaaggacacataccaaactgttaatacatatcaaacatatatatatatatgttaagagagaaagttaacatatatatatatatatatgttttgttgtagctctcttattttaagtattacttttgtaaaaataaagaaaaaaagatttttaaggccagatgcggcggttcacacctgtaatcccagcaatttgggaggttgaagtgggtggatcacacaaggccaggagttccagaccagcctggccaatatggcaaaaccctgcctctactaaaaatacaaaaattggcaaggcaaggtggctcacacctg

SEQ ID NO: 687618 - DNA, 511 bp, Homo sapiens
tagagacgggatttctctgtattggtcaggctggtagcaaactcccgacctcaggtgatccacccgcctcggcctcccaaagtcctgagattacaggtgtgagccaccgcacccagccagtatggtactattctcgttggagtaaagggcaacacttaaagacatgtagtctgtgtacagggacaaagaaaaaggtgtgcaaggacacataccaaactgttaatacatatcaaacatatatatatatatgttaagagagaaagttaacatatatatatatatatatgttttgttgtagctctcttattttaagtattacttttgtaaaaataaagaaaaaaagatttttaaggccagatgcggcggttcacacctgtaatcccagcaatttgggaggttgaagtgggtggatcacacaagkccaggagttccagaccagcctggccaatatggcaaaaccctgcctctactaaaaatacaaaaattggcaaggcaaggtggctcacacctg

SEQ ID NO: 687619 - DNA, 609 bp, Homo sapiens
ggctcactgcaacctctgcctcccgggttcaagcaattctcctgcctcagccacccgaatagctgggattacaggcgcgtgccaccacacccagctaatttttgtacttttagtagagatgggattttgctgtgttggccaggctggtctcaaactcctgagctcaagtgatccacctcccttggcctcccaaagtgctgggattacaggcgtgagccaccgcacctggccagtattatcatctttttacagaaagagaaactgagtctctaataagttgcttcaggtcacatagctaggatgcagcagagcctggagcaggctctaaagctgccatctttgctcagcactcttcagtctcccagagttcccacagcacccaaacaaaagcccctagagtctggagctgcaggctgggcacatgtgcaaggattggatgactaattgttgccagcacagcatcatgaccaccccctccaccagctcctaccccctgagccgggctgacccagctcttttttgtcatctctaaatttgtcatctctcactgggggagatgkggacgtgtgtgcgaagggttaggacatgtggcttgcctgccccaaaaag

SEQ ID NO: 687620 - DNA, 653 bp, Homo sapiens
ttctaggaatggcaggcttttctttcaagaaaaccaaactgcttttcctaagggaggtaggatgtgggtaagcactttgccctcttgtcctcaccctgtgacaccaggaaacagatctgtcttgacgttgggaactgtcatgggcatggaaaacccacgtttggttccttttttgttggcaaaagggcttgataggggattggcaagggaaagagcccagcgctgacctctccttctttttttttttttttttttttgagacagagtttcgctcttgttgcccaggctggagttcagtggcgcaatctcagctcaccacaacctccacctcccgggttcaagcgattctcctgcctcagcctcccgagtagctgggattacacgcccggctaattttgtatttttagtagagagggagtttctactaaaacccagaggacgtcagacccaaatccagaagttcttcagtttctgccaaagtgtgagggaaatcaacatctgctccccttctccatttctcagaaaaaggtgctgtcccacaggagwcccctagaaatggctggaggcttttcttttcttttttttttttttttctgtttcttttttttgtgagacagagtcttgctctgtcctcaccttgggtgaggacaaga

SEQ ID NO: 687621 - DNA, 594 bp, Homo sapiens
ggatggagctggaggccattattctaagtgaactaacacaggaacagaaaatcaacgcatgttcttacttacaagtgggagctaaacattgtgtactcacagacataaagatgggaaaagtagaccctggggactcctacaagggggagagagggggagcaagggttgaaaaactaaccattgagtactatgtgggtgacaggctcaacagaagcccaaacctcagcaycatgcaatatatccatgtaacaaacctgtacatgtaccccttaaatctaaaatttttcttaaaaacccaccatcagattgacttcatacccactaggacagctagcatcaaggtcggataataacaagtgctggtgagcaagtggagaaattggaaccctcctagagtgttggtgagaatgtaagattgtgcagccgctgtggaaaacagtcagacggctcctgaaaaatggggttcttcataatttttaaggatataaaggggtcctgagactaaaaatttgagacccactccttaatgaaaatattttctcatatgtaacttgtatttgttgaattcttttcaattcaattgttgtattcaag

SEQ ID NO: 687622 - DNA, 3108 bp, Homo sapiens
tgcatacttcacttcattgcctcatctttccactttgtctctccagagggaaaattccctaaagacggttaattacctgaaagaattcaataggtggaaagacctgatgagagatgattttttgttaatggtggcaactttggaaatccgtagggrtcaacatctctctagatgaaagctaagaaacccagtctgctgatatttggttgaatttcttgggctacagctgatttgcttgacattggacacctcctgtaatgctctcagttctgggtaatggcatctgctaaataattagctaattgttttaccaatcgattttttaaaaacattccattgtaaaacctatatagcaggagaaaatgtagaaaacagagggaaaacgatttccccaaatcctgccccaacacaaaggttctgatagcgattgtgcacttccagtccctccccataagcagacggctttttagttgcaaacaccatgtacctcgtatcctgcttttttcccactgaacattatctgattcttttttatgagcaatgaaatttgatacgaggtgctgctcacatgatgtttggaaaagaccgttgttggaaggattggtgagtactttctaagccccatcgacatcagggaatcaggaaattaaactttttatttattggtctttgactttcccataaatggacacggttctacgttgtttgactgcattgtaaaagcagacgcctggcgaacaaaggcatgccgatgagtaattaggcattaagcgggaggcagggagcactttatggggccctttagtacccacccctctgcctctagggttcaagtctacccctcagcattggatacctttactttcttggattaaaacaaaaaaaaacttactttttttggagcagggaggttgtttctggctttgttttgtttttgcccagatgtttaaaaacaatgagctgacctttgtatattcatttaagggaggggataaaggatgtttgttacatacatgattttttaaaaatcctgttgtctgaatcttattaatcttgcatagtgcttgagtgattggggacttaaaatatagagagtgtgattccttcagcagagccagcagaagccaggtcccaactttgcaacatctctctttgatgccaagcagaggaggtgacctgacctcatttacctccacacatttgatgtcattccggagagggtaggttgttatgacaagttcttctgtgagcccactggggtttttagtcttgatccgagtactgatgggggagcagtttttgctttgggcacttttccttgtgaaatgcatctcttcatctgcttagtccagagcaaacttcttatcttctctccctgtgatcacagctattaaataaataacaaaagggaatctatcttctcagaagaaaaactgaagcattcttttctgccttggtaaaaggttatcttttctgcagacacatctttggttgcgtgctgcaactttgtagaagaaaatgatagttgctgcctgctagaatggatagcgcccattttgttaaaaatcagaaggttaaaaaatgcccagatctgcaaacaatggtttagcggttggctgtgctgaaaacatccaccagttcattaatgcaatacgtcatcattgagggtagatagagtgaagtactgtgactagctaaaggtgaaacgatggatagtgagcccctgtccccaaggcatgtagcttgggaggaagatgaagctgtacaaagatgcctaacatacaagtgggctgtgctcagggctgtgagggagctcagagaaggaggtaacatttcctcagctggggccaggatggaatgatgaggtcttcccttaagcaaggcagggaaagggattaaggccacaccagacgcattgccaacctaaaattccttggttttctgggaactagcagaatctaccaatagtgcatgagaagtgtaactaggggcttgattttgtgaagatttaacagcaaagagtcttgccaagaagcaggctccaccacattgctccatgcatttaggagaagggatccagaaagggatcctgcatgcctcacccattagccattggaatcttctaggtagccagactcttaccctgcatctagcactttgaaaaacgttgtgcattcattttctcatgcaatccttaattatacaaggaaggtcctatcattagccccaatataaggatatgaaaactaagacttagaagtaacttgcccaaggtcacaaagacagcaagtaactgagttgggcaccaaagctctgctttcaaccagtagaccaagaccagccttgacaactgtccatggcaaaggcatttcagaatgctctttgctagctcccctgcaacagtgctctgcatacaaggcagggcatctcgtgctggggtgcgaaggtacagcggatgggggaagttcaccgtctttctcttgtcccccagcactgccatcctcctggcctgagaacccagcaacatcgcagtgtccactcatgtccttggggctctgcctgctttctcacagtttctcctgttctccactcactccagccagtgcccagttaatggtataaatgagcttctgggatggtgggttccacctccagcccagactggaacccagccatccacggctctttcaacttctctgcttggtgattgggcagcctgaatttctaggacacttcattttttgttttttgagacaaggtcaagctctgtcacccagcctcgagtgcagtgacacaatcatggctcactgcagcctcaacttcctgggctcaagcaatcctcccacctcagcctcctgagtagctgggattacaggtgcacactaccgcacctggctaatttttaaaatgtattgtagagatgagatctcgccatgttgcccaggctggtctggaactcctggactcaagtgatccacctgtcccggcctcccaaagtgctgggattataggcgtgagtcaccacatgcggccttcaaatgtttacaactgtgtttgctgaattttttttttttttttttttgagacagagtcttgctctgtcgccca

SEQ ID NO: 687623 - DNA, 3108 bp, Homo sapiens
tgcatacttcacttcattgcctcatctttccactttgtctctccagagggaaaattccctaaagacggttaattacctgaaagaattcaataggtggaaagacctgatgagagatgattttttgttaatggtggcaactttggaaatccgtagggatcaacatctctctagatgaaagctaagaaacccagtctgctgatatttggttgaatttcttgggctacagctgatttgcttgacattggacacctcctgtaatgctctcagttctgggtaatggcatctgctaaataattagctaattgttttaccaatcgattttttaaaaacattccattgtaaaacctatatagcaggagaaaatgtagaaaacagagggaaaacgatttccccaaatcctgccccaacacaaaggttctgatagcgattgtgcacttccagtccctccccataagcagacggctttttagttgcaaacaccatgtacctcgtatcctgcttttttcccactgaacattatctgattcttttttatgagcaatgaaatttgatacgaggtgctgctcacatgatgtttggaaaagaccgttgttggaaggattggtgagtactttctaagccccatcgacatcagggaatcaggaaattaaactttttatttattggtctttgactttcccataaatggacacggttctacgttgtttgactgcattgtaaaagcagacgcctggcgaacaaaggcatgccgatgagtaattaggcattaagcgggaggcagggagcactttatggggccctttagtacccacccctctgcctctagggttcaagtctacccctcagcattggatacctttactttcttggattaaaacaaaaaaaaacttactttttttggagcagggaggttgtttctggctttgttttgtttttgcccagatgtttaaaaacaatgagctgacctttgtatattcatttaagggaggggataaaggatgtttgttacatacatgattttttaaaaatcctgttgtctgaatcttattaatcttgcatagtgcttgagtgattggggacttaaaatatagagagtgtgattccttcagcagagccagcagaagccaggtcccaactttgcaacatctctctttgatgccaagcagaggaggtgacctgacctcatttacctccacacatttgatgtcattccggagagggtaggttgttatgacaagttcttctgtgagcccactggggtttttagtcttgatccgagtactgatgggggagcagtttttgctttgggcacttttccttgtgaaatgcatctcttcatctgcttagtccagagcaaacttcttatcttctctccctgtgatcacagctattaaataaataacaaaagggaatctatcttctcagaagaaaaactgaagcattcttttctgccttggtaaaaggttatcttttctgcagacacatctttggttgcgtgctgcaactttgtagaagaaaatgatagttgctgcctgctagaatggatagcgcccattttgttaaaaatcagaaggttaaaaaatgcccagatctgcaaacaatggtttagcggttggctgtgctgaaaacatccaccagttcattaatgcaatacgtcatcattgagggtagatagagtgaagtactgtgactagctaaaggtgaaacgatggatagtgagcccctgtccccaaggcatgtagcttgggaggaaratgaagctgtacaaagatgcctaacatacaagtgggctgtgctcagggctgtgagggagctcagagaaggaggtaacatttcctcagctggggccaggatggaatgatgaggtcttcccttaagcaaggcagggaaagggattaaggccacaccagacgcattgccaacctaaaattccttggttttctgggaactagcagaatctaccaatagtgcatgagaagtgtaactaggggcttgattttgtgaagatttaacagcaaagagtcttgccaagaagcaggctccaccacattgctccatgcatttaggagaagggatccagaaagggatcctgcatgcctcacccattagccattggaatcttctaggtagccagactcttaccctgcatctagcactttgaaaaacgttgtgcattcattttctcatgcaatccttaattatacaaggaaggtcctatcattagccccaatataaggatatgaaaactaagacttagaagtaacttgcccaaggtcacaaagacagcaagtaactgagttgggcaccaaagctctgctttcaaccagtagaccaagaccagccttgacaactgtccatggcaaaggcatttcagaatgctctttgctagctcccctgcaacagtgctctgcatacaaggcagggcatctcgtgctggggtgcgaaggtacagcggatgggggaagttcaccgtctttctcttgtcccccagcactgccatcctcctggcctgagaacccagcaacatcgcagtgtccactcatgtccttggggctctgcctgctttctcacagtttctcctgttctccactcactccagccagtgcccagttaatggtataaatgagcttctgggatggtgggttccacctccagcccagactggaacccagccatccacggctctttcaacttctctgcttggtgattgggcagcctgaatttctaggacacttcattttttgttttttgagacaaggtcaagctctgtcacccagcctcgagtgcagtgacacaatcatggctcactgcagcctcaacttcctgggctcaagcaatcctcccacctcagcctcctgagtagctgggattacaggtgcacactaccgcacctggctaatttttaaaatgtattgtagagatgagatctcgccatgttgcccaggctggtctggaactcctggactcaagtgatccacctgtcccggcctcccaaagtgctgggattataggcgtgagtcaccacatgcggccttcaaatgtttacaactgtgtttgctgaattttttttttttttttttttgagacagagtcttgctctgtcgccca

SEQ ID NO: 687624 - DNA, 659 bp, Homo sapiens
ataatgaaaatggccctttatctttgtggtcttcctgtcccaaacccataatccatgaaattgtgagaaaaacatcagataaactccatttaagggaatttctataaaatacctgaccagtactcctcaaactggaatgtcatcaaaaaaaaaaaaaaaaaaaagaaagtctgaaaaactgttacagccaagaggagcctaaggagacaggacaactaagcataatgtgagatcggggattgattcctcaaatacaaaaggacacyaggtaaaaaccaaggaaatctgaatatactacagactttagttaataacaatgtattgatattgactcaattgtaacaaatgtactataagatgttaataatgaggaactaggtgtgggggtatacgagaatactgtactcttttaatttgtccataaatctggaactgttctaaaaaataaggccaactaagaaaaaattaggattctgcttctacccataagtataggacttccctaccttccatttaataattagaaaattgaacaaaatatgaccatggaaaaaggcagtacaggactctgatccacaagagaagaaaaacaaatgaagtaagctctacaatcacaatgcttttcttcctagaagcagtttctagtcaatgcacaggaa

SEQ ID NO: 687625 - DNA, 683 bp, Homo sapiens
aagataaattattatatgatgttgtagttctcttactctgatgcctcagtgttctctagcttagttaattgtcacagtgtatttgctttgtcccaatgactgttctagcccattttactgagaacattttacttatatttaaaggtttgatttatgccttcccaagcaaattgtctccggccatttccaccttccaacccaagctaaattaggcactctcacctctgtcttcacactggacttaatattcaatatacacatcacrttgaattgtaattgctatcacaaaacatgacttacttccttcaaaaaggtcatgaattcttcatttgtatattcccagagcataacaccatactctgcacattgtagattctcaataaatgtgcgtttcataaaaggatgatgttaactacaagcacacatgtcagtcacaccactgtgctctggttgatccagtagcatcataggagcatgtaatcagaaaaccatgcacaagatcaaatgtataaatgttgctctcaaattactttttgatgactgcgtaccacctgagtcttaaacataagctgaaatatcctgaacactttaggaactcaatacataattagaaaaataattaaaaagtgatttaaccaattgactatctgaaccttgatattgttgagaaaaatacattcaca

SEQ ID NO: 687626 - DNA, 1139 bp, Homo sapiens
tactaaatatataaatatagatcactaatcacaagtttacattaatagaaggaaaattttcactattacagtaatttttccatcaggtctctttacagcccatcctggcccagaagtaattattaatgtgacatcaatcaccataaattaatttgcctattcttgaacttcatttaaatggaataacattattatgtcatcttttgtgactagctcttttattcatcctatgtctatgagatacattcttatagttttatatgacgataaatattttctcctgatatgtagtatgctattaactagagtcagtttacccattctgttgttgattggaatttatttgtgctattattaacagtaattattaataattactattaattactaatagctgtgatattatgagtgtaattgcaagtcatcttattgttcatgttttcagaagaaatattttccttgaatatatatctataaatggaatggctaagttataggcctggcatattatactagctttagtagatattgctacacaatttttcatgtgcttgcatgattgtacttacgtcagtaatttatgagagatctagtttaagattatatgttaattaacatttagttaatcagctccatatgtyttgatatcttttgatgtaaatctaccaattttattgtttttcttcagtttaatttttgctctcctaggttgctatatttttagataaattttggaatcatctcataatttttacaaaatacatgtcagtgctttgatttgagtggagtttaatatatagattaattttggaaaatttgcattgttataatattgtttcttagaatccatgaacctaatatatctgtccttttatttatatctgtttaaatttcaggaaaaatattttaaatataatggcttttagtctagagatcacacacattactgaatttggagtatttcctgatttctttttttagttcttttacttaagaattatatagaaatgtgttataattctgaacatttggtgattttcccaatatgtttttttaaaaaattagttctaaattaatctgctgtcattagaaaaaatactctattaaatattttatcttttcatacttatatttaagta

SEQ ID NO: 687627 - DNA, 1139 bp, Homo sapiens
tactaaatatataaatatagatcactaatcacaagtttacattaatagaaggaaaattttcactattacagtaatttttccatcaggtctctttacagcccatcctggcccagaagtaattattaatgtgacatcaatcaccataaattaatttgcctattcttgaacttcatttaaatggaataacattattatgtcatcttttgtgactagctcttttattcatcctatgtctatgagatacattcttatagttttatatgacgataaatattttctcctgatatgtagtatgctattaactagagtcagtttacccattctgttgttgattggaatttatttgtgctattattaacagtaattattaataattactattaattactaatagctgtgatattatgagtgtaattgcaagtcatcttattgttcatgttttcagaagaaatattttccttgaatatatatctataaatggaatggctaagttataggcctggcatattatactagctttagtagatattgctacacaatttttcatgtgcttgcatgattgtacttacgtcagtaatttatgagagatctagtttaagattatatgttaattaacatttagttaatcagctccatatgtcttgatatcttttgatgtaaatctaccaattttattgtttttcttcagtttaatttttgctctcctaggttgctatatttttagataaattttggaatcatctcataatttttacaaaatacatgtcagtgctttgatttgagtggagtttaatatatagattaattttggaaaatttgcattgttataatattgtttcttagaatccatgaacctaatatatctgtccttttatttatatctgtttaaatttcaggaaaaatattttaaatataatggcttttagtctagagrtcacacacattactgaatttggagtatttcctgatttctttttttagttcttttacttaagaattatatagaaatgtgttataattctgaacatttggtgattttcccaatatgtttttttaaaaaattagttctaaattaatctgctgtcattagaaaaaatactctattaaatattttatcttttcatacttatatttaagta

SEQ ID NO: 687628 - DNA, 447 bp, Homo sapiens
ccctattgtcaactgtgcatgcatgcaagggatccaggtttcacgctccttacaggaatctcagagtaaataattaaaactttcagtgtatgattccacttacacgaggtatgtagattagtgaaactcatggaaaccaaaggtagaatggtggttgccaacagctggggaaacagggaaatgggtatagagttgcrgttttgcaagatgaaaaagttctgcagatttgttgcacaacagtgtgaatatgcttaatactactgaactatacacttaaaagaattgagattggaaattttatattatgtgtattaggaaaatactacttattaacttactcttttttcacagtgatctgcagccctggatcatataacccccgtgatggaattcattgccttcaatgcaatagcagcctggtgtatggagcaaaaacgtgcttataag

SEQ ID NO: 687629 - DNA, 2704 bp, Homo sapiens
agtattataatgtaaagaaccatttttaggccaaatttcttggtcttccaatttgttttggacccaaatcatattgcagtaggaaatgaatttctttctcttgaagctgtctaacttgaatttgctccatttgcctaaaaggcaccctagtggtgagtccttcaggatgctcaccattgtccccgagtctaatgaggatctctacagaagtttttctaagtctagtgagagcccagttattttcccttttaaattctcacctttttttctcaagaaaggtcagtggggaagttgtcaccagttcctgcaaagagggtgtaagtacagttagcagggtgtgatgaaagtgaattatgagatatgagtgggcagtggagtgatgactgtgtccactggcaaatggaatacaagaaaagaggtgttgtaataagcaaagtatagaaggagaggtgaaaatagggtggcagcaaaaaagaatgagttcatctcctttgcagggacatgaatgaaactggaaaccatcattctcagcaaactaacacaggaatggacaaccaaacactgcatgttctcactcataagtgggagttgaacaatgagaacacatagacacagggaggggaacatcatacaccggggcctgttgggggatggggggaaagggtagggagagcattaggacaaatacctaatgcatgtggggctttaaacctagatggtgggttgatgcatgcagcaaaccaccatggcacatgtatatctatgtaacaaacctgcacgttctgcacatgtatcccagaacttaaagaaaaaataaataaatagataaataaagatagttgagaaaatatgggatagaaaccagtaatttgtgccaataaaattcttggtttttttaacacccccccccaccaaaaatagggtgacaggattctcatagtctgaatttcacaaaaagggacaaaagcattttggttgaggaaaaagagggactagaggagatcgctgaaaatggtggtatgacaaagaccaagattgcccctagggtgggactctaacccacaatcctagagggaatgtaaaaaaatccacagtgcagtgggggacctctcaaaataaaagaaacaaggcctgaatagaaacaattgtccgaataggagggtgaacaaaggggacactctcccatccatgaaggccaaatggtgccaattggtcttaatttggggttgaggtaaatgtctccctcagttcccttcagcttgttagtcccttcatgttattgtccctttgtagtcaccaggaaagatgacgcagatgaaccccaaaactgtggctcagcctgtgaagtttcttggctttgtgccagaaaggattcagagcaaactgaaagtaaatttattagagcaacaaagtacaagaaaatgactgctccatagacagagcaaggcttttccataggcagagtagtgctggttgcttgctggctagctatatttatagctactacttaactatggtragtagtgggtggttattcacgaattttctggaaaagaggtggagagtttccagaacctagggtttctcctattttaaaagggtgtataaggtaacttctgggcattgccatggcatttgtaaactgtcagggaactgttgggagtgtcttttagcatgccaatgcattatagttagagtataatgagcaatgaggatgactagaagtcactttcattgccatcttggttttagctgatttcagccagtttctttactgcatcctgctttgaccagcggggttgtgactggtgctcagaaaacaagtcctgctgatccacctcaattacagaatgtatacatatttcaaaacatgttgtacatgataaatatatgcaattttatctgtcagataaaatgttaaaaaaagaaattcactgcttccaatacatataaaacatacaaagtgagtgcttaggtcaggacttcattcacagaaagtgcttaatagaaattagttataatcgttatcacaattgtcatcattattcttatttttatattatcctatttctcattccatttttcttgggaattaaactacattttttaaaaaattatactttaagttctagggtacatgtacagaatgtgcaggtttgttacgtaggtatacatgtgccatggtggtttgctgcactcatcaactcgtcatctatccctcccctagcccccatcccccacacagaccccagtgtgtgatgttcctctccctgtgtccacatgttctcattgttcaactcccacttatgagtgagaacatgtggtgtttgattttctgttcctgtgttagtttgctgagaatgatggtttccagcttcatccatgtgcttgcaaaggacatgaactcatcctttttcatggctgcatagtattccatggtgtatatgtgccacattatctttatccagtctatcattgatgggcatttgggttggttccaagtctttgctgttgggaatagtgctgcaataaacatacgtgtgcatgtgtctttatagtaggatgatttataatcctttggttatatatccagtaatgggattgctgggtcagatggtatacaactacatttttaaaggataaattttatttttaaaaacacagtgttgtttgcatgtatttacaaaataggcactcataggaa

SEQ ID NO: 687630 - DNA, 631 bp, Homo sapiens
ctggaagcaatcacccatgaatactaagagacaactgtactctgcagttcatgcacttggactacattagaaaaaatttagaaaaattgtcttagaaagcaagtatttatatttaaagaatttcccacaattttatgctccaggtggaacaaataaaaagcaaattgatacataaaactgggaattttcttctaaattctaaatgagattaaatacaaacacctatgagctgggaagaatgtgctgggacttcgaaataaactcagaagtcaaccttgtaggttaagtacatgaagttgctaatacctaaccatgttgacttataaaaatggccatttcactggtatcaaactaatacaaatgaagagaaggaacacatgtctactttctattccattggaaatctcattcaagcactcttcaaaacccaattttgctaaaaggagtgaatcacagggaagcactctgggaacatcacaaaagcaaatggaagaatgaatgatagcatcatttcccctcgagttccttccaccttcatatactggactgaaagtttccactgcatrccttcaagtgggatatggaattccccactgtgccccacctctaaatccttccttgcaaaagctca

SEQ ID NO: 687631 - DNA, 631 bp, Homo sapiens
ctggaagcaatcacccatgaatactaagagacaactgtactctgcagttcatgcacttggactacattagaaaaaatttagaaaaattgtcttagaaagcaagtatttatatttaaagaatttcccacaattttatgctccaggtggaacaaataaaaagcaaattgatacataaaactgggaattttcttctaaattctaaatgagattaaatacaaacacctatgagctgggaagaatgtgctgggacttcgaaataaactcagaagtcaaccttgtaggttaagtacatgaagttgctaatacctaaccatgttgacttataaaaatggccatttcactggtatcaaactaatacaaatgaagagaaggaacacatgtctactttctattccattggaaatctcattcaagcactcttcaaaacccaattttgctaaaaggagtgaatcacagggaagcactctgggaacatcacaaaagcaaatggaagaatgaatgatagcatcatttcccctcgagttccttccaccttcatatactggactgaaagtttccactgcatgccttcaagtgggatatggaattccccaytgtgccccacctctaaatccttccttgcaaaagctca

SEQ ID NO: 687632 - DNA, 604 bp, Homo sapiens
acaattgattactaagtgctgggtgaggtgtgcctaagctttaaagctgtggtgtgttctataaaaagtacattaaaaaaaccaaagtaatgaacactaagctgtataactatcaatttttgaatctagcagtttctaacttttttttttctttttgagacrgagtcttgctctgtcacccaggctggagtgcagtggcacgatctcggctcactgcaagctctgcctcccgggttcatgccattctcctgcctcagcctccccagcagctaggactacaggcgcctgccaccaccctgtctattttttttgtatttttagtagagacggggtttcaccatgttggccaggatggtcttgctctcctgacctcatcatctgcccacctcagcctctcaaagtgctgggattacaggcgtgagccaccgcgcccagcctagcagtttcaacttattagggctaacatactttaagatgctttaacagtgaccctccctgtagagagggcttctctgtgctctggaaggtcccgaaagattcgctgcttaagactctccatccagatgttgttgactccctctcaaatttcaaatttgagcaactc

SEQ ID NO: 687633 - DNA, 604 bp, Homo sapiens
acaattgattactaagtgctgggtgaggtgtgcctaagctttaaagctgtggtgtgttctataaaaagtacattaaaaaaaccaaagtaatgaacactaagctgtataactatcaatttttgaatctagcagtttctaacttttttttttctttttgagacagagtcttgctctgtcacccaggctggagtgcagtggcacgatctcggctcactgcaagctctgcctccygggttcatgccattctcctgcctcagcctccccagcagctaggactacaggcgcctgccaccaccctgtctattttttttgtatttttagtagagacggggtttcaccatgttggccaggatggtcttgctctcctgacctcatcatctgcccacctcagcctctcaaagtgctgggattacaggcgtgagccaccgcgcccagcctagcagtttcaacttattagggctaacatactttaagatgctttaacagtgaccctccctgtagagagggcttctctgtgctctggaaggtcccgaaagattcgctgcttaagactctccatccagatgttgttgactccctctcaaatttcaaatttgagcaactc

SEQ ID NO: 687634 - DNA, 640 bp, Homo sapiens
taaaactgaagagtgggggatgtcgaaacataagttattggtggctaaaagtggtgctttactagagaaactgaacaattagaaagaaatgtacaatatattctgaaaaatctatctctagaatgaagtcatgacagttcaccctactctactagttttgtccaagctaattttcatgtatgattttgtaatctgattgaacaatacttggaaaaaaaaaagttagatatataaatgaatttgttgtggataaaacataattagcctatccctataaaatctactctttcctkacttccaggagtggtcctttatttgagaggcaaaacatatacatttcacattaccatttttgagacttgatgaagcccagtcctaaactgtggctgaggctgaggctgaatggttgggatttactgtgagaatggacattcccccgggtcctcacctgaggtcattaaattgatttagtctaggtccactggctgtattttaatgcagcttagctgtaaaaatacaaggccccattgtataatacaggcagtcattgttatttttctaggcctgtcaatgtaaaaaatgtgtctgtttgccttcccctatggactgaaaaacaaaaaaaaagctacgtttcaaagtc

SEQ ID NO: 687635 - DNA, 640 bp, Homo sapiens
taaaactgaagagtgggggatgtcgaaacataagttattggtggctaaaagtggtgctttactagagaaactgaacaattagaaagaaatgtacaatatattctgaaaaatctatctctagaatgaagtcatgacagttcaccctactctactagttttgtccaagctaattttcatgtatgattttgtaatctgattgaacaatacttggaaaaaaaaaagttagatatataaatgaatttgttgtggataaaacataattagcctatccctataaaatctactctttccttacttccaggagtggtcctttatttgagaggcaaaacatatacatttcacattaccatttttgagacttgatgaagcccagtcctaaactgtggctgaggctraggctgaatggttgggatttactgtgagaatggacattcccccgggtcctcacctgaggtcattaaattgatttagtctaggtccactggctgtattttaatgcagcttagctgtaaaaatacaaggccccattgtataatacaggcagtcattgttatttttctaggcctgtcaatgtaaaaaatgtgtctgtttgccttcccctatggactgaaaaacaaaaaaaaagctacgtttcaaagtc

SEQ ID NO: 687636 - DNA, 590 bp, Homo sapiens
ctggccagcgccatcaggcaagagagagaaataaatggtattcaaataggaagagagaaaatcaaattgtttctgttagcagatgacatgattgtatatttagaaaaccccattgtctcagcccctaaaccctataagctgataagcaacttcagcaaagtctcagtatgtcttcttttgagaaatgtctgttcatgagttaacttctctctgtcaggtataaaggataaaaattattaatatttaaatatgctttttctayaatatatagttatatttgttccccaaaattgtacataaatctttcttatcaagccctttgatccaatttatttttattatttatatatgtttgcgagtgtaaatattttcagaatgacattaaatttcattcttaagtattatgtaagtaaatgttctacttactaattacattttaaatcgctcatattaaattttaggattatgaagtcatttgtcaatatttgtgtcagaaagttttggaatcaatcacataaagcaagaagcttagatataaaaccatctgaaatatgctaaaataattacatacaatcatataccacataatg

SEQ ID NO: 687637 - DNA, 644 bp, Homo sapiens
tatcctcaataaaaatctgcttactagatattatttattgagcagtaattatttccacactaagcacttcatttatattaattcttatataargacaaatattctgaaccccattttacaagttagaaaaatgatgctcagagaaattaagcaacttgctgaggaccacatagataataaaatgatgagctagaattaaagccggggcttcaaaccactgaattctactacatccaagtggcttgtgatgttccgggagaagaggctaatatccttgccagctggcatggccaaattagacaagtcctgacagtcaagtcagatattgtgaattatgagactgcatttttgagggctgactattgggaaaacttcagaattatcaatggccccacaaatatcaattgtttctgttcgttttcttgacttaatctcaaaattattaaacattcaactaaaattccagttccaagtgatgctatttagttagtgagaatagcttctattcattagtggaagaaagtcattaatatgtaacattattatctctaactttaccctagtaaaggccagttggtatttattaacatttggaatacagatattttgctaagcttacttaacaagactgcatcagttaatgt

SEQ ID NO: 687638 - DNA, 2107 bp, Homo sapiens
ttaatattagaaaatttgaaaattactgaaaagtaaaaagaaattaaattaacttgtatgttcatcatctagagataagcacttaatttcctttacaatttttttctgtgcatgttaaaatcgtggtgaaatcatacacttcaaaattttgcattcttgttttgatatttaacattacatcttaaaatgtttcctgtcatgaaacgctgcttttaattttgtgtataacggtccatcatatgactacattgtaattcatttatccacatttaccttgctgattctcttggttgtttccagtttatttgttagtataaattacacaatgtgatcactcttgatatcctttctgtgcatctcttattatttcctaggaatacttttttaggaaaatgctattctaaaaagcataaaataccttacagttcttgatatagtctctaataatattcttgaaaaagcaaaataggcagaatgtgtatttagattcaaatttaagacctactacttactgaatgtgtgatttaagataattaacagctgctctaagctaagcacataaaacaatgttctagaaactcaacaaatatttgctctctttttgtctctgcccaattgttacttcaactagagatttacctcaaagcatttttgacagccccaaatacaacttatcccattccttactagctgctrtaatgggatattcggtgtggacacttcaggctgaatctcatgagggggcctgcatcttgttggaactactgagtgttcggagcactttctcagcaagatggagtcagtcctgtggttttgtcatttcaccctgtggcaactggatcttgagaaataactcaccacagtccaaaaaatttacttagaagccaacatgtcaatttattcatttatatgagaaacataattatactaaggaaaccgaaaggaacatttttgtcagctagtcattatagtctctttgcaacagaaattctatctgagagactaaatttacatcagcagctcactttctgggacaagagtggatttgccactttggtttatggttatgtgtttctctctcccttgctagcctgcagacactttaaaacataggacatctatgtcaatatctgcattgactagcacagtgcctaacatatagatagtcagtgctaacttttttttaagtatgttgctgtcttaatttgttcatgcttctataacaaaatacccaagactgggtcatttaaaaggaacagaaatgtattgtctcacagttctggaggcaaggaatttcaagataaatgtgctggcagcttaggtgtctggtgagggcatctctctgttttcaagatggccccccttagtgtgctcccacatggcagaagggatgaacagctcccttacacctttctttaaaaacattaatcccattcaggatggctctgccctcatgatttaattaccccctaaagtcctcacctcctaatactatcacattggcagttaagaattttgaagagacacatacattcaaagcatggcagttgcctgaaaggcagaaagacaggacaaaagaaataaggaaaattcaaggggtagaataacagatttcaactactcagaagtggagtacaatacttaattcaaaccaaaggccatttagaatccctagctactcaattttctccatcattcactcattttatttttcaatttcaccctggggaaaacagttattcatgttagggtaaatcaatgtgcacacatatttgctattgctggtttcagaagtttgtactgaaaaaaagaacaagaaacaacatacacccatctgaatgaaaagttgttggatttgaaatttcctggatgagtactgggaagattagatttaaaaagaatccactcactctcctttaagcaatgttgagagattgtacaatagatggaaatatgcatttatgattcatagtctttgaaatgtagatataaattatcagggcaggctgagagtcctgagttaagtggaatgaaattctcaaaaacaaagtttcaaagaaacaaatgagaattgcattcttcaagggtttttttttttttccacatt

SEQ ID NO: 687639 - DNA, 623 bp, Homo sapiens
aattattttcctttttcatattataatatttttattgtagaatatacagataagcaaaatgaagaaaatgaaaaccacttgtaatctaccatctaaatataactcatggtaacaccttcagggtctagtctttaatgttgattctcatacaatcacacacactctaaacaacaaaataaagtaatgctgggtatacttcttttctaacttttttttttcacttgatatacaggcatcttctatgcaacttcaactatctcttagtgaaaatgtcaagttctgcacaaatttatttatttatttatttattttttgagacagagtcttgctctgtcgcccaggctggagtgcaatggcacgatcttggctcactgcaacctctgcctcccaggttcaagcaattctcctccctcagcctcctgagtagctgagattacaggcctgtgccaacatgcctggctaatttttgtatttttggtagagatggggtttcaccatgttggccaggctggttgcgaactcctgacctcaggtgatccacctgcctcggcctcccaaagtgctgggattacaggcatgagccacmgtgcccggccctgcacaaatgttaattggcaatctag

SEQ ID NO: 687640 - DNA, 623 bp, Homo sapiens
aattattttcctttttcatattataatatttttattgtagaatatacagataagcaaaatgaagaaaatgaaaaccacttgtaatctaccatctaaatataactcatggtaacaccttcagggtctagtctttaatgttgattctcatacaatcacacacactctaaacaacaaaataaagtaatgctgggtatacttcttttctaacttttttttttcacttgatatacaggcatcttctatgcaacttcaactatctcttagtgaaaatgtcaagttctgcacaaatttatttatttatttatttattttttgagacagagtcttgctctgtcgcccaggctggagtgcaatggcacgatcttggctcactgcaacctctgcctcccaggttcaagcaattctcctccctcagcctcctgagtagctgagattacaggcctgtgccaacatgcctggctaatttttgtatttttggtagagatggggtttcaccatgttggccaggctggttgcgaactcctgacctcaggtgatccacctgcctcggcctcccaaagtgctgggattacaggcatgagccaccrtgcccggccctgcacaaatgttaattggcaatctag

SEQ ID NO: 687641 - DNA, 1131 bp, Homo sapiens
tgagccaaagaaacatttggctgaaagtgagaaaaacccagaatgagtagaacaggagagttatttcttcattaattacttcccagctgtagcagaggggactatacatatctgtcttaagtctttctgaaatgtcagggacagagtggacctaatatgacacacgagtgtcactgagtggggtaggaggtgaactgtggcaaatgccacctccccttggccaccttagacgtcagctgcagcctggtgagcatttccatgcacattggcagtgtcctacatcaagtcccatgccagcatcaccttacttttctgactctagaatttttyttaaacaacagaatctccgacagcttgtttaccgggcaggccataagtgcaggggagttaacttccctaaggacaaccctcagtctggatccatacatatatattgagaacaaactgtctgcaaccacacagcttaataggagcaagaactaagactacctatattattatgactttattattctaggactcagccttaaccagctttgtggtttgaagcatcaagttcctagagtggactagacaagattgaaagatgaatggcaaagatcaccaaggtcacaattacttagaagtaaaaacttctagattgaagagtgtacctttaaacccaggattaagtctctaactagtgatgaaatgtcaataaatgttcattggagcaaatagcgcaaagatttagaagaattggctctaataatgttttatacacaaacaaaatatatgaaaatttctacattttgtttatgtggaaatttgcctcacaagacctgtgtgtgtggtggtggcaggacactccaccaggcacggaaggccgaattattgccacaaacaagctgtgagatgccaggtggccatttcatttctttgggctttcatttatgcatttgtaaaataaaagaattgaaccaaatcatctcaagtactttgtacctaaaattattagattttctaatgtatatccttaagttgtgttttcacaatgactcattctgttttgatgaggaagccagcctccaattacatctccaaaaaataaagacaagttgcaacctgtttaatcacatgcaatcagtatca

SEQ ID NO: 687642 - DNA, 608 bp, Homo sapiens
gttctcattgaattttaattaattttattatatattattttctggttacagtgaaattaagctaaaatcaatttttaaaattataatgtcagtaacaaacctctcaataacccatggtcaaagaagaaatatagacatgaactagaaaatatttatcaactaaatgattctgaaaatatgacatactagaacatgtgggatgaggctgagactgtgctcagagagaattacagacttatatgctgttttagaaaacatgagaagctaaaaatcaatgatctatgtcttcattcatgaagttaggaaaagagtggcaaattaaacccacaaagtgtagaagaaaaaaaaaaggatattattccagagtaatgaagcaaaaacaaacatgccatagagaaaatacacaaagccataatttgggtgtttgaatagatgactaatctgacttaaaatgaaagaggtaagggaaaaattatcactattctgattaaaaaaacaaaaagacatagcttaaagttcttaatcttatgctartatatttgataatgtgtatcaaatgtacacttttttttgaaaactcatttttccataactgacacaagaaaata

SEQ ID NO: 687643 - DNA, 1822 bp, Homo sapiens
ctcggggccactacctgtctgtctccgcgctttggtggcagtggtcccccgggcccagctgtctttcttcctatctctttgtcttctgtctttatctcttcgatctctcgtctccgcacacacgcgaagagaaaacccacagacccggtaggggtggaccctacattatctcagctacaacataatcaggatattcacgtggactactgagtctttcggtgcccccttgctgttttagttttgtcctgcggccgagtgtttccctcgcttcacgccaacacaatctccgccgccctgtcttgtcatccccattctacagcccagcacggtgtagtatggcagccgctagccacaggtatctagggagccctggaaatgtggtcagttctaatggagctgtgctgtaagtgtgaaatacacgtgggattttgacggcagtgggagcaaaattctcccaatttttttttttttttttttttttcagacggaggttccgctcttgttacccagcctggagtccaatggcgcgatctaggctctctgcaacctccgcctcccgggttcaagcgattcccctgcctcagcctcccgagcagctgggactacaggcatgtgccaccacgcccggctaactttgtatttttagtacagatggggtttctccacgttgctcaggctggtctccaactcccgacctccggtgatctgcccagctgccgcctcccaaagtgttgcttgcgattacaggcttgagcaccgctcaccctggctgttttttttttttttccagacaaactctcgctctgtcgcccaggctggagtgcagtggcgcgatctcggctcactgcagcctctacctcccgggttccagcgattctcctgcctcagcctcctgggtagctgggattacaggcgcaggccaccacgcccggctaatttttgtatttttagggggtttcgccatgtcggccaggctggtctcgagctcctgacctcaggcgatccgcccgcctcggcctcccaaagcgctgggattacaggcgtaagccaccgcgccgggctctttcattctgtctttattttctgagatagagtctcgctcggacgctcaggttggactgcaacggcgtgatctcggctcgctgaaacttccgcctcccgggttcaagcgattctcctgtctcagcctcccgagtagctgggattattgacgggcagcaccacgcccggctactttttgtggtttttgtatsttctgtcttctgctctttagtaccgcatagagccgcagaagactagcgagtcgaacaaacggcccctcttgcagcagttgttgatcacggggctgccccccggtactcatcctgtgtctctcgtccaaatccccgctcctcctcagctatcacctctgccgatgctggtggtttccctgggtaccgggaaccaaactctcattccccaggggcctaagccccccgtggccaggcccttctcaagtcagggttcctgcacattcacagttacgggtggccctgggagtaacacctggcacccaaacaggtcaccagagtccacacatagtccacctgccctccctgcgtaagatcagctcttcctcctcccgacgatagatcagggtcaatgatccctgccaagatggcgactgctccagcctgctggtccaacctgtccagccacagctgttgctcgaaggcttgaagttcaatgggaccctctcccgctttctacaaactggttcctttatttttatgtttatttatttgggacggggtctggctctgtcacccaggctggagtgcag

SEQ ID NO: 687644 - DNA, 631 bp, Homo sapiens
tagcatgacacgtgagttcttttgtggcctgttttctgttattccctgctttgatctttccaatacaaaaacaatacgyagagtatcctctgcctccaagcttgcaaccaaaaatgtagttcacagcttccttttgctgtttcctgtgagggaagaagcattcctacccacccttcaatgcagcacaggaattattgactcaacatctgtctctccttccagaggagctctcatggaaactatcccatctttgactgtaagcaccttgaagttaggaactaggtcttatttggttttgtgtcttcacagcctttcatagttcctcccatgtagaaggcaagcaaaaatggtggttgtaggaaaagaaaaagaacagacaataaacgttgtataaagaatttaatactagagaaaatagactctatgtacggcatttaaattggaagcatttaattagaatcaaattgcaagtgctaacataaactgatcctaatttaaaacctgaacagccataaaatagtttgttaccatttaaatttagctatgttattacagtgatgtatatttataatcttttttcatatttacacaaaaatgagtataacaagaaaatttaaattttagaggagat

SEQ ID NO: 687645 - DNA, 608 bp, Homo sapiens
tgagattaaaggagaatcctaaaggatatacagaaccctgtgtatagattttttttttttttttttttttttttttttttttttttgagacggagtcttgctctgtcacctaggctggagtgcagtggtrcaatctcggttcactgcaagctccgcctcccaggttcacgccattctcctgcctcagcctcccgagtagctgggactataggcgcccgccaccatgcccggctaatgttttgtatttttagtagagacggggtttcacggtgttagccaggatagtctcgatctcctgacctcgtgatccgcccgcctccgcctcccaaagtgctgggattacaggcgtgagccactgcgcccagcctgtgtattgattcctaaggcaagataaactaaagagaatatctgaagacagcctctgtgcaaaaactatgcaaggaagagagaacacgagctttgagaccatctgaggcaaacaagatgaaaagatgtgtggttaccctatgtggaatactcactaaaatagctagggttttattaagattagaggagcagtatcgatacccaggaattctggttcattttatttagggtaaggccagata

SEQ ID NO: 687646 - DNA, 608 bp, Homo sapiens
tgagattaaaggagaatcctaaaggatatacagaaccctgtgtatagattttttttttttttttttttttttttttttttttttttgagacggagtcttgctctgtcacctaggctggagtgcagtggtgcaatctcggytcactgcaagctccgcctcccaggttcacgccattctcctgcctcagcctcccgagtagctgggactataggcgcccgccaccatgcccggctaatgttttgtatttttagtagagacggggtttcacggtgttagccaggatagtctcgatctcctgacctcgtgatccgcccgcctccgcctcccaaagtgctgggattacaggcgtgagccactgcgcccagcctgtgtattgattcctaaggcaagataaactaaagagaatatctgaagacagcctctgtgcaaaaactatgcaaggaagagagaacacgagctttgagaccatctgaggcaaacaagatgaaaagatgtgtggttaccctatgtggaatactcactaaaatagctagggttttattaagattagaggagcagtatcgatacccaggaattctggttcattttatttagggtaaggccagata

SEQ ID NO: 687647 - DNA, 624 bp, Homo sapiens
gagatgcaggtcagccacttggggccaatgggagccttctgtttcgcttcatggttatctttgtggcagaaggaaggaaccttaaggaagatgtatcaacctgtcctgaagaataagcggacaaagagtaaaaggtttggtacttccagtttcagaattaaaagtggggtctctagttatcattctggacaggaggcaggtgcttgggactatggatcttyatctttttttcccatgaaaattaaatttcacaaatctgcttttctttattgattagagttaaggcctgaaaaaggagaggccgagaagtgtaaaggaaggaaacagtagggaagattatgtcctatacttgactcagagatgaacaaggtgtccaagaaatagactatgtggctgcagatttagccattgaaaccagagatgaagagcaaaagaaagttccaggtgtctggacttgaaaatgagtctaaactagagcatgacataagaaagactcttgaaggttcttcacaccaaaacttctcttagacccacgggttcagctcaactgctatgaatgttaaaacttccaggcatgtcagtgggaaggaagatgtatataaagaaagcatgcattgacacata

SEQ ID NO: 687648 - DNA, 624 bp, Homo sapiens
gagatgcaggtcagccacttggggccaatgggagccttctgtttcgcttcatggttatctttgtggcagaaggaaggaaccttaaggaagatgtatcaacctgtcctgaagaataagcggacaaagagtaaaaggtttggtacttccagtttcagaattaaaagtggggtctctagttatcattctggacaggaggcaggtgcttgggactatggatctttatctttttttcccatgaaaattaaatttcacaaatctgcttttctttattgattagagttaaggcctgaaaaaggagaggccgagargtgtaaaggaaggaaacagtagggaagattatgtcctatacttgactcagagatgaacaaggtgtccaagaaatagactatgtggctgcagatttagccattgaaaccagagatgaagagcaaaagaaagttccaggtgtctggacttgaaaatgagtctaaactagagcatgacataagaaagactcttgaaggttcttcacaccaaaacttctcttagacccacgggttcagctcaactgctatgaatgttaaaacttccaggcatgtcagtgggaaggaagatgtatataaagaaagcatgcattgacacata

SEQ ID NO: 687649 - DNA, 2608 bp, Homo sapiens
tggagcaatctgcattccaaacaatcatcacctgtaacatgtttgtaaaaatgttttgccttatgaagacctatgatacacaacatgttgatataagtatactttctgagtctaaaaaaattcaatggaaaggaaaaacacatatgtctcatttctctgtgacaaaataactatgccttgatttatattctattaaatatagtaaattaatagcagctatttgcaatgaccttttataatccatagaagcacagagtttcagtggaatttgaaatcacagagttggaatatttccttggctttgactccattcaattctgtgagacctcccaacactctaatattacacacacatctgaattctcctatattgttatacagatgattacatgtagtgttagccattcccctatcccttccatgctccctgatgtctactgttccaaagttgaagatggcaatgatggtgtgtaggcactgcaaataaattacggctattaaccctgcaatggcagcaaattgacatagcctgttcagggcactaatattggatattctagctcttagctggtatggcaattgtcatataattctgtttttcaaaattgctttaacacatctccaccaacacctcaatacttgagccttgggcttctaatgcattgcagataccttaataaaattgtttgattctgcaacccattctcctaattcaatggaaaggaaaaaacatgagtctatgaggaagtagctaaggtcaatctgagtgattaacactcaacttcccttcaaatcacccacctgtggccataccttggatggagcttgaacacctcaactggcttttccttggtgaaggcctctttcaattgaggctcctttttttccttttgctcattgtcacctggcagttttgttctgcagactttccaggcatgactcttcctctcaccaccatcaccaacatatcaaggaaacaccactggtaccacagataaaatatcaccatactactgaagctgyagaataaaatcgttataaaattacattggcatcaaagatttcttgtcattggtcactattgaacattggaaaagaataggtaacagtggggtgagtaccctattcgaaccacaatgggacatcccattttcttctggattagccaattacaggaaatgtttctatgccacaaacacccttctagatactgcattgtctgagaccccacatttcatttaggaatatcttcttgggatgtctaaaggagggttatccagagtaagagaattagctggatgctgagagaaatgtcagggcacagaagcacatcattcctgcttgatggtctttgggtgaagtgcacctctccccagagagccacatgaatggcatctagtatagcattaggagtgtgagcacagaggatgttcagtgccaactcattgcacaggggtgcacctgggtctctgggtactagagtaggctgagcttgctcagatagagctcaacaagatctttctactgattctactgattctcacacttttcaatcagccccatctgtctaatacctgactaatactaatatgactaataatttatctgccatacctccagcacataaaaactttacctatttcatgaccatgtgagcaaacgaacagcattaagtatcctaccatatttttttgcgcttttgcctcacctttaataattttcaaactaagattttcacctctttgtcttccggtttggctccaataatctttccctaaagtgatgaatggcacatgtctaaggctgcaggagcacatggaagggtccttgaagtaaaagtaaatacattatatgaagcacagttggcaataagtgacacaattgaattcctcaaattaatccaacacataagcatcactcactttgaacagaagaggaatctccttggcgttaagtaatgattctcaagagggatgtcctcttcacagagtcacagaggtgaatacaacataatcactttgagaaccttttcaaaccatacctccccagtaacatgcactccttaagggaaatggagttttcctctcatctctcatcaaaatcactagtagaatgcaaattggtcgtataattcagggtttttttttcttctaatgatataaaaatacaattataagaatcacattaatattaaaagaaatgacaataataaaacaatgacaataatgaagtaaaatggcatttgctaatgatttccaaagagtggcttaagttcaaataaatgagtaatttactcagcattctgcataaacatctctattaacttataagctgtcttttaagaaaatcgtataaatttaaggggtacaagggcagttttgtgacatggatgtattgagcagtggtgaagtctgggccttagtgtacatggtacccactaagtaatttttcatcattctcccctctcttaccattggatgtttatcacagtactcttcgtattagcaaatgtatgattttttaaaattttctcttgtgatagacacatcataaagatctagcaaacacacacacacacacacacacacacacacacacacactattgg

SEQ ID NO: 687650 - DNA, 1195 bp, Homo sapiens
ttttttttgaggcagagtctcgctctgtcgcccaggctggagtgcagtggtgygatctccactcactgcaagctctgcctcccaggttcacgccattctcctgcctaagcctcccgagtagctgggactacaggcgcctgccaccacgcccggctaattttctgtatttttagtagtgacggggtttcgccgtgtaagccaggctggtctcgatctcctgacctcatgatccaccagcctcagcctcgtgaagtgctgggattacaggcatgagccaccgctcccggccgagtactgcttttttaagagtaattttaaaagataattattttgtattagaaagaatcagaagtacagtttgtatgtattaatgctatgttttggtatcaaaataatttttgttgcaaattttattatcatagatatattattttaaaaaaagattcattcactctgagtaaaatataataaataaactcacaatttcataaatgcagtcataatttatttctgtaatgacagacattctatgtaactgttttatataaactgatgcaaaaatcaacaaaatattgtattaaaatttaaatataaaataacactcaatgcagaagtcttgagaataagttttaactaagtgtagacacacacacacacacacacacgcacacacacacacacacagatagcctagacattcattaggaaaaatagttttgataagaaccatgaatgcctcccatactcatggagtatgccatacagaattgagataatggtgagctaggagcctttctgactcaaaccctacctgtttgagcagcaacataggttagaactatagtatctaggtttaatattttagtccaacacttactagatttgtgatttttggagaacttatttaatcactttatgtctcattttgctcattttaacaatagggacagtaatagtgtcaattcatacagttgttgtgaagaaaataagattagtatttctaaatattagttctttttattctttttcatggcttgtctattctgagaaacattcctagattacttccgcacacatcgatttcccttttattaacaataatatgtatttatattaaatatatagtacctgacatttttgcttaactcttcacatgattgtattagcattagaaatgaaggcagagatctaataa

SEQ ID NO: 687651 - DNA, 1195 bp, Homo sapiens
ttttttttgaggcagagtctcgctctgtcgcccaggctggagtgcagtggtgtgatctccactcactgcaagctctgcctcccaggttcacgccattctcctgcctaagcctcccgagtagctgggactacaggcgcctgccaccacgcccggctaattttctgtatttttagtagtgacggggtttcgccgtgtwagccaggctggtctcgatctcctgacctcatgatccaccagcctcagcctcgtgaagtgctgggattacaggcatgagccaccgctcccggccgagtactgcttttttaagagtaattttaaaagataattattttgtattagaaagaatcagaagtacagtttgtatgtattaatgctatgttttggtatcaaaataatttttgttgcaaattttattatcatagatatattattttaaaaaaagattcattcactctgagtaaaatataataaataaactcacaatttcataaatgcagtcataatttatttctgtaatgacagacattctatgtaactgttttatataaactgatgcaaaaatcaacaaaatattgtattaaaatttaaatataaaataacactcaatgcagaagtcttgagaataagttttaactaagtgtagacacacacacacacacacacacgcacacacacacacacacagatagcctagacattcattaggaaaaatagttttgataagaaccatgaatgcctcccatactcatggagtatgccatacagaattgagataatggtgagctaggagcctttctgactcaaaccctacctgtttgagcagcaacataggttagaactatagtatctaggtttaatattttagtccaacacttactagatttgtgatttttggagaacttatttaatcactttatgtctcattttgctcattttaacaatagggacagtaatagtgtcaattcatacagttgttgtgaagaaaataagattagtatttctaaatattagttctttttattctttttcatggcttgtctattctgagaaacattcctagattacttccgcacacatcgatttcccttttattaacaataatatgtatttatattaaatatatagtacctgacatttttgcttaactcttcacatgattgtattagcattagaaatgaaggcagagatctaataa

SEQ ID NO: 687652 - DNA, 1195 bp, Homo sapiens
ttttttttgaggcagagtctcgctctgtcgcccaggctggagtgcagtggtgtgatctccactcactgcaagctctgcctcccaggttcacgccattctcctgcctaagcctcccgagtagctgggactacaggcgcctgccaccacgcccggctaattttctgtatttttagtagtgacggggtttcgccgtgtaagccaggctggtctcgatctcctgacctcatgatccaccagcctcagcctcgygaagtgctgggattacaggcatgagccaccgctcccggccgagtactgcttttttaagagtaattttaaaagataattattttgtattagaaagaatcagaagtacagtttgtatgtattaatgctatgttttggtatcaaaataatttttgttgcaaattttattatcatagatatattattttaaaaaaagattcattcactctgagtaaaatataataaataaactcacaatttcataaatgcagtcataatttatttctgtaatgacagacattctatgtaactgttttatataaactgatgcaaaaatcaacaaaatattgtattaaaatttaaatataaaataacactcaatgcagaagtcttgagaataagttttaactaagtgtagacacacacacacacacacacacgcacacacacacacacacagatagcctagacattcattaggaaaaatagttttgataagaaccatgaatgcctcccatactcatggagtatgccatacagaattgagataatggtgagctaggagcctttctgactcaaaccctacctgtttgagcagcaacataggttagaactatagtatctaggtttaatattttagtccaacacttactagatttgtgatttttggagaacttatttaatcactttatgtctcattttgctcattttaacaatagggacagtaatagtgtcaattcatacagttgttgtgaagaaaataagattagtatttctaaatattagttctttttattctttttcatggcttgtctattctgagaaacattcctagattacttccgcacacatcgatttcccttttattaacaataatatgtatttatattaaatatatagtacctgacatttttgcttaactcttcacatgattgtattagcattagaaatgaaggcagagatctaataa

SEQ ID NO: 687653 - DNA, 1037 bp, Homo sapiens
caaggctgcagtgaggtgcaatcgcaccactgcactccagcctaggagacagagtgagaccatgtctcaaaaaaaaaaaaaaaraaaaaagaaaaaagaaaagaaaaaaaagttatacacataaagctgcctgtttgtctcaggccagataatataactaaagacaatcaaaatcaccaggtccttggaattgattgtgtaattctcaaagctaggaatgactggcataagcaaatcaggtactctgaagagctgtcactcagctgcctcactatgtcaaaggcttctagctaatataatataatacaaaatgtgttgccactgtttttgtcttctgtatttgtctatggtatcttttcaagcaggggaaattgtctaacttctaattatataaaatccaactagagaaaaaaagggaaactatgagattaacaaaacagaatatgtagacaaagccttggtattctttgatgtgcctcaaaattatacctgtcaatgccaaagttactaaagatgtccaggccacaagccagagttatgacacacacttcggtatatcccagagggctgctgatagcaagaatctgtgtaggctctgaaggaaaagaaggctcaagtgcacattttgatgatgctgctgaagaagaaaatagtacctgagtacatgggtacatgtgtgctgttgtcagctttttgaaatctgcatataatctttcatttaatcccagagtgacatgattaaatcatcctacaattgatagcatcttaaaatcaaataaatgtcactcaagtagacagaaaattaaatccccaatatagacagaactcactcaattttttaaaaaagacaagtggtccagttttgtaaaggataaaggaaatgaacaaactcaccacagggccgggtgcggtggctcatacctgtagtcccagcacttcgggaggctgaaaccggtggatcacttgggccaggagtttgagaccagcctgggcaacatggtgaaatccttctctacaaaaaatataaaaattagcca

SEQ ID NO: 687654 - DNA, 637 bp, Homo sapiens
aaggggcatgagggaacgctgggtgatacaaatgtttgagttatggtcataaaggtgtgtaaaatttccagaactctttgaactgaatatttaatattaatgcattttattgcaggtaaattatagctcaatttttaaaagtgaataaatccctgagttagagagactttaactgactcattcaataccagaactagaatttatcattcttactgtgtttttcacaacagtttgaacaaactacaaatttattatgctcattgctatagrgtttaaaatatgaaatattaacacatatgttaaatggaaatatataaatttaaaagatgccaagtgactgtacttgattaattgttagataaaaggataagtgctgtgaattcaaaacaaagagaagtcactgcaggggaaaaagtctggaacacttttcacttttctgctagaataggagctgaagttgagcttcgaaagttgaatatgtatttgaattgtaatcaactttttaattttgtctcaggtataccttatataaataagcatataacaagaaatatacatatgaatatatagagagaaataaatgtattattgaaatataatctataatatgtgacatatgttatatatacatatttat

SEQ ID NO: 687655 - DNA, 637 bp, Homo sapiens
aaggggcatgagggaacgctgggtgatacaaatgtttgagttatggtcataaaggtgtgtaaaatttccagaactctttgaactgaatatttaatattaatgcattttattgcaggtaaattatagctcaatttttaaaagtgaataaatccctgagttagagagactttaactgactcattcaataccagaactagaatttatcattcttactgtgtttttcacaacagtttgaacaaactacaaatttattatgctcattgctatagggtttaaaatatgaaatattaacacatatgttaaatggaaatatataaatttaaaagatgccaagtgactgtacttgattaattgttagataaaaggataagtgctgtgaattcaaaacaaagagaagtcactgcaggggaaaaagtctggaacacttttcacttttctgctagaataggagctgaagttgagcttcgaaagttgaatatgtatttgaattgtaatcaactttttaattttgtctcaggtataccttatataaataagcatataacaagaaatatayatatgaatatatagagagaaataaatgtattattgaaatataatctataatatgtgacatatgttatatatacatatttat

SEQ ID NO: 687656 - DNA, 1198 bp, Homo sapiens
tgacagtgtgagatctattgcccctactttgtgctgtgtatcttatgtgtaaatgttttttctcatttatattcttgtcaaatcattcacaaatgcagttatttattattattattattattatttccttagagatccttgttctgacactgttattttttaatcatgattacctgtgagcctgttaatctctctaggtaattgagaactgattataatttataatttttttacttctggtttataatctaatgggaaaactttgcatttagattttctatagatttaaaaattagagctgaatcattgcttcttcgkattattttaacttgacaattattaaagaaatgtacttatgtattttaggggggtatatgttcaaataggaaatttgtagaaatgatgtaatgtattgatttgtaatgatgtcacgtctttatctacaggtaggcgaaaaccaagagtacatcggcctcgttctcctatattggaagaaaaagacatcccgccccttgaatttcccaagtcctctgaggatttaatggtgcctaatgagcatataatgaatgtcattgccatttacgaggtactgcggaactttggcactgttttgagattatctccttttcgctttgaggacttttgtgcagctctggtgagccaagagcagtgcacactcatggcagagatgcatgttgtgcttttgaaagcagttctgcgtgaagaagacacttccaatactacctttggacctgctgatctgaaagatagcgttaattccacactgtatttcatagatgggatgacgtggccagaggtgctgcgggtgtactgtgagagtgataaggagtaccatcacgttcttccttaccaagaggcagaggactacccatatggaccagtagagaacaagatcaaagttctacagtttctagtcgatcagtttcttacaacaaatattgctcgagaggaattgatgtctgaaggggtgatacagtatgatgaccattgtagggtttgtcacaaacttggggatttgctttgctgtgagacatgttcagcagtataccatttggaatgtgtgaagccacctcttgaggaggtgccagaggacgagtggcagtgtgaagtctgtgtagcacacaaggtgcctggtgtgactgactgtgttgctgaaatccaaaaaaataaaccatat

SEQ ID NO: 687657 - DNA, 1779 bp, Homo sapiens
tatttctgtcatgttcccttccctccctccctgtcttttctttctagaactcacttgataggacattagttttcctgggttgggtgtctgattttctttccacctgtttatctctatgctttcagtggaatttttttccactcagtctttttcactgatatttttaaattgaagtataaatttttttttttaaatactactgtcttgaccaggcacagtggctcatccccgtaatcctagcactttgggaagccaaagtggaagaatttcttgaagtcaggagttcaagaccagcctgggcaacatagtgagaccctgtctctacaaaaaatacaaaaattagcctggtgtggtggcgcacacctgtagttccagctacttaggaggctgagacaggaggatcacttgagcccaggaggttgaagctgctgtgagctgttatcattgccactgcactctagcttgggcaacagagcaagaacttgtctctataaaactaaataaatttaaaaataaaaaaagaataccactttgtttactgcgtgtttcttttatatcccactcatcattgatacagtattttctcttagctctaagcaaattacaatttcgtctgattcttcattgtcttttcctctgagttttatatttgttgtgctgtctttcatgttagaggctttacctaatatctgtcaatctgttgtttctttatattaaggaagtttttccccctgaaatcaatggatgaatgggaattatatttttaagttattagaataagttaaaaatgtgtaaatagaataaatgcatttgcagggcatttaccctcataagactgagggagagcatatgtgtgtattgtggcttattgttacaactatctcctagattcattgaagatagaagttacgtttgtttcatagtctcctcattggcttgtagcaatttttcaaaagaaggaaggaaacatttttaccttacaataaaagtctgaaaccacatattttatggtgatctataggaggactaactggaaccagtcacagggtactgtccctaacagaatgtgcatctttcatgcagtaattatattttactagtggaaactacattccaggaaacctttacataaaggttttacaatgttgaaaataaaagatatgctttttacctttaaraagaaaggtggaacttaattgagaatattatagaattatttcaaaatcagactgcttttaaaaaaacttcaacttttattttagataccgggggtacatgtgcaggtttgtcaaacgggaatattgcatgatgctgaggtttgcgatacagatcctgtgacccaggtagtgagcatagtacccaataggtagtttttcaatccccccatcctcaagtggtccatagtgtttattgttcccatatttatgtccatatgtgctcaatgtttaacttccttttgcaggtgagaacatgcagcatttggttttctgttcctgcattaatttggttaggataatggcctccagctccatccatgttgctgcaaaggacatgatttcattcttttttatggctgcatagtagtccatggagtatatgtaccatattttctttatccagtctaccactgatgggcatgtgggttgtttccatgcctttgttattgtgaatagcacaacaatgaacataagtgcatgtgtctttttggtagaatgacaaagttagtctttgatttaatggtgacaaatgtgcttaattacttaatgcaaactttgctgt

SEQ ID NO: 687658 - DNA, 673 bp, Homo sapiens
acacctgtagtcccagttacttgggaggccgaggtgggaggatcacttgcactcaggatgaggctgcagtgagctgtgattttgcctagttataggctgagagggtggtgagtggtggttcttctcactctgaagagatctctagtcattctaaaacccattcatttgtcattactatatagaagagacaataagtaatggacctatcctttaagaaaacctctcatcaaagtatgcttctttattgcaggtaattcgtgcctttctgctctttccaacaattgaacgaatgtctgagtcacccaatggcagaattgccactccacttttgtgctggtttcgatatgttctctatgttactggctacttattattgaaaccgtgtcctgagacaatcaagtccttgctaatcagaaggggccttcaagtaatgaacctagagaatgaattttcaccattgaatatattagaaccattctgccttggtaagcacagattttaaaatgtatrtgtttattcttgtatcacaaaatgtttacacaatactctctgacagtggacaaatatcaagcaagcaattatttactagtttttttttcctcttccaaaagtttaaaactagaaataaataaaattagaaatagaatgaattttttcataagaaattagaaaa

SEQ ID NO: 687659 - DNA, 1672 bp, Homo sapiens
tcactgaaaatgcagcatttaagctggtctttggaatttaaatgggaatgggacaaatctgtatggggaaaaggcattttctgtatttaaggatgcaaaaagatgactaaaaccatcagttggaagagtaaacggaaaagctaaacaagttggtgaagagtttaaaaaattgtgtcaaaggcaagagaaaagagagcttcaagtacagattcattaacttgctactgagaaaacttctacttatgactgcctcctgtcctccactcttccagctactgcctgaacataccagaatacttactactacctctaaacctttgtcaatttaatgtgacacactgaaattcttttcttccttctttgtctttcaattcctgccatatatgctaaagccaaggattacttcatcattaagtaaacacttgttgtggcagtcaaccttctgggcaagggcataataagttaaaaagagttaaatgctatgcagattcctttaatttgatatgtattcaaaggcatataaggatgatgatgagaaaaatctgtcctcaaggaacttgtctcatagaaaacagtaagtgaaaacacaaagcctgtgtaagtcagtgttgttactatctctaaatacttcatcttctgtgacatcttcatatccacatgcagatctgaagcctgctgtattcatatcactttataccactgattctgtcagcagtagaactggttaactctttgacttatccttttctatcaggcaaactatatgcttaatttttctatcccatgtaaatttaaagaaatgctgtctacataaaagatatccagtaatattttgtttaaaaaaacttgaggaagcaccagcagtttcaaataatgttgaaaagtatgaaaaccaagaatgtagacataacattacatcaaggttcaaagacaatatcaaggtgctctacaatcccattttaatctagcaccctgctataactacaattaaaagtattaatttgtgtgtccattatcaatttcaatacaatggcaggcacattgtacctgactaaaaaactaaagacaaaattaagtcagttctgttatgatctgattcttcattctaaaattaactacacgatacaaaatgcacttataattcacagtaatttcacagcacttatagagaaatggagttaaggacacaagaggcaaaaattgtcaatgatatgttaaaccaaaaaaaatcaaagaaaagcaaaaccrtatgaatgtaataaaagttgtattacacttttaaaactagtaaatagtccagaaatacataaaatgtaaaaatatatacataaatacatatacaatgtataaatagttaagaaatgaacaatatatagcatatactgcaataaatacagcattcaatcttgaaaaatacctgaagtttgctcgtggaagtgggctttagaagggttttagcagcttgagtgttattgtgaggtggtggaaggaaggttatctgaaattggatagaaagttgtaacatcatatgtagatgaatatgttcataacacacatggtagacggagacacctgcagatttttgagatgtatgtgtgtgctttgcatattatgtggctaggtttagctagatgcaattttctgcatgtttttagtatttactatgaacaaa

SEQ ID NO: 687660 - DNA, 1486 bp, Homo sapiens
tcaaatcaggcatagtggcacgtgctggtaattctagctactcaggaggctaaggtgggagaattgcttgaggccagaaatttgaggctgcagtaaactatgagggtgccacttcactttagccttgcctgggtgacagagcaggatgctgtctctaaaaaataaaaaataaataaataaatacaatatttcctttttaattttgaatacttgtaagctaagaaatcgtataatcccaaataaaataacatagctatgatgaatgtaaggtttacaaggtaattgaacaagcttcactaatttctctgtgtttctataagaaaaatatataaaagactctgaaagggtcatcttgatgtaggattgattatgatagcaaacaatacacaaggaaaattacaatgaaattttgaattcttgtggcaggaagtaattttgaacacagtcttgcctgaagaagaacctaagattatattggatagaaaattggaaataactgtcccaaattttttctcatgaagccatcatgacattccacctgtgcagcttccgttgaattcaagggagactcccaatggaggaagaattgtggcttggtggaaaggaaggaactcagtcctacatgaatgagctccaagaatgttctgaaaacatgtttaaaagcaaactttcaaagtacctactatatgccttagggataagagaatagagactgccaacttttaaagtcagtttctaagagtttcgagctttacaacaaacttgaagtgtaacacttgagacatcctcatttaatggaaggaagaatgaagaaactcacaattattttggatcgcttttttaaagctgtattttgatgatctaactttaaatggattagaaacatgcagattcaattttctttagcaggaagctacttaaaaatcaagggtaagttgctgggccaaagttagcttggcactagacagcctagagtctttgaaaataaccctcaaatatttgatgaacccaattggcagccaagttcccagaaaaatattgagtagatggtggttactcatgtaagctaaatctcctagtggatttacaatgactaggacattaactgtgggatatgtaagggaagtaagtggtcagaagaaagataaataggacaaatattccttttctttatactcagttcctaattgattttgttccccatgcaataaagcacatgcgtagtgtgtatatgcctgtgtgtgtatgtctgtgggtgtgtgtatttaaatctrtgactttgagtcttcagcatggcgagtccttatttcaccatgcagagtacagtaccctgtatgtaccttttgactctcatttattgctttgcaatgtaaattataaagggccaaaaagtaatttagagttttctaaaaaattataaaacttttaattgacttttgtttttttctttgcattgtaaaatattcaaaataagatagaaatcaca

SEQ ID NO: 687661 - DNA, 656 bp, Homo sapiens
ggaatggaaaaccaaacatcgtatgttctcacggatatgtcggaggtaagctatgaggttgcaaaagcataagaatgatgtaatggactttggggacttgggaggaagagtgggaggagggcaaaagatagaagactacaaatagggtgcaatgtatactgctttggtgatgggtgcaccaacatctcacaaatcaccactaaagaacttactcatgcaaccaaataccacctgtaccccattaacttatggaaaaataaaaatgaaaataaaatatatgtagaaattrgctattgagtttttactatgtaaaattttggtttttatggattaaatataattaaaatgcaattttactttaaaaaattagaccaccaccacccatcaactaccaattccccacccccccaactctttttttgagacagggtcttgctctgtcacccatgctgtagtgcaggagcatgatcatggctccctgcagcctcaacctcctgggctttagcgatcctcctacctcagcctgaagagtaggtagggctacaagtgtatgccaccaggcccagctagtttttaaaatgtttttgtagagacagggtcttgctatattgtccaggctggtcttgaactcctgggcttaggtaattctcccactt

SEQ ID NO: 687662 - DNA, 656 bp, Homo sapiens
ggaatggaaaaccaaacatcgtatgttctcacggatatgtcggaggtaagctatgaggttgcaaaagcataagaatgatgtaatggactttggggacttgggaggaagagtgggaggagggcaaaagatagaagactacaaatagggtgcaatgtatactgctttggtgatgggtgcaccaacatctcacaaatcaccactaaagaacttactcatgcaaccaaataccacctgtaccccattaacttatggaaaaataaaaatgaaaataaaatatatgtagaaattggctattgagtttttactatgtaaaattttggtttttatggattaaatataattaaaatgcaattttactttaaaaaattagaccaccaccacccatcaactaccaattccccacccccccaactctttttttgagacagggtcttgctctgtcacccatgctgtagtgcaggagcatgatcatggctcmctgcagcctcaacctcctgggctttagcgatcctcctacctcagcctgaagagtaggtagggctacaagtgtatgccaccaggcccagctagtttttaaaatgtttttgtagagacagggtcttgctatattgtccaggctggtcttgaactcctgggcttaggtaattctcccactt

SEQ ID NO: 687663 - DNA, 1284 bp, Homo sapiens
tctatgaagttttttgagggtagaaggggagttcagaaagaccttcagggatacaaggccctctagcagcacgaatcccgtgcccatacccacactagctcggctttttcctgttttactccacaaaaagagctcttcaaagagaaaaactaaacaaaggtagaaaaacatcaaataagaacttaaagtgtgaggtaggaagtggcaagatttgaggctgaagtgggagctggaggccaggcaatgaagccagttgtcttttcagtgaatgattcccacattttgctgcacattggaattgcctggacatcttttgagatgttgatgcctagatcccacccatcgaccttctgattattataattagtaggaggtgtgatcaggacttagagagttttgaaagtttccaggtgattctaatatgcaacaagtcagaaaaccactattatagacacaaggggaaaaagtgatgaagccagattcacttttygaagggaattgtgctgtggggaaatctggattcgaacctggtttgaacaagcattaacatcacacatgtattacattttaaactatctatgcagaggtaactgcaaagaatagcctttaccatcacatccagtcctgattcaatgcatacaagccaaggtttcatttgttggttttgcaagcaatgaaaattattacgacttattcaaaatgtgtgtttatgtatgtgctaaacagtggtatgaatacgtgtgtgtgtgtgcatgtgtgtgtgtgaaggacacaaagctcaaaaaataaagatgaataggaacaaccaaccaatgctaagatgaatgataagtaaggtaacacccagggcatctctgagaacatcagcacagaaatgtatggaacttctcttagctgacagcactgccatttagttatttagctattagcgttagtattggtatttagtgttctaatacatttcatctctttgcctctctccattcctgttacaaatactgaggagaaagtgattggcccagcttgggtcataggaattcccatgggtcaatgagtcatgatcaggaactaatccagaagaattagcacaaacatggcaacacacagggctgctgttaaagctctgcagcatcccagcttccccacccacccagccccagtttctgtctactacatctgattaagtgttaaatctaccctggaccacctgagaaggagagacgagtataaagggacattacctgtgcccattgaaaaaaatgtggaataggtgagtcatacctt

SEQ ID NO: 687664 - DNA, 598 bp, Homo sapiens
tcagaatcttggtcattttctaactaactgcagggagaagtggaaaaaacagtagatggtggcttacaaacaaaactttgatccgcccaaaggtgggaaaaagctaaaatgatatgtgggagcaatatttttaatataaagtttaaagaacccggcttataagtgacaaaaacatttaaaactctgtgaagttttctgaggacatcataagaaatgacacattccacaataggaggaagtcttcagtattttttattcctttttggaccactgattactctatagctagtgctagtatcactagatttcttcacaacacaaaagyatcaaatgttcccattactaattgcacagaaaatgtctctattctctaaacttttaaaacgaccaacaaaaaaattctattgtcccaatacaaaaataaactggattatcttgatctaattagcccatgataatcttggaagactgaaaaaaatcttaaaatgtatcctcagacttctagcagaacactgatagtgaaggaagatgcatcataatgttctaaacttaatgtatttgctgatatatttccacactggcaagtcggtgcatccca

SEQ ID NO: 687665 - DNA, 2185 bp, Homo sapiens
agcaaaatattgatatctcaatgttgtaaacggtcttgatgattaaaaaagaacattctttccattgttatatatcttaaaaagtgtattagaatgaggacagtggcatgtagtggcagctccccattccctcttagcttttagcaatatctataggagagtagattatttgggggagaattgagacttataatttaacttgggctagattaaaagttgtctgttttttgtctccctcctgcttaaatgtcgtatcaaaaaatcttcttaagaatattcagtaattcagacattacattaattcacattctccatctcagcttgtgatccaagtgaggttttttgacaactttctctctgggagtatattttaaacataagcatgtgattcaacagcacttgaccctgaagttgtgatttagtgctttaattggaagctctagcttgtaagcattatggaaaggctgtttagtgtgttatgggaatgatcacaatttctaaatgtgaactcaagtggaagtgtggggaaaaacagggactccttgttgtttatcacatacgtgggagcatggaaaatgaaatgaggaactctgaaccatgaacagcaggaacgtgcagggatgctgggctgcagggaggctgagcacctggttgggagaatgaacatcagcacagaaagcagggcaccctgtgcactaagaacacacacaagtgctccaaggcctaggctggggaaggaaccagggcatggtccagttttacagtctgctaagaaagagatcaccacagaccttaagtccagactgtaagccttgttttgaccaatttgctagacagatatcttccagacacatactggaaaaatgctacctcaagtgatgatccagccggaaacacttcttgtataagtggggtgtgtcaacggtccccagggtcacccccaggattgatgattcactaggagaactcacaggacttgacatatacttatactcatggctatgatttattacagcaaaatcatatgtaaaaaatacatatatacacacacatgcatctctgtctctctcacacgcacatgcacacacacacacgtgcacacacayacacacacacacacacaaaattcaaggtcagcaaaggaaaaagacacatgggctgaagtccagaggaaaccagaagcaagtttccaagagtcctctctcaatggagtcatgcaggacatgcttaattcctccaacaacaaattgtgagaatacctgtgaaatgtttaccagggaagctcagcagagactccgtgtccatggtttttattgggggctggtcatgtagacaccctctgcctagcacatatcaatgcagactttcagaagaaagcacatgttcagcataaaccacattatgtgctcaattggtttaggcacagtgagccacccttatcagtcaaggaatggtgggaatcttcccaaacccaagttcccagatgaaatctcaggctagcagtctcaggcctttcatgttaactttattttgcacatggtgccataagataaagcatatgcccatcctgattggcattagtgctcttccctcttcaaggtcaaatcactagaataaataaaaagcaggaataagtaaatgacaatgtcaatgacactgacagtgggagagaagccatcagatgactgagtatttttattactttctggagaatgcaaagcatggaatgaaattgacaggccaacctgctacagcctgaatgtttatgtctttccatgattaatgtgtcaaaacctaccaagatgatggtataggaggtggggcctttgagaggtgattaggtcacgatcacgctgccctcatgggtggggttagtgccttatcaaagagtgcttccttgcctcttacaccatatgcagactcagcaagaaagtgccatctgtgaacaaggaagtgagccctcagcagacactgaatctaccactactttgatcttggacttcccagactccagaactgtgagaaatcaatttctgttgtttataagccactcagtttatggtattttgttatagcagcctgagctaagacacaagttgagtggacacagctggaggtggggttgtttcttctggatgaccgtggagagacactgggtcacaaggattgagagcaggagagggat

SEQ ID NO: 687666 - DNA, 2248 bp, Homo sapiens
atcatcttgctatttcttcttatttatcccatttgcttgttctttttttcttttttgctagctcctctcttttttattgaagtactactccacaatgctgccttctttgagactaagtacccgatgccattttacctccacagtggagataataatattagaccatgtcacatatagtgtaagagtcttacctagtaacttctatttccctccatcatttttatgttttatgaaaatgttattactttcatatatttaattctgcatgtgctaagaactccacactgtactgttatatttgcttgaaccagttatcatttaaagagattaaaaaggtaaaaatgggccgggcgtggtggctcacacctgtaatccccagcactttggaaggccaaggcgggtggatcacctgaggtcaggagttcgagaccagcctggccaacatggtgaaaccccgtctctactaaaaatacaaaaattagccaggcgtggtggcgggcacctgtagtcgtagctacttgggaggctgaggcaggagaatcgcttgaacctgggaggcggaggttgcagtgagctgggatcgcgtcattgcactccagcctgggtgacggaatgacacattgtctcaaaaaaacaaaaaaaaaaaacaaaaaaaamcccaaaaaagtaaaaatgtttttttgattttacctataggtttacaatttttggtactcctttgtgcagatccaaatttccatctcatgtcattttccttttgcccggataactaacatttcttgtagcgtagatctgctagtgaagaatcctgttgggttttgtctaaaaaaatctgtttcttgtcctcatttttaaatgataaggaaataaacctggggtctcagttcctcttccccgcccctcactgagcagagttcttatgcactgctgccatgtgggaggtggagatgggttcagaggtttgtgaaaagcttgacgcgctgcacgcccactccacagggcacctttagaggcttcttggggaagctggtcgggtagctctgactcctcgcatctctgtgtgtccttgggaatgtcaggtggaagatcgatgtgcatttgcaaatgggagtgagtgtgagaaaagaaaaatgtggggttgtggctggtagggtgtgttcagggagcaatggtgacctctgttgtctgtgctctcccaacagttctgggattgtggggaatgcaattgttctgtatcccttttgtattttggaagttctccgtgaagtctaactgcaggtcatattgtcatttagtctagagttggaggatggatataatttcatgagtatgaaataatatgcagagttgttggacaccaactgggcccacccactccaccagaactcaggtctccttcatttgactcccaccggcaacgtcactcacctgaattactctctcttagataccagaggggaaacggaggcatgcaggtgagaacgtggcagcagtccctaaaagtcacttctggtgctggccctggctcatccgtgccctgggggagaaatgcaagtgtcagagctgcggaaaggagctgagatctagcagggctcgcccttatcaacctccgcctctaacaagggccacacagcacgtaggggagattaggccgatctgcctgcctcatcgcgggaggccaggagggtggaaggcagcggatcgcgccctagcgagcaacccacatgctctggaagtgtggttcaactttcaccaggctactgcgggcggccggccagctgtcagcgggcactccgcccccaggagctgtccgcaagcgcggggcggtgggcaccgcggggaacagcccccggacagccagtggcacgcggagacctcggagagcgcaggccctgctttcccgtaggaacactcgtgggcatcgggtcgcccgcttcgcccccgcgctctagacgcactttcctgccgcctggcgatgtccgaagtgcatatcagagcatggacttggtcttcccagcgctaccagaccgctgagcctccccgcacgtggtggggcgcaggcggggcgccagctgcgcgggaatccgggcgagcgcgctccacccgggcagtgcgggcctggagcgccctctggcgggacggtgcgcggcgttgcgcgtctccagccttgggattggcccggactcgccttcaacgcaccggacagcgctgccaggaggcagagctctgaaaacctcgacaacgacgc

SEQ ID NO: 687667 - DNA, 471 bp, Homo sapiens
ggggcaagaatgacttggaggcagtgaccatcacgaagtaaagagggcatttgagctagacagagtgggatagttgaggctgggtggagagaaatagtaaggagagactgagacactggcagtagtgtgttatgatcgaatatgaagtgcaagaggatgggagagtggccaggaaggaggctgggaactgtatctcaaaggtcttggtgaaaaattgagactttatccccaaagcttgggggggccactaatggattttacacaggggagcaatatcacgcatattcaaaatatcacactgtaagatgaggataatagttacctggcaagattgttgtaaagagtatagataatatttatttatttatgtccttttggaatgtaaatgttcataatakttctctttttaaaaatatttttaaaatttcaatagttttggggtacaagtggtttttggttacacggatgaat

SEQ ID NO: 687668 - DNA, 665 bp, Homo sapiens
gttgtgacttaaactaatatattctctcttagttaggagtatacccaactcagtctgaacaagtgtctggggttttggggtggggggttacttcaagttttcattaaaaatttccaaccctccttccccagttaacctggcaaacagttatgctaatgaaacatatgatccaaacattctctttagaagttctattcttattacttattggagttcatcctccaaggtttcatttgtggcctgatgagttttaagtttgtttgtcctctgctaatgtaagtacatattgttgccacccctgtctcatgcaccacaagttgattctctctctaatcaatattgttgcgctattattttctttggtcttccaacaacggcatccataaaaaaaattataatcaacacaaagttctcatcaaagtggatttccttttatgtggaactacttttattagttatatttatatakggagagaaattatatatattcctctataaggtaatctatagaatatatgtatattttatattttagacaatatatgtatatctatatgtagattaccttatagaatatattttctatataaatatagaattctatattacatatagaatttgtaatatttccaaatttaaaacacttaaacacaaatcaatatttt

SEQ ID NO: 687669 - DNA, 665 bp, Homo sapiens
gttgtgacttaaactaatatattctctcttagttaggagtatacccaactcagtctgaacaagtgtctggggttttggggtggggggttacttcaagttttcattaaaaatttccaaccctccttccccagttaacctggcaaacagttatgctaatgaaacatatgatccaaacattctctttagaagttctattcttattacttattggagttcatcctccaaggtttcatttgtggcctgatgagttttaagtttgtttgtcctctgctaatgtaagtacatattgttgccacccctgtctcatgcaccacaagttgattctctctctaatcaatattgttgcgctattattttctttggtcttccaacaacggcatccataaaaaaaattataatcaacacaaagttctcatcaaagtggatttccttttatgtggaactacttttattagttatatttatatagrgagagaaattatatatattcctctataaggtaatctatagaatatatgtatattttatattttagacaatatatgtatatctatatgtagattaccttatagaatatattttctatataaatatagaattctatattacatatagaatttgtaatatttccaaatttaaaacacttaaacacaaatcaatatttt

SEQ ID NO: 687670 - DNA, 665 bp, Homo sapiens
gttgtgacttaaactaatatattctctcttagttaggagtatacccaactcagtctgaacaagtgtctggggttttggggtggggggttacttcaagttttcattaaaaatttccaaccctccttccccagttaacctggcaaacagttatgctaatgaaacatatgatccaaacattctctttagaagttctattcttattacttattggagttcatcctccaaggtttcatttgtggcctgatgagttttaagtttgtttgtcctctgctaatgtaagtacatattgttgccacccctgtctcatgcaccacaagttgattctctctctaatcaatattgttgcgctattattttctttggtcttccaacaacggcatccataaaaaaaattataatcaacacaaagttctcatcaaagtggatttccttttatgtggaactacttttattagttatatttatatagggagagaaattatatatattcctctataaggtaatctatagaatatatgtatattttatattttagacaatatatgtatatctatatgtagattaccttatagaatatwttttctatataaatatagaattctatattacatatagaatttgtaatatttccaaatttaaaacacttaaacacaaatcaatatttt

SEQ ID NO: 687671 - DNA, 610 bp, Homo sapiens
atgtggggagaaaaaaatctttccttataggtgactgacaaagtcaaatgtatagtcccaaataacacgaataatattatcaaagggctgcagatcctgcaacatgacattaagtattttattaagataatatatttagttatcagtggattagttactgcagtgatactataaataatatatggacaattcagacatctaatattgtttccaaagtttgtaattaaaatgtattcagcatgtaattgatggagatagtgagtgaagaagacagatctgtctacactgatatgcaagacagaaaaatatgtaactcctttaatatagaactattaactgtgkagtcccagaagagcaggaactgacttgggtcttatttagggcacagtgttttctcaagttttctggaacttgagaaaaaatactgagttagcagatggcactgatttttttttttaattaaagaaatgtaaagctatcggacacaaaacacaaatattatgtaggcagagaaaaaagttatgacaagtaggctttactgccaacaatggtgaaggaagaaagaatctaaaataatattaccagtaagcatctgacaattattaaatcg

SEQ ID NO: 687672 - DNA, 596 bp, Homo sapiens
gagtcattcactgaagtaaagcttgcttaaatgtttccctgcctgactagagcttggaaggtaaaaagaggacagaggacctcaggaaaaaaacaatactaccccttgtcaacagaatcatcattataatacagagttcctttcaggcaattagcatgttaattttaacaataaaaaagcatctagcctatgggtaatccaggtagagagtatttctaataaaacgagttgcttttagtattttctcccctccccagatttattgasgtaaaactgacagaaaattgtatatatttaaaatgtacaacttgatgtttcatatgcattctgaaatgatcatcaccatcagttaacatatccattacctcacatatttaccatttattttctttctgtgtgcttgtgtggtgagaacacttaagatctaccctactaaccaattttgagtatacaatagtgttaattatagcctccatactgtacattagatatgcaaaacttattcatcttgcataactgaaacttttacaaacatcttcgtgatttgatttttgcctaggcctcttaaatgactaagaaagcatttttgctaaaac

SEQ ID NO: 687673 - DNA, 646 bp, Homo sapiens
cccatgctttgatccctcccrggttggtctgggttggtcggagtctggtgctgttccctccacagactgcgagcctcagtgggcagggcttgcaatgtactcatccctgtggccctcagtctgacagtggttggccacagcaacaagtatgtgctcagcgaatgtttgttgagtgtgtggatacccagaacaggaggaacaccttgcccacttctgaaatctttcactgaacttcagactcctggtacagagacccctggggagctcacactgcgcaccctgcaggcatcagggctgatgctagcttccaggcatgttggagaccggatggtgaatggcgatgggctgcatcctctctccaggagggctaagcctgggggcccgaggtatgtgtgtgtgggtggtgccctggctattcccgtaaagacccagcttggcaagcccactcttgctgtcggatctgcagatgacttctcttgtgcttgtacgagccaactctgacttctgggaaggatcgtgctgtcttgattgctgcaaacacagacaggttagctcatgcttggctgcactgccaatgacgtgggctccagcttcctggggggtctgctgggccaagtcctcaggttttctgcctgaaatcaattca

SEQ ID NO: 687674 - DNA, 646 bp, Homo sapiens
cccatgctttgatccctcccaggttggtctgggttggtcggagtctggtgctgttccctccacagactgcgagcctcagtgggcagggcttgcaatgtactcatccctgtggccctcagtctgacagtggttggccacagcaacaagtatgtgctcagcgaatgtttgttgagtgtgtggatacccagaacaggaggaacaccttgcccacttctgaaatctttcactgaacttcagactcctggtacagagacccctggggagctcacactgcscaccctgcaggcatcagggctgatgctagcttccaggcatgttggagaccggatggtgaatggcgatgggctgcatcctctctccaggagggctaagcctgggggcccgaggtatgtgtgtgtgggtggtgccctggctattcccgtaaagacccagcttggcaagcccactcttgctgtcggatctgcagatgacttctcttgtgcttgtacgagccaactctgacttctgggaaggatcgtgctgtcttgattgctgcaaacacagacaggttagctcatgcttggctgcactgccaatgacgtgggctccagcttcctggggggtctgctgggccaagtcctcaggttttctgcctgaaatcaattca

SEQ ID NO: 687675 - DNA, 686 bp, Homo sapiens
gtcagtgcctctccatgttcccaatgagagtcactctgaaatttcaaaggaagaatggaaagctatccttgatattttaaagatgactgctacttacttcactgcacttgctagaagcaacactctaggtcaagcacggtggctcatgcctgtaatcccaacactttgggaggccgacgggggggcggatcacttgaggccacgagttcgagaccagcctggccaacatggcgaaaccccgtctctactaaaaatacaaaaattagccaggtgtggtggcatgtgcctgtaatcccagctactagggaggctgaggcagaggatcacttgatcccgggaggcgggggttgcagcgagctgagatcatgccactgcactccagcctgggagacagagcaagactctgtctcaaaaaaaaaaaaaaaaagaaagaaagaaagaaacgaaacaacactctaacttttcccattaataaaatgatcaytaccaaatatagaaaacctgtctaagtaatgcctgaaaaagaatactgtgcttccaggcatcatgcacagaagacctgggaattacctatgtgggcacaggtattgtttgtatcatgtaaccagattaaagtcagtaggatccttttttactaaaggtggttatacacccttatagcatgttattaaaggactacaaaaaag

SEQ ID NO: 687676 - DNA, 965 bp, Homo sapiens
agaactgctgggaagagatcattctatacatgtagtacatatgmaaatatcatatatgaggaagtatgagttattacacaatcattaataactaagcatgccaaatcagtcatcaggtttcaaagaatcatagccttgtttcaagaggtcctgccaggttttaaggaaacatgcattttctgtacattggaagacaagctattccacttgagctggtactgcagatgtgacctcaagaaatttggttaatgaaaatgctgcatctctgatctgcatctccactttctccagcaggtctaccatttggcccttgttcctgctcagaactggccagcccaaactcactggttgcgtgggaaagatgctaaaaggtgtttgaagatgaggaagaaaagggaagttctgggagctggtgaagaaacccacaactcctcaaggtcagccatggggaagagctaggagctcagaatccaaccagcaagaggacattttaaaacaggttcttttttctttctctttttatcacctatgattttaagagtccaggtaatacaagcaaaggtttactccatagagcatagaataaaaacagttaatctaaatatttaagaggtatgttgccatgctattgttgggcttgggtgaatatatatttacatttctgtatatctacatatgtatgaaatatttagatctgttttcatatatttgcctatttaaagcttaattttttaaaaaagttttatttttctcctaattattgttaaggggaacattttaagaactagaaagttttaaaaatatatatttttacttatcttctcaaacttatatttcttatagggaaaactcataaactcttcaagaaacatcaggaacttaaaattttattttaaacattaattccttaactgtgattcattttggaaacatgctattcaattaactattaatttgaaaattca

SEQ ID NO: 687677 - DNA, 965 bp, Homo sapiens
agaactgctgggaagagatcattctatacatgtagtacatatgcaaatatcatatatgaggaagtatgagttattacacaatcattaataactaagcatgccaaatcagtcatcaggtttcaaagaatcatagccttgtttcaagaggtcctgccaggttttaaggaaacatgcattttctgtacattggaagacaagctattccacttgagctggtactgcagatgtgacctcaagaaatttggttaatgaaaatgctgcatctctgatctgcatctccactttctccagcaggtctaccatttggcccttgttcctgctcagaactggccagcccaaactcactggttgcgtgggaaagatgctaaaaggtgtttgaagatgaggaagaaaagggaagttctgggagctggtgaagaaacccacaactcctcaaggtcagccatggggaagagctaggagctcagaatccaaccagcaagaggacattttaaaacaggttcttttttctttctctttttatcacctatgattttaagagtccaggtaatacaagcaaaggtttactccatagagcatagaataaaaacagytaatctaaatatttaagaggtatgttgccatgctattgttgggcttgggtgaatatatatttacatttctgtatatctacatatgtatgaaatatttagatctgttttcatatatttgcctatttaaagcttaattttttaaaaaagttttatttttctcctaattattgttaaggggaacattttaagaactagaaagttttaaaaatatatatttttacttatcttctcaaacttatatttcttatagggaaaactcataaactcttcaagaaacatcaggaacttaaaattttattttaaacattaattccttaactgtgattcattttggaaacatgctattcaattaactattaatttgaaaattca

SEQ ID NO: 687678 - DNA, 688 bp, Homo sapiens
taataataaaactttaacatcaccactttggaatatgtagacctgtataaatcttaggtttcattgttgtgctgttattgctaccagtagttacttcccagaacagctctgagaaagactgtatggggaattattccaatttcataacatgagatggataaatatatttttgctgcagtcttgcataagatttatattttatttttcatacaaatatgctactttaaatagtctgcattaattttagctgctcttaatattaggayatttttattcatagtacaatttaatttcttctttttctatttttcctgaagttgagaattgttagccctaagactgttttattttcctgaaaacatattaaattattataaattattgaaataataaattaaaatgtaatattaataaatataaataaaataatttcatatgcattattttacaattaaataatttaaaataatttaaattatctttatacttccaaatgtcttcttttctaaatatttttgcatgttaattgcaattcactaggctcttgcaacattttctgtttttcttaaaattataaagtccaaaaccaggaacagtatacaaagcaataactttgtttattctaagtacaaaaaactaataactgtataatatgaagatctaaaatagaaaaaatggcaattatata

SEQ ID NO: 687679 - DNA, 636 bp, Homo sapiens
atatatatataatttattacatgaatatatatatttattacatgaatatatataatgtattacgtaaatatatatataatgtcttacgtaaatatatataatgtattacataaatatatataatgtattacgtaaatatatatataatgtattacgtaaatatatataatgtattacgtaaatatatataatgtattacgtaaatatatatataatgtattacgtaaatatatataatgtattaygtaaatatatataatttattacgtaaatatatataatttattatgtaaatataaaatttattatataaatatataatttattatataaatatatataatttattatataaacatatataattatatataaatatatatataattatgtatatatagtctatggcttatttgttgcaatagaaaccttatggcatataaaatctaagatatttactatatctgtagatatactatatctctcctctacaataaaatgtcaaaaacgatcatatctagatttgctaaagaactttctctttgttagaaaataaatcccaatctagagtactaacatagcattaatgtggctaccctgttacattaacaacctctttaggctgctctaataagg

SEQ ID NO: 687680 - DNA, 2341 bp, Homo sapiens
  misc_feature 1777, 1778, 1779, 1780, 1781, 1782, 1783, 1784, 1785, 1786,1787, 1788, 1789, 1790, 1791, 1792, 1793, 1794, 1795, 1796,1797, 1798, 1799, 1800, 1801, 1802, 1803, 1804, 1805, 1806,1807, 1808, 1809, 1810, 1811, 1812, 1813, 1814, 1815: n = A,T,C or G
  misc_feature 1816, 1817, 1818, 1819, 1820, 1821, 1822, 1823, 1824, 1825,1826, 1827, 1828, 1829, 1830, 1831, 1832, 1833, 1834, 1835,1836, 1837, 1838, 1839, 1840, 1841, 1842, 1843, 1844, 1845,1846, 1847, 1848, 1849, 1850, 1851, 1852, 1853, 1854: n = A,T,C or G
  misc_feature 1855, 1856, 1857, 1858, 1859, 1860, 1861, 1862, 1863, 1864,1865, 1866, 1867, 1868, 1869, 1870, 1871, 1872, 1873, 1874,1875, 1876: n = A,T,C or G
tattgatatctcaacagtatctgggttttgaatattatgatctcctatgcagagtattaattgacaccaccatcttttccttgatttctgtatttgttctacaaacacttcctattccatctcccacaaatctggtttaattatccaggtgatgttcctcatattcagttgcctcactgttagggctgttttgccttgtgatagtaaaagcacactctgtagagactatgagtttgagaaagacctatgaaaatattgacacctaaaaaaaagcttccaaaatatttttgaaaatgcaaaagtgagattaaaagcatgttttattaacattatcagcactaatattacaactcatgaaatgcatctcctacttagttatgtaataaattatattaaatatgtgatttggatacattttaatatatttgataaaatgtagtgtggagcttccaaaagtgcaattgcccaggatgggagaaaccttaaaaatggccctgctcataatgaaatagaagtgactttgattggcaggttgaggcagagatggtaggccctgagaataagggagcaggggtgcagtggagaagactgcctggtgaaataggagagtcagatattagtgatttattgagtgggaagcatgaaggtagaggattctaggttgacaattttagaattgcatctagatttctaacttggataaatgagaggccagcactgtttagtgaaggcaaaaggaacagcaacgtggaaagtctaagaatgccattttaatatgccacaatgctacatttaagctaaactcggcgatcttttcttttctgagtgaatgaaaatgcattaattaaaaacacacatttcatacacatgttaatatctgctattctgcaagcaagtattttctgtacagtgtctaaatatctactccaatcgaaaaagtgcttaaacactttaatatgcctcttttcaaccaaaaagaaaaacagttgctatgatcatgtttcaacatattttaaatctacacataatcactgccaatttataatatcttctctgcagatgctaatttcctatatagcattttttatcccctttaactaccgaaaatgtaattgttcagtattataattaatgtttttcattgctattacatgtctgaacgttgttagaattttttgttaatctttttattaatggaatgctcttcagtacaatgtgtaatactcttcttctctgacactgttataagttatttcaaagattttccatacacttgttttaaatagaattttcaaatctttcaggctagtttaagtcagtagaataggctctagagaaaagaaaatgctgtagagcagaaatgtgatttaaatgtaagtgtaaataagaaagtatcaatttggctaatgagaaatatacccatatatataaaatatataatggatatatcaatcaatagacatttcaaaatgagattatccactgaactattttaaaatattaatttaaaaagtggtcaaatcgctatactaacaaaataaaaaaattttttataaggtaacaagataaacaatatgtgtatttattttggccaagagacaagttgttatctggaaaatcatgacatgttgtatattatcaaaattactatcaatatcaagcagctctactattgactctcttagcagaactagaaattattattatgactctattccattaccatgaatattcaagaaactatttaaaatgtaaacattaatcttaacacaataannnnnnnnnnnnnnnnnnnnnnnnnnnnnnnnnnnnnnnnnnnnnnnnnnnnnnnnnnnnnnnnnnnnnnnnnnnnnnnnnnnnnnnnnnnnnnnnnnnnctttctttctttctttctttctttttttttttttgatacggagtttcgcttttgttgcccaggctggagtgcagtggcatgatctgggctcaccacaacctccgccttctgggttcaagcgattctcctccctcagcctccggagtagctgggattacaggcatgtgccaccaagcctagttaattttgtatttttagtagagatggggtttctgcatgttggtcaggctgatctcgaactcctgacctcaggtggtctgcctgcctcgacgtcccaaagtgctgggattacaggtgtgagccaacgcacycggcggaatggatgtatttcaatatagtgcttggcctgataatgtctccctgcagttcagacagtgagtgaatgagaggcagagaaggactaagcagaaaatgtaagttagtgtttcaaaaaatgtgctcatcaggacattggtggagaacatt

SEQ ID NO: 687681 - DNA, 628 bp, Homo sapiens
tgcgctgtacatgtttctcttcaccacctgaggcttatggaaagcaaaaactgtctttttgaaacttcacacaaggcccatctagcattaggaagttgttccataactgagtaaataaagatggcagagatgagcttatgccgaatattaatggcaagccaaaagattcatacttgaacctgtgtaggcgacgaagaaaaaaaaaaagacagtcttatgtggtatatactgaaagaaaaatggggggtgagggggtgttaaaggcagcaaatattccagaaagatttctctcacagtcacgtcctaagaaggaaaaagaatagagacaaagaaaccatttggagaaaataatacaaaaacacaatgtgagaaagttaaaagtgcttaactgccatggtagcaagatctaccaatctaaaaaamtaataaatgtgagaaaaaaattctgttaaaaataatttgggccaggcgcagtggctcatgcctgtactcccagcccctggggaggccaaggtgggaggatctcttgagccaggagatgcagactaagtgagctatgatcacaccactgcactccagcctgggacagggcaagaccttgtctctcaaattaacaataataataatt

SEQ ID NO: 687682 - DNA, 3761 bp, Homo sapiens
caaaaggaaataagcagaatctctgggggggaaatgtgtctgaatgaggaaaaagtactaaagatgtgcatcaccaaccgatcaatcaataaattcgtgtatcctccagaaaaatgtaatttctacctccgtgctgatataaataaatgttcccaatgttgtacttgaagggagctatttatagatttctgaattacagattcagtgggctgacttcacgaatctagctaatagtctcatctcaggtgacagaatttccaaagagagcaatgaaaatgttacaatcaacatactagaactttaaaatataaatcttcctgtctcaaacctaattcataggtttgtcagaccaataaaatgagatttgtgtagtaagaagcaaacacagagtgttccaagtaaatacccacacaccacacggaagcactaggctacagtggttgaaatctggtttttcacctagtatcagttccaggttttcactaggagagcacctcttagaggctctacccaaagatcaaagcaaagtgacacactgtcccagatcacaaaatccccctgtgtggtttcatttattggctgatgaactacagtaaccttccctttggggtcataaatcctaaccaaaaagaaaactctcatctttggcaaatcagacatttataatcatccatgtatgaggcaacaccctttcccaaagaacagctttaattctacttggaaacaataaaaaacactagcattatgatgcacaaagtactgtgatagaagctgaagtaaaaatgagagcaataaaataataattcaaatacaaagcccctaccctcaaggaacataataaacggaaaaggcatgcatacaaatgtgcatctgaagtgctcaagctcttattacaaagtctgcacagagtagctggggcataggaggaggagtgatggatccacaggaggatgaaagctcaggaggggctccacagagacaagtggcaggaaatgaatcctgaaagataagtgtttttctttatgcatgtgttagggattggcagggctcgggggtgcagttcagagagaggaagagatgccgttaacagtttcacatggctgaaggctagcttacatagagttggaattggtttacctgaagtaccaatgactcagcacaggatccatggctagggatttttaaactccaaatgctgacatcagaatactgctttcatttatgctgtccaaaaatcagtctcagcagcccgtctacaacctcatttcaaaacctactgctcttaccaattccatctgcatcataatctgcgctgctgctactactgcaaagcatatggggctttaattatctacaatcatacaaggaataattcgtgaaaaattctaagtgacataaaaatatcatgaaaaaaatgtgaagtgctaattcccttaattatccactgaaaatcactgctatctcttacaaagagatacccaaccctgtatttgatagtacacaccttgatattattctgagtcaataacgcagtgataatttactcaggaagctagcctttaaaaaagaaaagccatagatctgtccttctgaaataatatcttacttaatatatacactttcccatgcatctttacaggcaaccactgctgatgggttacacagtcagccgtgttgaaaaatgtaaatgtacccatacagttccaatttaattcataggaggctttttaaaactatcctctttgttcatttggtttatatgcttaaactttggagtgcatcagaatcatgtgaagggcttattttaaagtgactttttgggccccaccctctggcatttaggtctgagatggggcgtaaacacctgcatttctaccaagttcctagtggtgctcatgcctgtggctgctggttgcggacctcacaccaagagccagcgccctagagaagtccagatggcagtcattccaggtcaccccacataccaattaccactgagagtaagcaagttttataggatgtatgtcttacatttgaaaaagagatggtaaatagagttcagtgccaaagacaacctctaaatgtagatgtgatgtaagcatcaagcttcaaatgaccagatcaaagatagtatcaacctggggagctgatagtgaaaccatcctcacgtgcagagatgaaatgggaagagcaaaagtttttagtttgaattactgcttcacctcttcctagctatgttcgttcatctataaaatggatctcacatgggtgaggagataaagtaagttaccttacaaggaaggtgttcagtaaaaggtagttgctacctaagctaacaagggaaagagctctcagcgcaagtatttatgcagaagatgcaagacgaagccacacaatgtaactttacatgcactatgtcaaaataacgggggtacgtctctttttaaaaccacctatatctaaagttttatctatgatctcgctcaatgtgatatatatatatatatatctcacttcatttaatccttactaccacacattgttgtaaaaaacatgactgttctccctcaggcttccaaggcagctcctcctccaaactgtttgctcattgatgctacaccattctccctctgtccctcacactaaaaccctcagtggccattctgtggctccttgaggctttcagtcattctaccagacaaaatccatatgttcttcctgcggaacagcttcatcatccccagatctcattctgtgtgctgtaacggtgaagtgataggcctacctacttgacagcccctcactgctctccttctactctttattttgggtatgactttcatcatgctactatttgcctggtcaaaagatctccagttgctcttcacactgttatcctgtgtaaaaccccatacttcctttctcagtgctgaccaacagaattttctgcaatgatggaaatattttctatctgcaatcagtatggtagccactagctatgtgtagcaactgagcactatttgatgaagtgaatttttaattttatttcactttaattaaacagtcayatgtggctaatgactacattactaaacagagcagctatatataatctcatcaccaggtatccttcaatgtgaactgcccaccctggtcaagcaaagtctctccccacaactgataacactcttccatgccttactccaaagactgtgcttcctcctctcactctgctcttcccagtctccacagcctatctatccaggctggtagagcccccaccttttctgaaagcttcccaattacatctgccaatattccattcctctctccctgccatgaacaatcactgtttgcacagctcgtctagcagcactccaacaggtattccttgcactgtaatttatctacgcatgcatctgagccccttcctccccagtgaaagaatctattcctctaagatcaaatgtcccattcacctaataggtgcttcacaaatacttgttttaaatgaattaaaggtacagagtgatatattttaatctctcttggacagcaagactcctcttcactagtaccaaatggaaattttaatcccctcactgttatgtgatagcttggcaaacacccagttattgaaaaagtatcctgtaaaaaggctctgaaaagtctttgacctttgtacctttgtctgttctaaaaatgccaaggaaaaatgagaaaatactacttacaaatgaaaagcccattaacttcaaagc

SEQ ID NO: 687683 - DNA, 632 bp, Homo sapiens
atgttggtcaggctggtctcgaactcctgacctcaggtgatccacctgccttggcctcccaaagtgctgggattataggtgtaagccactgcacctggccagaaatgtctattttaagtgaaagtacaaaaacatatttatctaaatgactgtttccctcactatagaccccttgcaaatctagccacgtgtctttgcttttttttttttttttttyccttgagacggagacttgctctgtcgcccaggtgggagtgcagtggcacgatctcggctcactgcaaactctgcctcctgaattcaagcgattctcctgtctcagcctcctgagtagctgggattacaggtgcctgccaccacatctggctaattttagtttttttagtagatacagggtttcaccatgttggccaggctggtcttgaactcctgacctcaggtgatctggccaccttggcctcccaaaagactggggttacaagcgtaagccaccatgcccagcctagccatctctcctgagataatattgtggctatttgaaatagttttggttctctactttttatttttgccgtcacagagagttggtgatccttgtttgaagagtggttttgttactttaaaacccaaaa

SEQ ID NO: 687684 - DNA, 632 bp, Homo sapiens
atgttggtcaggctggtctcgaactcctgacctcaggtgatccacctgccttggcctcccaaagtgctgggattataggtgtaagccactgcacctggccagaaatgtctattttaagtgaaagtacaaaaacatatttatctaaatgactgtttccctcactatagaccccttgcaaatctagccacgtgtctttgcttttttttttttttttttcccttgagacggagacttgctctgtcgcccaggtgggagtgcagtggcacgatctcggctcactgcaaactctgcctcctgaattcaagcgattctcctgtctcagcctcctgagtagctgggattacaggtgcctgccaccacatctggctaattttwgtttttttagtagatacagggtttcaccatgttggccaggctggtcttgaactcctgacctcaggtgatctggccaccttggcctcccaaaagactggggttacaagcgtaagccaccatgcccagcctagccatctctcctgagataatattgtggctatttgaaatagttttggttctctactttttatttttgccgtcacagagagttggtgatccttgtttgaagagtggttttgttactttaaaacccaaaa

SEQ ID NO: 687685 - DNA, 611 bp, Homo sapiens
tgagtcatattactataaaagggcagaaaacactgggggaggctcttagcagatttctaactactttgtttactttggttgatagggagtttgctgtcatatttttgaaaggtggtggtggtgggattgtctgctatctcctttctctgccacctcccaggtatataggtgatggktacaatttgggaaatatagaaaggaaaaaaaatatacaccccattaccttgagatacttaacattttagttttcttcttgcttttttctctttcttacatgggtttaaaaataggttttaaaatattaaatcatataccattattttctcctttttcccccctttaacactgtgttcccttctgtacagttttttttttttttttttttttttggagtactgtttttaagggatagcatcattttgttctttggagctatcccatttaaccagttctctgttgttagacagcaacgtcccccctccaaaacaacttttcctctcaattccaacattatttccttatgataaagtaaaattactggattaaagtttgaacgttttcaagtatcttcatatataaatgtgttaaattttatccaaaatgcttgtgac

SEQ ID NO: 687686 - DNA, 611 bp, Homo sapiens
tgagtcatattactataaaagggcagaaaacactgggggaggctcttagcagatttctaactactttgtttactttggttgatagggagtttgctgtcatatttttgaaaggtggtggtggtgggattgtctgctatctcctttctctgccacctcccaggtatataggtgatgggtacaatttggraaatatagaaaggaaaaaaaatatacaccccattaccttgagatacttaacattttagttttcttcttgcttttttctctttcttacatgggtttaaaaataggttttaaaatattaaatcatataccattattttctcctttttcccccctttaacactgtgttcccttctgtacagttttttttttttttttttttttttggagtactgtttttaagggatagcatcattttgttctttggagctatcccatttaaccagttctctgttgttagacagcaacgtcccccctccaaaacaacttttcctctcaattccaacattatttccttatgataaagtaaaattactggattaaagtttgaacgttttcaagtatcttcatatataaatgtgttaaattttatccaaaatgcttgtgac

SEQ ID NO: 687687 - DNA, 611 bp, Homo sapiens
tgagtcatattactataaaagggcagaaaacactgggggaggctcttagcagatttctaactactttgtttactttggttgatagggagtttgctgtcatatttttgaaaggtggtggtggtgggattgtctgctatctcctttctctgccacctcccaggtatataggtgatgggtacaatttgggaaatatagaaagraaaaaaaatatacaccccattaccttgagatacttaacattttagttttcttcttgcttttttctctttcttacatgggtttaaaaataggttttaaaatattaaatcatataccattattttctcctttttcccccctttaacactgtgttcccttctgtacagttttttttttttttttttttttttggagtactgtttttaagggatagcatcattttgttctttggagctatcccatttaaccagttctctgttgttagacagcaacgtcccccctccaaaacaacttttcctctcaattccaacattatttccttatgataaagtaaaattactggattaaagtttgaacgttttcaagtatcttcatatataaatgtgttaaattttatccaaaatgcttgtgac

SEQ ID NO: 687688 - DNA, 611 bp, Homo sapiens
tgagtcatattactataaaagggcagaaaacactgggggaggctcttagcagatttctaactactttgtttactttggttgatagggagtttgctgtcatatttttgaaaggtggtggtggtgggattgtctgctatctcctttctctgccacctcccaggtatataggtgatgggtacaatttgggaaatatagaaaggaaaaaaaatatacaccccattaccttgagatacttaacattttagttttcttcttgcttttttctctttcttacatggktttaaaaataggttttaaaatattaaatcatataccattattttctcctttttcccccctttaacactgtgttcccttctgtacagttttttttttttttttttttttttggagtactgtttttaagggatagcatcattttgttctttggagctatcccatttaaccagttctctgttgttagacagcaacgtcccccctccaaaacaacttttcctctcaattccaacattatttccttatgataaagtaaaattactggattaaagtttgaacgttttcaagtatcttcatatataaatgtgttaaattttatccaaaatgcttgtgac

SEQ ID NO: 687689 - DNA, 628 bp, Homo sapiens
tatatctaaaattgtatcaatatgaaaatacaaatgtgttccctccttggaaattattgaataataataatagagttacataagtctgtccagatcttcactgaattatgtcaaaacaatgtctgtggtatttttttcaaagcacaacttatgaaatatttcataaaaagcaaaccaaactgtttccaaaaaactcactatttcccaagccctattctataataaatatattgtaaaggcattcagatgaagaggaaatgcttttctcraaagcgtccttcagcaaatgggaaaaagaaatatttctttttttgtgtgtatatatgatcttttctagcatattcacagtattctagatacaattggtatttctattattccctctgtctcctcaatttaaaataattatctagaaagcagtattctcttttcataaaattgtcatttatttcaaactcattctgagttgttggtaagttcagatcttttcaagaaatatttattaaatgcctttatttttgtaccaggtattactttcaaggtattcaggatgcattacaaagatgtgatctctgtccttactatctaaaaagcatttaattaaatatttaaaagttattattctgaa

SEQ ID NO: 687690 - DNA, 612 bp, Homo sapiens
ttgttaatctcttgttaatgtttttctgttaccaacatataaactttggctgtgggggyggtggggggtgaaataaggtttaattatttgcagacatctaaaatgaggagcagattttactaaaatttagggtgtcacttctgatttaagagtgatgtgaaaattgatgtaatgacatttaggatttgactctccctaactttggcccacttccgtgaggtggagactgcataacctctgtagcctgagacggttttcctgtctatagataggaattctctatgtggccagactataacccaacttaacaagtactggtttcctctaataggatctatttccagggcgaatgttcatcaccagggatagagagccttttctaaagagtttaccacctatgtaaacaagggttgattttaacacatattctatttttgtttgtgtaatttttatatttttgtcatttttttcttaataagaaactgaagatttcaatttgaattctctataacagtctgcaattgcataacaatcgtgctgcttatctttagctcattttgtttcagtaagaatgaggctgcctcattaggtttgaggctaacattgcattac

SEQ ID NO: 687691 - DNA, 612 bp, Homo sapiens
ttgttaatctcttgttaatgtttttctgttaccaacatataaactttggctgtgggggtggtggggggtgaaataaggtttaattatttgcagacatctaaaatgaggagcagattttactaaaatttagggtgtcacttctgatttaagagtgatgtgaaaattgatgtaatgacatttaggatttgactctccctaactttggcccacttccgtgaggtggagactgcataacctctgtagcctgagacggttttcctgtctatagataggaattctctatgtggccagactataacccaacttaacaagtactggtttcctctaataggatctatttccagggcgaatgttcatcaccagggatagagagmcttttctaaagagtttaccacctatgtaaacaagggttgattttaacacatattctatttttgtttgtgtaatttttatatttttgtcatttttttcttaataagaaactgaagatttcaatttgaattctctataacagtctgcaattgcataacaatcgtgctgcttatctttagctcattttgtttcagtaagaatgaggctgcctcattaggtttgaggctaacattgcattac

SEQ ID NO: 687692 - DNA, 972 bp, Homo sapiens
ccagcagaatgactgaaattatatcattggtggtgaattcatgtgtattaaagttgcttccaactcagtgattctctttcaaaatgcaaatgcttctggacgaagggataaaataaactctacatttcagtgtgaataggcaaaaggcaatgccatttggtcatcatagaatatctgttgctttgggtgaaggagaggacacttaaagctggggaaaatgcaaactgaaaagatttcgggaattaagacaaactttgcccaaatgtgaagatgatgaacaggaaaatataactaccactytgaaacttttactgatttaaacatttatcattgttttgctaactttaaaaaatctgttggcatttatagaggaggaaactgagttccttgataccaagttattgattctacttgtgataggtggtctttatcgttaagtagaactactttttggtgggaagatttgccaatctgattttcatacttatttgacaacctcaaagaaataattcaatggtcatttgtcagtcctcactttggtagaactatcagcatcatatgacatagttggtaattccttttaccttttaaacactttcctctattagttactgggataaacataatttcctggggtttctcctaccttaatggctgctcctatttgttttgctttactgtatgaaaaggaacaagccaaaaagtgtcagagtgtcccacagctatgtttttatactattcctcctctttacacttatttcaaatactcaacagtttcaaataacacatacgctgatgacttccaaatatatatttacagaactcaaaaacctccctcctaaactttagattgttgtatctaactaccagctcaacctatctactaagaaatctggtaagaatctccaaattaatgttcaaaactgaatatgcaatttttgtttctactcttgtaacctcatcttcccagta

SEQ ID NO: 687693 - DNA, 2480 bp, Homo sapiens
atttggtcatttggaagtagtacaaggttgctcttggctgctctcatttgtaggaattcctgatctgagtgctgtattctataaatgatttctggaatttggcttagatgcttagttcagtctgcatgttcagctacattttctcctctctactcatctgctgctcatgcctccctacaactaactacctatagaaacaaagcctatgtctccagccttctgtgacaccaatagctaccactaggtcctcctatttcaggcatattcyaggatgatcctgcctcttctctcatttcagatatcctgccttgtctatcttcatgcctatcaagctgacagaaatggaccgttcctttcttgtctacagagagggaaaagaatttcagtatacaccactctcaccagtctccaacaacacagctctttgtggcatttggggctgccctcaataggaagcatgtcattctacatacagagaatggttggtttacacaagacttcctgctgctgccatcaccaacagagattcctaatgtagacatctaacacattctgatcttgcagtaagcttagcaaagatatttctggtaaaaatgtattcagcagcagaatgacttcagcagttcatttatcacttgatatgcctgttttgcagttgtgtggtcccaggaatgcttgcttactatgatattttataatagtttcccaagattttttttcctggactctgaaaaattgctatgaaaaccaatagtgtatcttttttccttgggggataaggtttggaagaagtagtagaaatggggtagaagcaattcaggttgggcatatttaaccactcataagaaacttagtcaatattaatggaggcataattgccagatcaattgaaataattatccctccatattctgcactgggaagactacatttatagacagtttagaaacactggagtcagatttatcacaattacaatcccaactctgtggcttagacctaacctcataatgacacatggttgttaacctctactttatgactatctaacatttaattacagtatatttatatatatatactgtatatatacacacaaatatatagaacacacatatatagaaatatatactgtatgtatatatatttttacatatactgtgtgtatatgtgatatattataatcatatatatgattatgatatatatatcatatattatattataatcatatatatgacatatgattataatatatatcatatattataatcatatatatgatacatattatatatcatatatggtatataataatcatatcatatatgacatataatcatatcacatatgatatattataatcatatcatatatgatacatattatcttataatcatataatatgtgattatattatcttataatatataatatatattatatgattatcatatataatatatattatatgaatatcatataatctatattatttttgataatcatataatttatattatatgataatcatgtaatatatgaatatatatgaatatatgataacatataatatatgatatatgataatcatataatatatgataatatatgataatatatgattatatataatatatgataatatatgattatatataatcatatataatatatgattatatatgattagatatataatcacatatatatatgaacatatatataatatatgatatatatgattatatataatcgtatatataatatacgattatatcatatggtatatattatactgtatataatatacataatatataatatataatatacatatacattatatacgtatataatatacattatatattatatacctatatgagataatgtatatattatatacatatataatatattatactatatataatatatatacatatatacatatatgatgtatatattatatacatgtatatatgatgtatatatacacattataatatatatcatgtatatgattataatgtatatcatatatacacacagtatatatgaaaaagtcctaatctcccttctgtgatccaccaatctaaagcatcttgacttactctattcctttctcatatactttttgatatttttatctttaaaggtacatatatacgaatatacattacattatatattatatatacacagcatatatatatttatatatgattattcatatataatatatattcatatattttatatatctatgaaggattactgaaaagacttataatcatttattactccagatgttctaaactctaccatttctaccatttataagttaaacaaacaaacaaagctccgggtatcgagaacataaaattcttgatttcctagaaaattgcctttactggtctagactttggtgtgagggcattggctatagcaagaaacattgtaaataaaagccaact

SEQ ID NO: 687694 - DNA, 2480 bp, Homo sapiens
atttggtcatttggaagtagtacaaggttgctcttggctgctctcatttgtaggaattcctgatctgagtgctgtattctataaatgatttctggaatttggcttagatgcttagttcagtctgcatgttcagctacattttctcctctctactcatctgctgctcatgcctccctacaactaactacctatagaaacaaagcctatgtctccagccttctgtgacaccaatagctaccactaggtcctcctatttcaggcatattccaggatgatcctgcctcttctctcatttcagatatcctgccttgtctatcttcatgcctatcaagctgacagaaatggaccgttcctttcttgtctacagagagggaaaagaatttcagtatacaccactctcaccagtctccaacaacacagctcttkgtggcatttggggctgccctcaataggaagcatgtcattctacatacagagaatggttggtttacacaagacttcctgctgctgccatcaccaacagagattcctaatgtagacatctaacacattctgatcttgcagtaagcttagcaaagatatttctggtaaaaatgtattcagcagcagaatgacttcagcagttcatttatcacttgatatgcctgttttgcagttgtgtggtcccaggaatgcttgcttactatgatattttataatagtttcccaagattttttttcctggactctgaaaaattgctatgaaaaccaatagtgtatcttttttccttgggggataaggtttggaagaagtagtagaaatggggtagaagcaattcaggttgggcatatttaaccactcataagaaacttagtcaatattaatggaggcataattgccagatcaattgaaataattatccctccatattctgcactgggaagactacatttatagacagtttagaaacactggagtcagatttatcacaattacaatcccaactctgtggcttagacctaacctcataatgacacatggttgttaacctctactttatgactatctaacatttaattacagtatatttatatatatatactgtatatatacacacaaatatatagaacacacatatatagaaatatatactgtatgtatatatatttttacatatactgtgtgtatatgtgatatattataatcatatatatgattatgatatatatatcatatattatattataatcatatatatgacatatgattataatatatatcatatattataatcatatatatgatacatattatatatcatatatggtatataataatcatatcatatatgacatataatcatatcacatatgatatattataatcatatcatatatgatacatattatcttataatcatataatatgtgattatattatcttataatatataatatatattatatgattatcatatataatatatattatatgaatatcatataatctatattatttttgataatcatataatttatattatatgataatcatgtaatatatgaatatatatgaatatatgataacatataatatatgatatatgataatcatataatatatgataatatatgataatatatgattatatataatatatgataatatatgattatatataatcatatataatatatgattatatatgattagatatataatcacatatatatatgaacatatatataatatatgatatatatgattatatataatcgtatatataatatacgattatatcatatggtatatattatactgtatataatatacataatatataatatataatatacatatacattatatacgtatataatatacattatatattatatacctatatgagataatgtatatattatatacatatataatatattatactatatataatatatatacatatatacatatatgatgtatatattatatacatgtatatatgatgtatatatacacattataatatatatcatgtatatgattataatgtatatcatatatacacacagtatatatgaaaaagtcctaatctcccttctgtgatccaccaatctaaagcatcttgacttactctattcctttctcatatactttttgatatttttatctttaaaggtacatatatacgaatatacattacattatatattatatatacacagcatatatatatttatatatgattattcatatataatatatattcatatattttatatatctatgaaggattactgaaaagacttataatcatttattactccagatgttctaaactctaccatttctaccatttataagttaaacaaacaaacaaagctccgggtatcgagaacataaaattcttgatttcctagaaaattgcctttactggtctagactttggtgtgagggcattggctatagcaagaaacattgtaaataaaagccaact

SEQ ID NO: 687695 - DNA, 2480 bp, Homo sapiens
atttggtcatttggaagtagtacaaggttgctcttggctgctctcatttgtaggaattcctgatctgagtgctgtattctataaatgatttctggaatttggcttagatgcttagttcagtctgcatgttcagctacattttctcctctctactcatctgctgctcatgcctccctacaactaactacctatagaaacaaagcctatgtctccagccttctgtgacaccaatagctaccactaggtcctcctatttcaggcatattccaggatgatcctgcctcttctctcatttcagatatcctgccttgtctatcttcatgcctatcaagctgacagaaatggaccgttcctttcttgtctacagagagggaaaagaatttcagtatacaccactctcaccagtctccaacaacacagctctttgtggcatttggggctgccctcaataggaagcatgtcattctacatacagagaatggttggtttacacaagacttcctgctgctgccatcaccaacagagattcytaatgtagacatctaacacattctgatcttgcagtaagcttagcaaagatatttctggtaaaaatgtattcagcagcagaatgacttcagcagttcatttatcacttgatatgcctgttttgcagttgtgtggtcccaggaatgcttgcttactatgatattttataatagtttcccaagattttttttcctggactctgaaaaattgctatgaaaaccaatagtgtatcttttttccttgggggataaggtttggaagaagtagtagaaatggggtagaagcaattcaggttgggcatatttaaccactcataagaaacttagtcaatattaatggaggcataattgccagatcaattgaaataattatccctccatattctgcactgggaagactacatttatagacagtttagaaacactggagtcagatttatcacaattacaatcccaactctgtggcttagacctaacctcataatgacacatggttgttaacctctactttatgactatctaacatttaattacagtatatttatatatatatactgtatatatacacacaaatatatagaacacacatatatagaaatatatactgtatgtatatatatttttacatatactgtgtgtatatgtgatatattataatcatatatatgattatgatatatatatcatatattatattataatcatatatatgacatatgattataatatatatcatatattataatcatatatatgatacatattatatatcatatatggtatataataatcatatcatatatgacatataatcatatcacatatgatatattataatcatatcatatatgatacatattatcttataatcatataatatgtgattatattatcttataatatataatatatattatatgattatcatatataatatatattatatgaatatcatataatctatattatttttgataatcatataatttatattatatgataatcatgtaatatatgaatatatatgaatatatgataacatataatatatgatatatgataatcatataatatatgataatatatgataatatatgattatatataatatatgataatatatgattatatataatcatatataatatatgattatatatgattagatatataatcacatatatatatgaacatatatataatatatgatatatatgattatatataatcgtatatataatatacgattatatcatatggtatatattatactgtatataatatacataatatataatatataatatacatatacattatatacgtatataatatacattatatattatatacctatatgagataatgtatatattatatacatatataatatattatactatatataatatatatacatatatacatatatgatgtatatattatatacatgtatatatgatgtatatatacacattataatatatatcatgtatatgattataatgtatatcatatatacacacagtatatatgaaaaagtcctaatctcccttctgtgatccaccaatctaaagcatcttgacttactctattcctttctcatatactttttgatatttttatctttaaaggtacatatatacgaatatacattacattatatattatatatacacagcatatatatatttatatatgattattcatatataatatatattcatatattttatatatctatgaaggattactgaaaagacttataatcatttattactccagatgttctaaactctaccatttctaccatttataagttaaacaaacaaacaaagctccgggtatcgagaacataaaattcttgatttcctagaaaattgcctttactggtctagactttggtgtgagggcattggctatagcaagaaacattgtaaataaaagccaact

SEQ ID NO: 687696 - DNA, 1149 bp, Homo sapiens
actctaagtgccctagattttatatgtaaaatcatgtagtttgcaagacattggaaaggtggcacttcaattaaacccttcactcccacccccaaaagttaaaaaataagtaatatctagagaaaaactggttatggatccactgtgactggatagtatttgatcaccaagaactatttctttgagaaatttactctctatcatgtaccaaatgtagctaggtaattaaggtttatatagttacagaagatgataaaaatagagaaaatattaaaatgtaataaaattgttaagccaggaatgactaacactatattctaaagtactgtacactctgagagatggctgcaattgttttccaatcttcttcagtgttaggaagatggtaaaacatgattcgttatagctgtgcttctctaactttagtgtgcatgagaagcacctaggaagattctaattcatggagtctgggtcggacctggcattctctatttttagcaagcttctcaaggataccatgttgatattcttcccatctttgaatagcaacccattgctttaaacatatttaacatctctgggctactattttctattcaattgttggtctactccactaggatatatgtgaggtcctttaattcagaataataycttattcagctgtgcaataagaaatggctgaaaaaatgatcattccttctcctttttcattattacttttctttgaccaaagaatgctattgctctaacaagaaatgtaccaattctgatgaagtctgtagcttggtaaaaatcacaggggaggaataagaccactatctaaccaatgtatttgctaacataccatagaaagataaaacataattttaaaaagtgcaatgctctggggcaaatattttgaaaaagatcaggcctaggaaagaaaacagttctgaacctaaggaggttaaagttttggacccacatctattatctgagtaataaatttccactgtaaggaataaaaaaaaaagaaaagaaaacatggtaagtccaacaaaagacaagaaagggatgaaacaccaacaacaaaaaagcacagtaaacataagagagacatggaataagaccaaacacagtaaaagtaaatataattgactaaattac

SEQ ID NO: 687697 - DNA, 1292 bp, Homo sapiens
tgcatctggaacacattcatgtgcttttgttctattaagattctgatttggttcttttttttttttttttgagagacagagtctcattctgtcacccaggctggagtgcagtggcacaatcttggctcactgcaacctccgcctccctggttcgagcgattctcctgcctcagcctcccaagcagctgggattacaggcatgcaccaccacgcctggataatttttgtatttttagtagaaacagggattcaccrtgttggccagcctggtctcaaactcccgaccttaagtgatctgcctgccttggcctcccgaagtgctgggattacaggcatgagccacaacacccaacctgatttggttcatttttacagtgaacacactgaaattaaacttgccctggtaactttctgttgaaaagatgaaaggcgggacagttgtcttgctgatgaacaaaacagggataactgaatggaagtcaagtgatgttgtgataattctctcaatgtattagaggtaaaggcatataggcccagacaaccaggcctacatcacactactatatgtacctagaccattaggttataatttattatgtgtgtcatttttactcatttttaactgaaatttcttcatcctgaaatatatctcattcctcccacaaaaatatcatttttcaataagtttcttctataattacctgggagtaacattataaagtattaatttgtcattaaaatattaatatagtgagctttatattaggcagtatacaaaataatataatcaaattatttatattagtttaaattaataaggttatacttatttaaaataacatattagctctggtagctattcctatagaaatattgacatttgacgaaccataataatttggacacattattatagatgtgtacataccatacatagaatgttggcagctggaattaaaagtgactagagtcactagtcatgctggggagaattagggaattacaggacactttaaaaatctatttctgtagtggtatcagaaaagaaagaaaagtaggataaattttgtcagttttgcttctctataaaagcaacagaaaaatggcaaaaatagaatcaacttttaacaaatatggaaattcacaaaggctcactgaacccagggagcatttattcaagaaaaacagctgagtcttggtaagaacagtaagctttgtggcattataactggacctggtcccaacccctctcttttctctggcaatatgttggcttacataataatgatgca

SEQ ID NO: 687698 - DNA, 1292 bp, Homo sapiens
tgcatctggaacacattcatgtgcttttgttctattaagattctgatttggttcttttttttttttttttgagagacagagtctcattctgtcacccaggctggagtgcagtggcacaatcttggctcactgcaacctccgcctccctggttcgagcgattctcctgcctcagcctcccaagcagctgggattacaggcatgcaccaccacgcctggataatttttgtatttttagtagaaacagggattcaccgtgttggccagsctggtctcaaactcccgaccttaagtgatctgcctgccttggcctcccgaagtgctgggattacaggcatgagccacaacacccaacctgatttggttcatttttacagtgaacacactgaaattaaacttgccctggtaactttctgttgaaaagatgaaaggcgggacagttgtcttgctgatgaacaaaacagggataactgaatggaagtcaagtgatgttgtgataattctctcaatgtattagaggtaaaggcatataggcccagacaaccaggcctacatcacactactatatgtacctagaccattaggttataatttattatgtgtgtcatttttactcatttttaactgaaatttcttcatcctgaaatatatctcattcctcccacaaaaatatcatttttcaataagtttcttctataattacctgggagtaacattataaagtattaatttgtcattaaaatattaatatagtgagctttatattaggcagtatacaaaataatataatcaaattatttatattagtttaaattaataaggttatacttatttaaaataacatattagctctggtagctattcctatagaaatattgacatttgacgaaccataataatttggacacattattatagatgtgtacataccatacatagaatgttggcagctggaattaaaagtgactagagtcactagtcatgctggggagaattagggaattacaggacactttaaaaatctatttctgtagtggtatcagaaaagaaagaaaagtaggataaattttgtcagttttgcttctctataaaagcaacagaaaaatggcaaaaatagaatcaacttttaacaaatatggaaattcacaaaggctcactgaacccagggagcatttattcaagaaaaacagctgagtcttggtaagaacagtaagctttgtggcattataactggacctggtcccaacccctctcttttctctggcaatatgttggcttacataataatgatgca

SEQ ID NO: 687699 - DNA, 1292 bp, Homo sapiens
tgcatctggaacacattcatgtgcttttgttctattaagattctgatttggttcttttttttttttttttgagagacagagtctcattctgtcacccaggctggagtgcagtggcacaatcttggctcactgcaacctccgcctccctggttcgagcgattctcctgcctcagcctcccaagcagctgggattacaggcatgcaccaccacgcctggataatttttgtatttttagtagaaacagggattcaccgtgttggccagcctggtctcaaactcccgaccttaagtgatctgcctgccttggcctcccgaagtgctgggattacaggcatgagccacaacacccaacctgatttggttcatttttacagtgaacacactgaaattaaacttgccctggtaactttctgttgaaaagatgaaaggcgggacagttgtcttgctgatgaacaaaacagggataactgaatggaagtcaagtgatgttgtgataattctctcaatgtattagaggtaaaggcatataggcccagacaaccaggmctacatcacactactatatgtacctagaccattaggttataatttattatgtgtgtcatttttactcatttttaactgaaatttcttcatcctgaaatatatctcattcctcccacaaaaatatcatttttcaataagtttcttctataattacctgggagtaacattataaagtattaatttgtcattaaaatattaatatagtgagctttatattaggcagtatacaaaataatataatcaaattatttatattagtttaaattaataaggttatacttatttaaaataacatattagctctggtagctattcctatagaaatattgacatttgacgaaccataataatttggacacattattatagatgtgtacataccatacatagaatgttggcagctggaattaaaagtgactagagtcactagtcatgctggggagaattagggaattacaggacactttaaaaatctatttctgtagtggtatcagaaaagaaagaaaagtaggataaattttgtcagttttgcttctctataaaagcaacagaaaaatggcaaaaatagaatcaacttttaacaaatatggaaattcacaaaggctcactgaacccagggagcatttattcaagaaaaacagctgagtcttggtaagaacagtaagctttgtggcattataactggacctggtcccaacccctctcttttctctggcaatatgttggcttacataataatgatgca

SEQ ID NO: 687700 - DNA, 653 bp, Homo sapiens
tttttttttatttttttgagacagtctcactctattgcccaggctggagtgcagtggcacgatctcggctcattgcaacctcctccgcagtttcaagtgattctcctgcctcagcctcccgagtagctgggactacaggcgtgtgctaccatgctcagctaatttttgtatttttagtagagatggggtttcaccatgttggccaggatggtctcgatcccttgaccttgtgatccgccctccttggcctcccaaagtcctggaattacaggagtgagccactgtgcctggccattctgcaatattcattaactcatattccttagggtttttggtgtgagaaggaagttggagtggggagtagggaaggtcatccatagactcctctttatattccaaattttattactattaaagcattttatgttggtggtaagcattctgagcatagaacattaccaattgttrcatccttttggtttattatcacagactagatgagacaatacaggccattgccaatggaaccttgaaccagccactgaccaaattggatagatcttctgaagagcctttgggagttctggtaaatcccaacatgtaccagtcccctccccaggttagtggacctttgctctaactgttaataagaa

SEQ ID NO: 687701 - DNA, 606 bp, Homo sapiens
cctgacctcaagtgatccgtcggcctcgacctcccaaagtgctgggattacaggcatgagccactcactgtgcctggctggtttcttgattgtaccaaattctctccacctcagagcctttgctagtgctctccttctaccaaaatgctcttcctcagtatgttggctccttcttttacttgagaagtcagattaacattgacctcctcagagaggccttcttggactgygtagtgagctcagtaatggtttccaaaagatgtccacatcctcatccctagaacctcgtgaatgttacttcacatggcaaaagaatttttacagatgtgaataaattaggaatcttgagatacagagattatcctggattatctgagtgggcccagtgtattcacaaggatacttaaatgtggaagaggaagatagaagagtcagaatcagaaaacgagttttgatgatggaagcagaggttggagtgactcagggccatagacctagcaatgtaagtgtcctttagaagctggaaaatggaaggcatgtattctccactcatgcctcccaaaggaaagccaacccattttggatttctgacctccagaactataa

SEQ ID NO: 687702 - DNA, 676 bp, Homo sapiens
tgtctgcaagaagtatcagatcacaagtaaaagagccattcccgttttgtttaacaaatgtgtgtgtggttatgtgtgtgtgtgtgtgtgtgtgtgtgtgtgtgtgygctttactggatactttaaagcacagagctctgggcaaaagcccctcttggtaagatttaagaaccatattttcccaggttttcacttaaagtggctggaatgagctatagtcctttaagagcatggtggcaatgtgcttaagagtgaaaactgcctggagttacagaaactcccaggtttttgtaatctagttgaacaaaaaagaattaggaatatgaagtcattagcattacaaggcatctcttgactgagttaagtggtagcaaggatgatagctttgttaatagtgtggagtttcacgcatggattgcattggaaacactaaattttgtatatggaaaatatgggattggattggagaaagagaacataaaaattacagtgcataaaacttcaataaaaacatcacgcaatattttatgtttttcttatcacatgggatgagaatccacatcaaaattgtcacattagtctccatcacagggtttattaatacacaatcttgaggctctgagagtgctgcaaagggagatggagaataaggaaggttatgctgggtcaagcccaa

SEQ ID NO: 687703 - DNA, 1471 bp, Homo sapiens
taggtggtgggatgatctgcacagcaaaacaccatggcacacatttgcctatgtaacaagcctgcatgtccagcatgtgtacccaggaagttaaaataaaagttgaagaaaaataaataaataataaagtgtaaacattggggaaaaaagtgtgttcccatcctcggtgcacagaaatcaaagagttctgttagttaaggagtccctctttagatctgggagatgcttctcaagtagatatattgatgcctagtctcaaatacatatggtagatcttacaacaggcatgaattctgaagcctgttgtaaggcctggttctccgatcctgtatcaaaaacaggtctcaggcagccaggtaaagagcaagcctaccatatttcttgtgagagatggcaaggcccacctcaagctagagattcagccaaacttgatggttctggatggcaaaggggacttgaagttcagacaaaaaataattgggagcactgaacttggctaacagagaattcaaggaatgggktaagtttcgtaattacatttgtgttagtcacttgggctgctatagcaaaataccattgggtagcttataaacaacggaaatttatttctcacagttttggaggctggaaattccgagatcaaggcaccagcagattcagtgtctggtgagggctcatttcctggttcatagatggcagcttctcatatggtagaaggggcaaggaagctccctggggcatcttttataagagcactaatctcattcacaagggatccatcctcatgacctcatcacctcccaaagaccccacctcctaacaccatcagattggtgattagatttcaatgtgtgaattttgggtggacacaaccagtcagagcacaacaccaaaaaacccatgttttctagatttatgtattgtacttgtttggaaggctgtcctatggaaatgaaatacaataaaatatttgatgacctcctatttatatgaggccctccacctgacacagattggttgcagaaagcacacaatttggctggcttggaggagcactgaggttgagagttaagctgaatccttaggaatgcagagtctactttagacaaccaaagttcttcaggctaaaggcaagaagttatataaatccaagcatattcctgagcctcaatgaaagtaaaatctggggaccaaatattagacattatgtgtaaatgaaattaaaaagccataaatagagtgccttagtccatctgagctgctataacaaaacaccatagatggtggcttaaaaacaacagaaatgtattttcacagttctggaagctgggaagtccaagatcaaggcatcagtaggtcgactatgtggtgaaggtcctctctctggatcatagattgtgtcccctcactgtgtcttcatatagtggaagggagaaatgagcttcccagggcctctattatgaggtcacta

SEQ ID NO: 687704 - DNA, 997 bp, Homo sapiens
catccttatcacctgccaaaggcaccatgtcctgataccatcaggtttgggtttagaattttaacgtatgaaatttggtgagacacaccgattcagacaatagcagatgccttactgacacctggctgagacttcctctgcgtggctctgaggtctgaggctcttcctgtctattcttcctttccctatttccttttacaggtgtcacatctgtgtcatggtctaagggtcttcctacctgcacctgctcttgccctctgtgtccttcatgagcatttcttccagtaagtctttcgcacttccaatcccattttagcatcagaaaaaataacagtgagaataaaagaaaataaaagtacttatttttctatttattgaatgtaatcccagagctaatgggatgcctgaggcatattgggtgcccactaaatatttgttggataaatacctcctatgctcaagttgctgacaaaagtgtatgagaggcacacacagtaatagatatttgaggcaagaggcaaaatatttttaaaaaagatttgttttgagagaagagtaagtaaactgctttagttataaaggattacattgaagaaacctttgggggcttcatggataaggcagcattctgcatgattttaaagggcatatgagatttccatgagtgaagaagtcgtaagctttagaaaatagtgtgtgagcaaagtagggaggtatattctactatatgcataagttggacaaggcagtggtgccacatgtctagggtggctggggtggctttttatagggcataaatggatgttttataagatgaagaggagaacacagagggaaactggggatagactttgtatatgcggtgtatatgaggtatgtatgttatacatatatgtatgtatatgtacatgtatatatgtacatgggtgtaygtatacatgtatgtatatgaggtgtatatgtatatgacatgtatggcttactgtttgaatgatca

SEQ ID NO: 687705 - DNA, 584 bp, Homo sapiens
ctggatttttttgccagaagaaatctaaaggacaaagtttgaatgtctccatcattttcaccaagacctgagcacttgttctaaagcaatggatgtaataatctcaatgtcttctatcattcagtcatttctctgatactggcagaggaaacatatttttggaagtctttaccaaataaaataaaatttttaaaatattgtcaagtgaagatgttttagtggaaaatttttcattgcagaaacgcttgaaagccattggaattaatcttaaaaaatacacatggacaatattataacttatagaatttattatttataattttctgccaaatgtatccttacctttaagacttttcctatttgtatgtatctattgtctatgaacgatcattttcaaaattaaaattawtagaaggtgaagtgtcaacaatgaccaaaaatagacaaatctggcagtattgagaactgaacataaatatgcaaatatcagttttgatgaagcaattgacaagtttacatacatagtaggtgagccagtagtgtgaatgcttgtcaagcttccaaagatgggaattttgatataa

SEQ ID NO: 687706 - DNA, 643 bp, Homo sapiens
tgtggcctctccacgtggctgcttgggcttcctcacagcatggcagcgggcttccaaaatgttgtgttccaagcaggtgaaaccagaagcttcaaatctagccttattagagctacacagtttcgcttctaatacatttctgtttgttccaaacaagtcagaaggccaacccagcttcaaaaaatgcaaaagtgtctctagctcttgatgaggacatggccaggtcacaaagcagcacagcatgtagaatggaacatactgctgtagtcatctctgaaaatgcaatcttagatgctgtgttgaatgttatttcatctagtcytctcacaatcttaaagattaagcagtagaaaggggctctgacacttcccagctgcgccatttcaacaagctactaaatcttctgtccttttgtcccctcacatttaagtgagataaatcatagtacctaccacaaggaattcttgaagacaaaatgagttcctgtatgtaaagcactgagagtggtgtggggcacacagtaaacacacttagtattagttgttattctgttttggtgggaagtggttatctttccatggcacagtttgaaaacatcagaagttggattcaataccagaattcagaatctagttccctggct

SEQ ID NO: 687707 - DNA, 2247 bp, Homo sapiens
ataaagttgataaaactgataatagcaaaaaccaaagacaataaacaaagttctgtatgagaaaaaaatcatagatattttaaagttatataacagaataagaaattctggaaaaaacataaaaacaagggattgatattcaaaggacgaattaaaaaatttacatattatatgaatatgtaatttacagaaaactcaaatgactagtcaacaaatgaaaagagaatcaaccttagtcrtaatgatgaaaatacaaattagacaagataatcactaaccaccctcacccaagccctcatgcatcaaattggcaagggaaaaaaagcctgaaaacatcaagtcctggtgaagtgaaattggtagtttttaacactgctagtaggggaatattgggctagtggtgaggtcagcagggggcatttttttaggatctaaaattgtttttaatatagaatacacattttaatatagaatacatatatagaattgtaactgtacaattctgcctctcagtatcttgctgagagaacactctgcttatgtgtacaaagaggcatgtctaaggatgttccctacagcatagctggaaatgtaaaaaaagtttgtccataggagactggctgaatcaagcctattatatcagtacctggactacattacaggtgtcaacatgaaagtgtctctaagacacatcagaatattaatgtgttatagcatggttaaacaatactaacaggaaaaaggtctcatgggtagaaaactgtccagaaggaaaactggctatggtcatgagggctcttaggagctcaggacccgggaggaaggagcaggacactcatctctactttaaggcctcccaaactctttgccccctgctcacataataaaccatacttcaagcatcatttcctactgaagctattaaataagatacaagaaatgacaggggtctgggctccagcatggaagcagatgcaagcaagagaagagtagaaaggtgcactttgtttagcagctgaagtgatgtgggctggagaatccatgcaggctgtgctggcacaaaccccggggaaaggcagggctagttttgagttgaggttttgccattctcttcaagtgtggtctttaggaagtcactaaacccctgtgaatccacttccccatcaatacatgcggaagataccatatctttcttagaactttgttaagtttaaataaacctaaataaaaacatactattggtctgcctgcctgtctgtccacctatcatctatcttcaatctatattctatctctccctttcttgttccacacacctacctacctacctatgtatcttttgatatatattttttcctgtccgtatgtatctatctttcttattaattttctcattgtctgtctgccttcctctttcctgattttctgtctccccttctgttggtcatgtgtctgctaagtagatgtctaactatccatgtttctttctttctgccatcctgtctatttctacctgtctccatccatccatccatccatccatccatccatccatccacccatgcacccacccacccacccagccacccacctatgcatgtttctgggtgtctatttgtcagtatgtctgtatgtctttgtgttatatatctgtctatatgactacctgtctgtctctctatgctggaaactctgtttttctgtctgtccatctgtaacctcaatgtttttccttcttgtctgtatgtctttcaacctatcttgtttgtctgcatatctacccatatgcctatgaatgtatttatctgattatccaaaacctgcctgaatgtctgtctatatatccccctccctcctttcctttctccctctatacctttctgtctgactgtgtttcactgtctaataatgactgtctaatttctctttgacagtctaatttctattgaccactgttgacctaccttcatggtgcttgacacagagcagagcctcactcaaggctagtttacttcccccttttcagttcctttcactccttcattgctccattcctacactcagctgccattaactgggccattgctctgtgttatgtgctagggatacaacctaaaattaggcagggtctctaccttctaagagtatttgggctgctggcctaaaaaacaaattaatgaggcagttatatgatgcttagagctatgagagacaagatggtgtcaggcacaagggaagggcacccat

SEQ ID NO: 687708 - DNA, 1034 bp, Homo sapiens
ttgcccagatctacaggaacctccccacacacaagaggacagggcagcccagactcatgtcaacagctggcacaaatgaattacagattacttacaattcacataacactgacccaagaatataaccaattgtcaagacaaaataaatttagttattcacatacaaatattccatttgtgaataaatttcatattcgtatctgtatacagacagtctacatgttcgataagtcctttatgatcctacctgaaaatgctggtagatgcaatatttttggatcaaatttaaccgatggtggttgtttcattatctgtggttaaaaaaaataaaaccttttgagacaatttttgagattgatatgtctccttatatgtcccttatatcagataataaatcaatgaggacaaaaaaagaatgtgtaaaatttgttaccaaaaacaataagaacgatgccttttcagattaaaacatacaaatatagataatttattttaaaaaatcatttcaattgatatctgtaataaaataaagcttcaaagaaaaaattcacccctatcttggcttactctttagataatttacctctaattagaaattcagtcattcaacaaatatctattgggtaccgtgccaaggtaaggctctatgccaagtgctaagggggatacaaaaatataaaagacacaatcctattttcagagagctgacattctggttgggaagatgagacaaacatttgataaacaacaaaatatttcacaattcaaaagaggcaggacataactacagacaaaaccctggacagaaagaattttttttttttgtaaatagtagtttagagaatacagcaagcactttacttgatayagttggcactgggtttacagaagaggtataaggtgggttgaggtcttgaaggatggctggaactttatggttatatcagagaagactccattcaaggaagccataatagcatgaattggaaagtgcacaatttgagaaatgtgaagaaaccatgtagttggatcca

SEQ ID NO: 687709 - DNA, 662 bp, Homo sapiens
agactctttttaacaactagatctcttgtgaactcattaccacgcagagggcaccaacccattcaggagggatcctcccccatgacccaaaccctcctgccaggggccacctccaactttggggatcacatttcaacatgagatttggtgggggcaaatagccaaaccatattagttctcatcattttcatagtatattattaggccctcttgatttcaagttccaatgtgtggtcagcatttcaattgatatttacatatatttagatattaattagcatatttaatacataaagttttrtttaccaagtgttccatattttatcttttatgatattcacaaagtttcatgttgtaccgatattcctgttttctgtagttccactcctacctgaggaacagccattttaacaatgctactttggaggttttctcggatgagaaaagaaaatatctggcctgatattgcaggggtgaagggaagagtcagactctcagttaatcaggggtgaagggaagagtcagactctcagttaatcttgcctagatctggccaatgtttgtggtaaaacatttttatttccttcaatatgatattatgaactatgagaactttcttgctggactagtctctgatgaaggtgagacagtttgttccacag

SEQ ID NO: 687710 - DNA, 680 bp, Homo sapiens
caaattctttactaaatatcagtaaacaaatttagcaatacagacagttcctgatttatgatggttagaattaacaatttttttattatcaaataaatttgtggcttatgggtctatctggatgaaacgccattgtaagtcaaggaatatctgtacattaaaaatatacaatatataccaagtaaggcttatctcaggtagtccagattgattcaacattttaaaaaaatcaatgttatttgtcacatttaaagaagaagaaaaaattgtctcaatagatgtagaatataaaactaacataaaatttagcaatccacttctgggtgtttattgaaaagaatcraaatcagaatctggaagagatatctacacttccctgcttattgcaccattattcataatagctgagatgtaaaaacagcctgaatgtccattgacagacaaataaacaaaatgaggcattaacgtacagtagaatactgttcagccttcaacaagaaggacattgaaatatgcatggatgaatcttgagaacattatgctaagtgagataagccagtcatagaaaaataagtactgtataattccacttaatatgaggtgtctaaaatagtcaaatttattgaatcaaagagtggaatgatggttgttcagggctggaaacagagaaaaatggaaat

SEQ ID NO: 687711 - DNA, 616 bp, Homo sapiens
ttaagcaacttctccagggtcattcatctagcaagtggcccagccagggtccagcgcagactggaccctcctaaacctgtgctcttaaccactgtactatcccaaagcctcctgtcctcagtcctgcagtctcccctccacaaaggccccctaacctactgcttgagaagcccctgttttccatctgtttcttttcacccctccacagagcaggccccagacagcctctggctgagccctcatgaagctgtaggctgattactgttaaacacctgcttgttcagatgtgagggctggccttactgttccagctcagtggcggtagccaaatccatggtctctgtcaaccatggctggaagcccagcacactacccgagagtgacagattctttgggctcagttattgctgctctggaagtcaacacttttagccttttcactccaagttcctcaaacctgmtgagaagacttagcacccatggggatggagacgtaccctagccctcaggcccaccctcaccccagccagagaggaatccaccgtctttgctttagaattaaagaccccaagggctagcagtgtgctggagaccaccaagtcacagcaggaggaga

SEQ ID NO: 687712 - DNA, 588 bp, Homo sapiens
acacagcaacaagttaccacctttgaagcattgagtgagctctcatcaaacacttaatgtgcctatgctttgatcttggacttcccagcctccagaactggagaaataaatttctattgtttgtaaattaccgagtttctggtaatttgttattaccatgaagggacccagtagttagtaagaattattcttgggagyggagatctttctcatgtttaatatcttttatttattgttttatttttattttttgaaacagagtctcactctgtcaccgaggctggagtacagtggtatgatctcagctcactgcaacctctgctgcccaggttcaagcaattctcatgcttcagcctcccactagctgggattacaggtgagcaccaccacacccggcttttttttttttttttttttttttttggtagagatgggatttcaccatgttggccaggctggtctcgaactcctggcctcaaatgatctgcccgccttggcctcccaaattgatagaattagaagtgtgaaccactgtgcccagtcatgtttttatcttaggcagacagcatccagttttttattattatg

SEQ ID NO: 687713 - DNA, 588 bp, Homo sapiens
acacagcaacaagttaccacctttgaagcattgagtgagctctcatcaaacacttaatgtgcctatgctttgatcttggacttcccagcctccagaactggagaaataaatttctattgtttgtaaattaccgagtttctggtaatttgttattaccatgaagggacccagtagttagtaagaattattcttgggagtggagatctttctcatgtttaatatcttttatttattgttttatttttattttttgaaacagagtctcactctgtcaccgaggctggagtacagtggtatgatctcagctcactgcaacctctgctgcccaggttcaagcaattctcatgcttcagcctcccactagctgggattacaggtgagcaccaccacmcccggcttttttttttttttttttttttttttggtagagatgggatttcaccatgttggccaggctggtctcgaactcctggcctcaaatgatctgcccgccttggcctcccaaattgatagaattagaagtgtgaaccactgtgcccagtcatgtttttatcttaggcagacagcatccagttttttattattatg

SEQ ID NO: 687714 - DNA, 1192 bp, Homo sapiens
cacagttttaaatcaatgataatttgggatagttttaccattgaagtattgtgattatgtacacttacttttgcttttaaaactcataagaagagtaatgtcttacataatattatacatttcaattgcctttaagtctagtattaaaacttaattattagtgaaaaagtactatacaataaaatagacggttttacaatttctgttaatattttattctaaatgttcagatatgaagaatactgtatgataagaaaaaagatgttaggatgaatccctgagaaataaggaaataaaactctttgtctatatataatgctcaagctattgtatcagactgttcatggtaaaaggagaggtcattttcatacgtactttctgacagaatgaggacattcctgttatccctgattagttcaataacgtcccatggcattttctccattgatgcaacatggcaatgacagtcttatttgctgtttaccctgaccttctttttctcctcttattatatccctctcctttcataaacagatttaaagtaataagtatgttccaaactccaaaaataaaattcaatgtgtttctgtcttacaattsaaaagtaagataattcccattaacattcccacttacattttgctttcaaaatgtgcacttaaaaaaaaaaaagaaaagctctggattcttataaaaattactatccagttaggtaagactgggtttgaataacaattcaatcagaaatgtactttatttgtattaaatttttgtgtatacaaactggatctatgtctattatttgtgaaattcaactatatttacacaatgtaatctataaatagcaaataggctttgaagtatatttgtaaaaaatatgtgaaataaatatacaaaataacatcatgtgttttaattttctatttgcatcatttgaaattaattatcaggagtattaaaagtaacattgaaaatcttatatttacataataaaagtgaaaccattgttttcacacacaaacaaatacaataattgttgtagtctgcttagtccctgcttcagctaggtctaagttcttgtcccgtgaccaagaagaaagaggcaagtggacacccgagagtgagtataattgaatttattaagcaaaaggaaagctcttaataaagagaggggatgtaaaagcagcttacc

SEQ ID NO: 687715 - DNA, 586 bp, Homo sapiens
cattaccaatgtttaagtattattttatcttcactattatcataaattgcactaaatcctatatgaaaacaagtaaggtataagacaaaacattacacgtgtatgagtgtatatgtgtatgcattgtacatctatgcacatagatcttgtataggatataaataaaaatgtgtattctctgtgctttgtagtgtatccaaacacagatgaggtatttcttggtataattttacatccgtacttaagactgtgtttgtacccatgtaatttagtgacagtttcatgcatgttaaatttagtgacagtttcatgtaagtctggccgggcgtggtggctcacatctgtaatcccagcattttggggggccaaggtgggtggatcacctgaggtctgggrttcaagaacagcctgaccaacatggagaaaccccgtctctgctaaaaatacaaaaattagctgggtatggtggtgaatacctgtaatcccagctactcaggaggctgaggcaggagaatcactggaacctgggaggcagaggttgtagtgacctgagactgcatcactgcactccagcctgggtgacaca

SEQ ID NO: 687716 - DNA, 682 bp, Homo sapiens
ttttaaaaatttttatttttaattcaaatgtaataattgtacatatttatagggtacaatgtgatgttttgatacatgtatatattgcgtaatgacaaaatcagggtaactagtacactcacccacctcaaagattaatttttttttgtggtgggaacatacaaaatccctctccttctagctattttgagatatacaataccttattgttggctacagccaccctactgtgcaatgggatgygagaatttattcttccttgttaattttaactttaaaagtttatttttggccgggcacggtggctcacgcctgtaatcccagcactttgggaggccaaggcaggtggatcacctgagatcaggagttcgagaacagcctggccaacatggtgaaactccgtctctattaaaaatacaaaaaaattagtcaggcatggtggcaggcacctgtaatcccagctacttgggaggctgaggcatgagaattgcttgaacctgggcggcagagtttggcagtgagccgagatcacgccactgcactgcagccttcacgacagagcgagactctgtctcaataaaaagaaaacaaaaagtttatttttgttgtaacattcttttattatttctagaggcatgtaacaatgtgctatgtaacaattcaagactgtggcccagatgaa

SEQ ID NO: 687717 - DNA, 682 bp, Homo sapiens
ttttaaaaatttttatttttaattcaaatgtaataattgtacatatttatagggtacaatgtgatgttttgatacatgtatatattgcgtaatgacaaaatcagggtaactagtacactcacccacctcaaagattaatttttttttgtggtgggaacatacaaaatccctctccttctagctattttgagatatacaataccttattgttggctacagccaccctactgtgcaatgggatgcgagaatttattcttccttgttaattttaactttaaaagtttatttttggccgggcacggtggctcacgcctgtaatcccagcactttgggaggccaaggcaggtggatcacctgagrtcaggagttcgagaacagcctggccaacatggtgaaactccgtctctattaaaaatacaaaaaaattagtcaggcatggtggcaggcacctgtaatcccagctacttgggaggctgaggcatgagaattgcttgaacctgggcggcagagtttggcagtgagccgagatcacgccactgcactgcagccttcacgacagagcgagactctgtctcaataaaaagaaaacaaaaagtttatttttgttgtaacattcttttattatttctagaggcatgtaacaatgtgctatgtaacaattcaagactgtggcccagatgaa

SEQ ID NO: 687718 - DNA, 1535 bp, Homo sapiens
  misc_feature 789, 790, 791, 792, 793, 794, 795, 796, 797, 798, 799, 800,801, 802, 803, 804, 805, 806, 807, 808, 809, 810, 811, 812,813, 814, 815, 816, 817, 818, 819, 820, 821, 822, 823, 824,825, 826, 827, 828, 829, 830, 831, 832, 833, 834, 835: n = A,T,C or G
  misc_feature 836, 837, 838, 839, 840, 841, 842, 843, 844, 845, 846, 847,848, 849, 850, 851, 852, 853, 854, 855, 856, 857, 858, 859,860, 861, 862, 863, 864, 865, 866, 867, 868, 869, 870, 871,872, 873, 874, 875, 876, 877, 878, 879, 880, 881, 882: n = A,T,C or G
  misc_feature 883, 884, 885, 886, 887, 888: n = A,T,C or G
ggcaacaaagcaagactccatctccaaaaaaaaaaaaaaaaattagtatgtacacattcatgcttttattattcaaagatgatacctgtgatacatatgagtacagctaacaaggttagctgacgtaggatcagttctcaggtatttgagtatctaaagagaccttttgtgactataacttagcttgtggtttatggctccacttcatagtctatacaaagccttcattcataatcgtagttctgtttctgattgcttgctataaagttttttatcaattctgagtcatttatgaatttctatgtgttggtgttggtgtatttctaaagcagtctgtacatacggttttttggtttttagaagaggaggcatgaaacccattttaaactcaagaaatcaattttaatggattaggtaktttggctaaattcatggaactggaatatctttggttcagggcgaaaaaccccaattagggtaaaatttgtttgatgaaataattgttttggctgggcactgtggctcacacctgtaatcctaccactttgggaggccaaggcagaaggatcacttcggtcggggagtttgataccagcctgggcaacataacgagaccctctctctacaaaaaataaaaataaaaaaattatctgggcatggtgtcgcacacctgtagtcccagctactgtggaggctgaggcaggaggatcacttgagctggggaggtcaaggctgcagtgagctataatcatgccactgagagtgagaccctgtttcaaaaaaaaaaannnnnnnnnnnnnnnnnnnnnnnnnnnnnnnnnnnnnnnnnnnnnnnnnnnnnnnnnnnnnnnnnnnnnnnnnnnnnnnnnnnnnnnnnnnnnnnnnnnncccaagcagctgggactataggcatgtaccaccatgcgcagctaatttttttttcttttttttttttaaagagatggggttttcccatgttgcccaggctggtcttgaactcctggactcaagggattcacctgccttggcctcccaaagtgctgggattacaggcaggctgtgttctaataaaacataatttacagtggtgggccagattttgaccatgggtggtattttacaacccctgttctagattattgaggtcccttctagcttttcagttctgtgtgtcttgtgctcaagtagaagacattctaacctgttgagaatccccttgaaatactcaatatgaaacatacttctcaaactgtccttaatttttgagtgtatgagtggcagtatcttaatcttataacagaatgagttaataagccagaattgctgtttatgtccttagtaaacatgccctgtttaatctgcctaatattattatttattttagacatcataatatctatggaccaaataataatcatttgatttttcattctagaaatgtgtgttctgcgaatgactcgagctagacgttcccaggtagaacagcagcagctcatcactgttgaaaaggctttggcaattctttctcagcctac

SEQ ID NO: 687719 - DNA, 401 bp, Homo sapiens
ggctcacgcctgtaatcccagcactttggaaggccaaggcgggtggatcacttgaggtcaggagttcgagaccagcctggccaacagggtgaaaccccatctctccccaaaatacaaaaattagccaggtatggtggcgcatgcctgtaatcccagttactcgggaggcwtgagtatcacttgagatattgcttgaacccgggaggtggaggttgcagtgagccaagattgcaccactgcactccagcctgggcgacaagagtgagactccgtcgaaaaagaataagaagaatttgtggtgtaagcctctgtgtccttgcgcagactgcccccttagtgtcccacagtttttgtggaattactgcccttcccagaatgttcacaaaccctgaacacagacg

SEQ ID NO: 687720 - DNA, 401 bp, Homo sapiens
ggctcacgcctgtaatcccagcactttggaaggccaaggcgggtggatcacttgaggtcaggagttcgagaccagcctggccaacagggtgaaaccccatctctccccaaaatacaaaaattagccaggtatggtggcgcatgcctgtaatcccagttactcgggaggcttgagtatcacttgagatattgcttgaacccgggaggtggaggttgcagtgagccaagattgcaccactgcactccagcctgggcgacaagagtgagactccgtcgaaaaagaataaraagaatttgtggtgtaagcctctgtgtccttgcgcagactgcccccttagtgtcccacagtttttgtggaattactgcccttcccagaatgttcacaaaccctgaacacagacg

SEQ ID NO: 687721 - DNA, 627 bp, Homo sapiens
catattaaaaggatatacttatgaccattttaacatttcagagcttagtggaagtccttgaaagtgaaagtttcaaatgcacaggtacttaaattttgtctccaggcaaagtatttacatcaacaacacttctagttaatagttggggctttccaaaagagaactaatcagtggtttcatcaatgttttcattttttaagggctttaaaatcagcgactgtgttttccaattttcaaggaacatggtttagacttagtgggaggcttgtgacaaagctttctctgctgtgcgggcagctgcagacaggacagaagaggtttctgcagcctactatgaaggccctcactgctgggagaaggtggacaggcagagggactgcctgcctcgtggaagtgtctggcgccttcactgctgcccaggtttaggttttatagyagatgcttcctatttgctgtgcgatccttatgcaaacaatccttacaacaggctctctgaggaaaaaattttgtgtttttttgagtagtaccttaacatctgacttcagtttgttccctttatttctctcttccattctgtttatactgttaggttggtgcaaaagtaattgcagcttttgccttttgaga

SEQ ID NO: 687722 - DNA, 1394 bp, Homo sapiens
taaggattatgaccacaagaactttactcaactttggattcctacagatggtccatgtgtttctgttctgtcacgtattagtctcatgactatgggtaactcaatccctatgaccctcagtttcctcaggtgcaaaatagaccttcatcggtgtgctgaggataaatgagattatttcacacggttctatcatgttatcattcccaggcagctactgtggagtatttagtattgagtcggcctttagataaaaggaataagtgtgtatgtgagtctcctagtctaaaacctctggagaggtaagctaaaactttaaagagctaccaaaggggaagggagaaaaaaaagaaaatggcaagaagagacagcagggaggtagcgggagtttccctggggcaggagtctgacaaggggcactaaagatgaatgggaaattggctgctttccagaaatttagtccatgaaaatccgaatttacaaagaaagacaccccggggaagatcattcacttgtttgaaatattctttactttataagagggtttaccagagaattcctaaaagtgacaaactctcctagattaaataagaattaaatgataaatttaaatcacaaatacattttgaacacatttactgttaagaaaggtatgcctgcacctttaaagaccacaattacttgacccaaacccatcatcacctaatggggtttctttcctgtcttacctgaagaagaatattgttccaggatcaccttcttttgcagaattttccacacccatcaccaaaatatttgctgcatctgtgatttaaaataaacgaacaaaaaagctatgtcaaggtaacacaagttgtaagagtcacctataaacactgtaataaagtacttaagatcatttctttatataccatggagtgctctgtaacacaatcaccatctttctactaaggcctctgaaaggatttaatatataaaaatgcaaatacgaccaccaaaaaaagatcagcaattacttttataaaacattcaacaacctgtgatattaatattagagctcattcatgcccattttgattcaataatcactagtccagataattaataaagtcttaggttccatacaactaagtgtcaagaattaaacttctttctacaaaattaaaaataaaatttgaagaartattaatatattctcttcctataaataccatttcattaataatgcaattttaacattcccaaactactactcctgctgaattttaaagtataaaaagtagggcaatagaaaatacacagaaataaagatactgaccacttcaaaacatatgtgatttcaaggttaatcactacaggggctaccactgcagccacctgcaactatttaaaaaaaa

SEQ ID NO: 687723 - DNA, 611 bp, Homo sapiens
tgccttttctgctattttaaaatggttatacatgtttttattttatcagtataatgaattgattctttgaatgttaaccaatttaatattcaatccactcacattgtattatcatgcttctatttctggattcaattagctataattttgataaatatctttatgtttgtgaaaaatattcgtctatagtttttggattgtctgttaacttgattaaattgtctgtttttatttgacttttttaaaaaaaattagggtaatgcctcataaaatgcgtcagggagtgttttcttctctactattttctaagagactttatgtaggaatatattgatattaaattttccccttaaatatttgatgtaattcaacagttaagacattacagtctggattttttattataaagatgttttaagttaccaattcattttaatacttgaaagcctatttatattttctgtttcttatatcaatgaatttatcaactttaccttagttacacaattaaatagcaaaaaattattcacartattactttaaaaatatctataaggtctatattgaattttttcatttgtgatacttattatctcctgacatctcttctt

SEQ ID NO: 687724 - DNA, 926 bp, Homo sapiens
caacttggaaaaattatctaaaccattttgaactattgatgatgatctgttacctgttcattgtttttggtaacaaaaacattacgaaaataggatattgtattttgccccatttaatattattaaatataaccttcgctcaggagatgttagccttgtaagctgaagctgtttttttgaggaggtaaaacttgactctagtctaccaaacatagttccgaggcttgaggaatatatgtttattccataaacatgtattataccaactacttttcaggcaatctactagttttgacggttccagagggattaagacctatagtctgtgacttcatagagtttacaatgtaagcagaaattagacagaaaacagataattttacaactaattatttaattaaaattgtgatcatggctatgaatgagtagcgtatgatctcaggaatatgatatcaggatctaatctagtttagaacatctaggaagacttccagagtatttgaattcaatttagaacatgaaagatcaatgatwgttagctgggtgaaggagggagggctattctggcaagagagagaattgaagtgttgaaaagagaatattcgaagatctttggcagaaatgagaatggcatattgaaagaactgtaatgtgaatggatgatagaaagggagaggaatgacagagtggtaagttagggctaggctatacaggaacttgttagggattttggacttcaccttaagaacaaagggaaagcaccaaagtttttgaaacagggaactgacatgatcatatttgcacttttaaaagaatagtcttcttgtttctgtgaagaatgagtaggaggagggcaaaattggaaaggattcagtgagatcaattagaaggctaggaattgctgctgtatctgaaagctgaggata

SEQ ID NO: 687725 - DNA, 1204 bp, Homo sapiens
tttcatttgtgcatttgagtctagaaacattcttcaaaatataagactcattaccacaggaccatataaagtagttataattcagctcaagatgtccaactttttagagtcatttaacatcaatgtattcctaatattgccaactgattcattaatgaatagatctctcctagaacacaaataatgatctgttattaactcttttgcaccatgtttttatttgctaatcactctcctttacatttgaaatgagaaaacaagcttttcttattttaggctagttctttttaatcaaatacaactaaatgtcattttatccccaatgttcttcaaatatggacagacacagacaccacatttcacaggtcaaagggacataacagactattccaatccctccttttacttatgaggaaaccaaggcctggagaggttacctggtcgctagttggggcaaagctaatagtaaaatgtagatcctatgtcctttccacatcatgttgtaaacttccccactgaaattacataatcacattgaaataaaaacaawtgtttcttcaaaaagttttctctttcttaatatgaagatagatacatatggaaacattgttcctatacaaggattcctccaatacagttaaaaacaaccagtgttctaccaacctaattttttaagtcttttaattcaaacctgctaattaagtctccaagaaagataattattttgtatatgatttagtataaatgtccacctattatctgtaccagttactgatgaagactgacttactgacaggttatagattccaatttgattttgaaatttaaaaatgatttttaaaatcatagactcataggtggttagagcaatcaggacccatggaaataatgcacatttaattcctttattgtacatactgttccacctttctaaagaatacatagctctatactttcatacctttcaaatttgatatcctttaagactcatctcagactcctctctggagttggagattgacagaaatcaaggcatttgcccaagatcatcttgcagagactagataatttttttttaatccaatcattctaatcattgaaattttcacactgtaacaacactgtcgaaaatgaacatgaaaacatttttagccataacagtatgagggcagatcttaaaatttcattttcctaatgttgctta

SEQ ID NO: 687726 - DNA, 1235 bp, Homo sapiens
  misc_feature 618, 619, 620, 621, 622, 623, 624, 625, 626, 627, 628, 629,630, 631, 632, 633, 634, 635, 636, 637, 638, 639, 640, 641,642, 643, 644, 645, 646, 647, 648, 649, 650, 651, 652, 653,654, 655, 656, 657, 658, 659, 660, 661, 662, 663, 664: n = A,T,C or G
  misc_feature 665, 666, 667, 668, 669, 670, 671, 672, 673, 674, 675, 676,677, 678, 679, 680, 681, 682, 683, 684, 685, 686, 687, 688,689, 690, 691, 692, 693, 694, 695, 696, 697, 698, 699, 700,701, 702, 703, 704, 705, 706, 707, 708, 709, 710, 711: n = A,T,C or G
  misc_feature 712, 713, 714, 715, 716, 717: n = A,T,C or G
gacatacaatcgctccttgtaatatttttcactgcctagttggcattgatcaagtgttttctctgttgctaatgcaaaggtggttagaatgaagattttcaactcatgacgtttctcttgtacctctgcatgctaaattctgtttgtcttgagaaagcaaggaaaagcagaattcctttaaatgctactgcatttcatgaatgtcagttgctaggagcacctttctttcttttttttttttttttgttgttgttgcttttttgttttttgtttgttgttgttgttgttttgagatggagtttcactcttgttgcccaggctggagtgcaatggtgcaatctcagctcactgcaacccctgcctcctgggctcaagcgattctctgcctcagcttcccgagtagctgagattacaggcgcctgacaccacgtccagctaatgttttgtatttttagtagagatggggtttcaccatgttggccagactgttctcaaactcctgacctcaagtgattcacccacctcggcctcccaaagtgctgggattacaggtgtgagccacmgcgcctggcctgggagctcctttctaaatgggagtgtttcatgacttgtcaaatnnnnnnnnnnnnnnnnnnnnnnnnnnnnnnnnnnnnnnnnnnnnnnnnnnnnnnnnnnnnnnnnnnnnnnnnnnnnnnnnnnnnnnnnnnnnnnnnnnnnctggttagaataaaatgtgcaaagagagacctgtgtgtgtgtgtgttgaggtggggggagtggggtacgcatgcgtgcttatgcacacttttggaatagagatagagaatgctgtactatacttcataagtggagtatacttgaacttgtaaggttcaaatgtccatatgcctcttttattttcaagctgattgcgttaggtgtatatttaagctttctatacttccaaaacctgtcttgcctgtttctcctctctgtgaagttttctatgactgtttgaatagtgctgacatttcatagtctcagggtttagtagcaacggcaggaatggggttagcttccccactcatttcagggggaagggttcctttcttccttactgagatttccctgtcactgagccctgttgttttgctagcagaaggcctctgttacaatgctatgttacatggcattccttgtatctagcattaattgaatcctttggttaatgaaaataactgcccagttgagccagt

SEQ ID NO: 687727 - DNA, 616 bp, Homo sapiens
ctgattctttttgatttactgtctgtcatgtgcaatctgactaatgtattgaggtcarttattgcactgtctcctgatgccaataattctcacctaccctcatgtcatactgtctataatctgggttgcttatttagctatttggtatccacgagatctagaggcaatgggaaattcattttgtacatcttatgtttgatatttggttcaattcagccctacatatatgaattacgcacctcctatatctgagatactgtgttaggttttgggatacaaagataaacaaaacatcctccccttctcaaagctttcagtccagtgtaaagtatatcattaaagatctcctaaagtaagagagaacccacacattaattgggttaataaggtaataaggaaagatattatttcatatgtcataaggaaatctattatgttaagatatcctgaggtagggcagctcacacacaatacttgaaggctccagtttctcatcttggtaattgccttgtttaaaaatcagctctctgtattggcttcatcctcattgtggcaacaagatggctcaaccagagttaagctaggtttcccagaagccccctcagtagatatcccc

SEQ ID NO: 687728 - DNA, 1068 bp, Homo sapiens
aagagcctgagggaaaagcattagaacccaaaagaagaccagtatggctctctgtaatgaggcaaaacataaaacaggaacacagacaaaagttatgcagagtgacagagcaatccttacagtcagatctcataatgtgacttgtttactaatttaaccatcattttctctgaacaagttgagacttcaccgcagatagaatgaatatagagatgttgggatacaaattgagacagtggcctaggattgcctgtcgaagcagttcttgttcggaaggacataagagtgaatgaaatggaagggctgggtttcacctggggacacccattctcagatttctcagcggattaaaaccctaaagctttctgcagtagaaactggaccacaaacaagcttccacactcttctaagctgtggggagggccatgaacgaagtaccaaataggaatccccttggcaatggatacaaccaatttcatttgctgtataaacaattcatgtggattgaggacagctcgggtggaaaaaattcaacaattattgcatttgggcttcttcccttaagatttatttgttccaagtawttttttttctttctttaaatccaattttaccatggtgccttgaatgacttctgtagaaatactagaattctgattatactgcattgccttttgctgtcattgtattgccatttctttactcttttaaaatagcttatatatatatatgttacagtatgcagtatatgtttggatatcatagactatgtcaggatggatacacaagaaactaggaagtttgtatctttgggcaggggaaaagggcagaatggctacttggttgcataacgctttcctgtggggttaagatgaaaaggactctttttctcaaagccatgagttatggcttatccagcagagccctggctagattacagcccccactcactgccttagccaggtgccttgtgcaactggcatcttgaacaatcttacatggcagccctggaaataaggagctggggaacaaggatgtgagggaggcttacatttcattgctgaataa

SEQ ID NO: 687729 - DNA, 883 bp, Homo sapiens
cagtgagccgagattctgccactgcactatagcctggagagagagcgagactccgtctcaaaaaaaaaaaaaaagaaaaaaagaaaaaaagaaaatgcttggttgatctccttaaagacacaaatcttgtatttcaaaagaaatatggcaaagaaacttacaaaaccaaacttatccataccaactatttctgtccatctttctacctatttacctgtacatctgtcatctatctgtcatctatttttctcacacacagtagaagcagatgtcattttccttcctgcagtgyttcacatgcctaagagccctaaggaggaggtttgaagggctatctttatatttttcagaaagaagaaattgaatgaatagaagacttccatttcatgattaagtcagcctaagatgaatgctattttggggaacctttgcaaggtcaatttgttgagaaatagactgagagagctgggtttggtgacatgcacctgtagtcctggctacgccgtaggccaaggcaggaggattgcttgagcctgcaggttgaggctgcagtgagctatgatcatgccactgcactccagcctgggtgacagagcaagaacccgtctctaaaaaaaaaagaaagaaagaagagaaaaagaaatagataaagatatccatttcagggaaacttgttaaatgagccacaaatggttacaactttaaatttataaagaagacatgaggccgggcacagtggttcacgcctgtaatcccagcactttgggaggctgaggcgggcagatcgctttaggtcaggagttcaagaccaggctggccaacatggcgaaaccctgtctctactaaaaatacaaaaattagccaggtgtgatggtgcatgcct

SEQ ID NO: 687730 - DNA, 641 bp, Homo sapiens
ttattttttaaatcctactgggtgttaggtgatatctcactgtggctttaatttgcatgttcctaatgactaatgatgttgaggtttttttttttttttttttttgagacagggtctcactctgttgcccagactggagtgcactgcagcctcaacatcctgggctcaagtgatcatcctgccgcagcctcttgagtagctgggactacaggtacatgtcaccatttaggaagctgaggcaggagaataactttttacaattttttaaacaaaaaatttaaaaaaagtgatccttctaattctgtgtgtgtgtgtgtgtgtgtgtgtgtgtagatagggtctctattgcctaggctggtctcaaactcctgggctcaagtgatcctcctgccttagcctcccaaagtgctgggmtcataggcttaagccactatacctggccccctgagcatctttttatgcacttgttggctaggactgttgactccattttactggtaaggaaatcaaggctcagagaagataagtgacttgttccacattacacagtccaacactcctttttccttctaatacacctcggctacctccctggaaggcaggagcctctcagcagataagcatgaaactcagccctagtt

SEQ ID NO: 687731 - DNA, 648 bp, Homo sapiens
caatgagaatgtaaattagcacagccattttggaaaacagcatggagtttccacaaaaaaaaaaaactaaaaatagaacgaccgtatgatccagcagtcccattactgggaatttatccaaaagaaatgaaatcggtatgctgaagggatgtctgcactctcatgttcgttgcagcattattcacaatagccaagatatagaatcaacctatgcccatcaatgaatgaaagcataaagaaaatgtggcatatatacacaatggaatactattcagccttaagaaaaaaaaaagagggaaaagtgtggwtggggaaatgggagctgttggtcaatgggtacaaagttacagttaagaaaaatatgctctggtgttctgttgtgcagcaaggtaactataatgaatgataatatagtgtatatttcaaaatagccaaaagaggattttaaatgttctgactacatgatatgataaatatttgaagtaatggatatgctagttactctgacttgatcatttcacaatgtatacatgtatcaaattatcactgtgtaccctttaaatataattattactcatcagttaaaaataaaaaactcgaatggaattagtgcatggacaaatagatgtaaataatccaatggaacag

SEQ ID NO: 687732 - DNA, 648 bp, Homo sapiens
caatgagaatgtaaattagcacagccattttggaaaacagcatggagtttccacaaaaaaaaaaaactaaaaatagaacgaccgtatgatccagcagtcccattactgggaatttatccaaaagaaatgaaatcggtatgctgaagggatgtctgcactctcatgttcgttgcagcattattcacaatagccaagatatagaatcaacctatgcccatcaatgaatgaaagcataaagaaaatgtggcatatatacacaatggaatactattcagccttaagaaaaaaaaaagagggaaaagtgtggttggggaaatgggagctgttggtcaatgggtacaaagttacagttaagaaaaatatgctctggtgttctrttgtgcagcaaggtaactataatgaatgataatatagtgtatatttcaaaatagccaaaagaggattttaaatgttctgactacatgatatgataaatatttgaagtaatggatatgctagttactctgacttgatcatttcacaatgtatacatgtatcaaattatcactgtgtaccctttaaatataattattactcatcagttaaaaataaaaaactcgaatggaattagtgcatggacaaatagatgtaaataatccaatggaacag

SEQ ID NO: 687733 - DNA, 543 bp, Homo sapiens
ttcctggtgtagaggctcaccccgctgtacttcccaggaacaccaaataacaagtctgcaagcagaaaccagcaggtactgacacagaaatgacagctactgcagagccaccaaggacccctttctcacccccaccctgggaaacaaagggtaaaccctgatctgcctaagcacacatcaaaaagacggtgaccaatgggcacctttacaggtctgaagggaacttgtactggggctacctttgagtgtggctgaagtctgcagggttttaggctcgtgctggtggatggtcccaatgatgtcaggatcagcatggaagcgttcccagtcattctgycagaagttcccaggggacagcagcaggcatccatgctcagggagtaggttcctgagcttcctaaggcctggcagcaggtcggtcacttgcagacacaactcctccaagctcctgatcccagagctgcacaggagacaggacaaggcacctgctgtgtctgccaccacagggcagacctgctgtacttaggggacatcctctgtctg

SEQ ID NO: 687734 - DNA, 616 bp, Homo sapiens
tagtactccatcctaaacatgtgtacagatgtatgtgtgggagcattttttagcaaacatgttcatcacaatacttttttttttttcatttttcttttctttttttttttttttgagacagagtctcactctgtcacccaggctggagtgcagtggtgtgatcttagctcattgcaacctccacctcttgggttcaagcgattctcatgcctcagcctcctgagtaactgaaactacaggcacrtgccaccatgcctggctaattgttgtatttttagtagaaacagggtttcatcatattggccaggctggtctcgaattcctggcctcaagtgatccacccgcctcagcctcccaaattgctgggattacaggcatgggccaccatgcctagccctcaatacttttgtaatagtgataaaaaagaagcaacctaaataacgaagatcaggaaaacattttctttcttttttttttttttctactcaccatggaatcagaaggtaaaatattttagtaagctaaaatatatccattaaattgaatattaggcagtcatttccaatcttgtctagggagaagatatacacagaatactatgaatatacatggaata

SEQ ID NO: 687735 - DNA, 616 bp, Homo sapiens
tagtactccatcctaaacatgtgtacagatgtatgtgtgggagcattttttagcaaacatgttcatcacaatacttttttttttttcatttttcttttctttttttttttttttgagacagagtctcactctgtcacccaggctggagtgcagtggtgtgatcttagctcattgcaacctccacctcttgggttcaagcgattctcatgcctcagcctcctgagtaactgaaactacaggcacgtgccaccatgcctggctaattgttgtatttttagtagawacagggtttcatcatattggccaggctggtctcgaattcctggcctcaagtgatccacccgcctcagcctcccaaattgctgggattacaggcatgggccaccatgcctagccctcaatacttttgtaatagtgataaaaaagaagcaacctaaataacgaagatcaggaaaacattttctttcttttttttttttttctactcaccatggaatcagaaggtaaaatattttagtaagctaaaatatatccattaaattgaatattaggcagtcatttccaatcttgtctagggagaagatatacacagaatactatgaatatacatggaata

SEQ ID NO: 687736 - DNA, 616 bp, Homo sapiens
tagtactccatcctaaacatgtgtacagatgtatgtgtgggagcattttttagcaaacatgttcatcacaatacttttttttttttcatttttcttttctttttttttttttttgagacagagtctcactctgtcacccaggctggagtgcagtggtgtgatcttagctcattgcaacctccacctcttgggttcaagcgattctcatgcctcagcctcctgagtaactgaaactacaggcacgtgccaccatgcctggctaattgttgtatttttagtagaaacagggtttcatcatattggccaggctggtctcgaattcctggcctcaagtgatccacccgcctcagcctcccaaattgctgggattacaggcatgggccaccatgcctagccctcaatacttttgtaatagtgataaaaaagaagcaacctaaataacgaagatcaggaaaacattttctttctttttttttttttyctactcaccatggaatcagaaggtaaaatattttagtaagctaaaatatatccattaaattgaatattaggcagtcatttccaatcttgtctagggagaagatatacacagaatactatgaatatacatggaata

SEQ ID NO: 687737 - DNA, 381 bp, Homo sapiens
tgagttgagttgcctggtggtgagaccacttgtgtgcagatgaatctctttgagtctcattttgttcactgtgccaacctctyatgaacgttctaaagacttgccaagtattaagcactcaaaagttgctgctgttgtttatgataacaattacttgggggagaaagaaattcactggtggggaccttaaagaatatttcaaacatgtaacatttggtatggaaaatcttttaaactgaatttgttttagggcacattgaatactttactttccttttcctcagcatcaacaacagcaacttgtgattggcggtgaccggatattcagttgcacatccccacatcaatgcactgccaatggtaagactctccaactcccaa

SEQ ID NO: 687738 - DNA, 638 bp, Homo sapiens
tatctgaactatggcttgctggagagatctttctggcacaccrgggacctctttcatccaattatctttctgaccactcagctctccagcctgtactcctctctgtggcacatggctctgttatagtctaaacatacaaaggaactggactctcatgatgggattctgggacctttaacacttaagcagtaaagacatatttgaacagaggagtcttcccaggctcttcagcttactccatgtggccaattgttccctacacctatgcctaagttgcaccctgaccagatgaggccatctgattgaatgaatcataactttgggagctactttgtcgagtagcctcacggaaacatttccaaatgtagttttttctcaggttacttagaggctctcgcctggagccacagacttttagagctacatgtgatacagcatgtagggcaatttgcaaatagactattacagagtgagacagagaggcctttggtgcactcttctttagagatcacttgcccatcatctcaatcctcctgtgtcaaccttagtttttattctggctactttagtaattatttgccctcacacaaaacacatgcatttttgtgtttgtggatgagtggatcaatattacactt

SEQ ID NO: 687739 - DNA, 638 bp, Homo sapiens
tatctgaactatggcttgctggagagatctttctggcacaccagggacctctttcatccaattatctttctgaccactcagctctccagcctgtactcctctctgtggcacatggctctgttatagtctaaacatacaaaggaactggaytctcatgatgggattctgggacctttaacacttaagcagtaaagacatatttgaacagaggagtcttcccaggctcttcagcttactccatgtggccaattgttccctacacctatgcctaagttgcaccctgaccagatgaggccatctgattgaatgaatcataactttgggagctactttgtcgagtagcctcacggaaacatttccaaatgtagttttttctcaggttacttagaggctctcgcctggagccacagacttttagagctacatgtgatacagcatgtagggcaatttgcaaatagactattacagagtgagacagagaggcctttggtgcactcttctttagagatcacttgcccatcatctcaatcctcctgtgtcaaccttagtttttattctggctactttagtaattatttgccctcacacaaaacacatgcatttttgtgtttgtggatgagtggatcaatattacactt

SEQ ID NO: 687740 - DNA, 634 bp, Homo sapiens
gcacgttctgcgcatatatcccagaacataatggaaaaaaaaaaaatacagggtctcaggcttcacccagactcactgacagactctgtacttttatttatttatttatttatttatttatttatttatttatttatttttgagatggcgtctagctctgtcgctcatgctggggtgtagtggcaccatctcggctcagtgccagctctgcctcctgggttcaagtgattttcctgcctcagcctcccaggtagctggggttacaggtgcgtgccaccatgcctggctaattttttttttctatttttagtagagayggggtttcaccgtgttagccaggatggtcttgatctcctgacctcgtgatccacccgccttggcctcccaaagtgctgggattacaggcgtgagtcaccatgcccggcccagactctaacaagatcccagcaggttgtctgcctgctggatttcagtggaaccactccatgaatgatcaaagcagcagagagcagcacctgctacaaaagccccacctctcccttctttgcaggatgaaattctgtagagagaaagctcattttgacccatatatttttgttctttagtgccctcattacaaggtgattgcatgtag

SEQ ID NO: 687741 - DNA, 634 bp, Homo sapiens
gcacgttctgcgcatatatcccagaacataatggaaaaaaaaaaaatacagggtctcaggcttcacccagactcactgacagactctgtacttttatttatttatttatttatttatttatttatttatttatttatttttgagatggcgtctagctctgtcgctcatgctggggtgtagtggcaccatctcggctcagtgccagctctgcctcctgggttcaagtgattttcctgcctcagcctcccaggtagctggggttacaggtgcgtgccaccatgcctggctaattttttttttctatttttagtagagatggggtttcaccgtgttagccaggatggtcttgatctcctgacctcgtgatccrcccgccttggcctcccaaagtgctgggattacaggcgtgagtcaccatgcccggcccagactctaacaagatcccagcaggttgtctgcctgctggatttcagtggaaccactccatgaatgatcaaagcagcagagagcagcacctgctacaaaagccccacctctcccttctttgcaggatgaaattctgtagagagaaagctcattttgacccatatatttttgttctttagtgccctcattacaaggtgattgcatgtag

SEQ ID NO: 687742 - DNA, 634 bp, Homo sapiens
gcacgttctgcgcatatatcccagaacataatggaaaaaaaaaaaatacagggtctcaggcttcacccagactcactgacagactctgtacttttatttatttatttatttatttatttatttatttatttatttatttttgagatggcgtctagctctgtcgctcatgctggggtgtagtggcaccatctcggctcagtgccagctctgcctcctgggttcaagtgattttcctgcctcagcctcccaggtagctggggttacaggtgcgtgccaccatgcctggctaattttttttttctatttttagtagagatggggtttcaccgtgttagccaggatggtcttgatctcctgacctcgtgatccacccgccttggcctcccaaagtgctgggattacaggcgtgagtcaccatgcccggcccagactctaacaagatcccagcaggttgtctgcctgctggatttcagtggaaccactccatgaatgatcaaagcagcagagagcagcacctgctacaaaagccccacctctcccttctttgcaggakgaaattctgtagagagaaagctcattttgacccatatatttttgttctttagtgccctcattacaaggtgattgcatgtag

SEQ ID NO: 687743 - DNA, 1291 bp, Homo sapiens
ggtgtgtcaatccttcattatccaaagcagatgatctcacaggcacctgaacaatttttcttgaagcctctctaaaatgccagcatcaagtggaattccaggcatgctcaatttaaaagtctacatctagcgttataatattcaaaggtcagtcaggtttctatgtgataggtcaatgtgctcatgaaacctttcttgttataacactttgtagcataaatagcactttggttagtggcctgactcagggaacagacagtggtagcaagaaaagtaggtacccagtcaataaccatcctttgaaagacacagggaggaggcgcatttcctgcattccttctctagcaatttggacagggcagaggttctgctttgggcaagactagattagacctcctatctggaaccccaagtagataggttagaatagccacttataatcctcacagaaatcttgagttctgaaaagttctttcacggaaaaaaaaaaatgaaaaaaatcaaccaaaaaaaaaaagagtctttgtacatctatacacaactataaggaatatcaaaatagcacttttgaatattctgggattatgaagttttcaatcaccaawtattatcctacatgagaacctagagtgttggaacatacaggaacatgcagactttccttgtttttcttacattttatacaatttgattcactggcaggcagggctatacctgtggtatgagttccaggggcctcacggtgccctgtgtggctggaaatgagggaccccagagttagcagcagacgatggggacagagaagggacaagtcaggcagggctgatagggctttcactctgcatgaggtgggggtaggcagaactccatgaatggaagagtgacttgagccttcacttggaacctcacacggaagagtgatccatgaatgtccattcaactgtgcagtgaaagaaaggtatgagaccaaaaccaaaacaaaccctttagaataaaaaatatgtgatttactttacaagtgcaacctttatgaatttaacattctagttcatttttaaaatgaaacacttaacttcttttttgttgtttttgaggcggagtctcactctgctgcccaggctggagtgcgctggtgcaatctcagttcactgcaacctctgcctcctgggtttaagctattctcttgcctcagcctcctgagtggctgggattacaggtgtgtgccgctatgcccggctaatttttgtattttcagtagagattgggtttccatgttggccaggctggtcta

SEQ ID NO: 687744 - DNA, 592 bp, Homo sapiens
tataggtcatagaaacctatcgctatagtgacctatggtactatataatctgtatatatcgttatatgtatatcactttatatactatatatatcaccatagtgacctagtactgtaggtttacatgtactatattcgctatagtactatatgtacatataatcctacagtactaggtcatatctagtatttataggtcatagaaacctatcgctatagtgacctatggtactatataatctgtatatatcgctatatgtatatcactatatatatgtactatatatatatcaccatagtgacctagtactgtaggtttacatgtactatatgcattatagtactatatatacatataatcccacagtactaggtcatatctagtatttataggtcatagaaacctatcgctatagtgacctatggtactatataatctgtatatatcactatatgtatatcactatatatactatatatatatcaccatagtgaccttgtactgtaggtttccatatactatatkcactatagtactctgtgtacgtataatcctgcagtactaggtcatatctagcactaggtttatacg

SEQ ID NO: 687745 - DNA, 650 bp, Homo sapiens
agaaaaaagaacttctgtgtatcaaaggacacactcaacagagtgaaaaggcaacctatggaatgggagaaaatatttgtaaatcatatatttgatatggggttactgtatagaatatgtaaagwactcttacaattcagccaggtgtggtggtatgcacctgtaatcccagctacttgggaggttgaggcagaggatcatttgagcccagaagttcaaggcttaagtgaactatgatcatgtcactgcactctagcctgggtgacagagtgagaccgtctctaaactccgcgcctccctccaaaaaattatacacacgcacacacacacacttcttgctccttcttgctatccccatttcctctgccttagtttaaaaaattaagagagagaaatctgaattttggtttaaaagattgcctaatattatccccaaaacaatcaaaaacaatcttcaaaaagaagaacaaagctggaggactcatatttcttgatttatcttattccaaaattacagtaatcaagacagggtagtgctggcataaagacaagcatgcagaacaatggaatgaaatagagcccagaaataaaccctcctctatacgatcaaatgattttcagtaaaggtgccaaaactaactcctacaaca

SEQ ID NO: 687746 - DNA, 650 bp, Homo sapiens
agaaaaaagaacttctgtgtatcaaaggacacactcaacagagtgaaaaggcaacctatggaatgggagaaaatatttgtaaatcatatatttgatatggggttactgtatagaatatgtaaagaactcttacaattcagccaggtgtggtggtatgcacctgtaatcccagctacttgggaggttgaggcagaggatcatttgagcccagaagttcaaggcttaagtgaactatgatcatgtcactgcactctagcctgggtgacagagtgagaccgtctctaaactccgcgcctccctccaaaaaattatacacaygcacacacacacacttcttgctccttcttgctatccccatttcctctgccttagtttaaaaaattaagagagagaaatctgaattttggtttaaaagattgcctaatattatccccaaaacaatcaaaaacaatcttcaaaaagaagaacaaagctggaggactcatatttcttgatttatcttattccaaaattacagtaatcaagacagggtagtgctggcataaagacaagcatgcagaacaatggaatgaaatagagcccagaaataaaccctcctctatacgatcaaatgattttcagtaaaggtgccaaaactaactcctacaaca

SEQ ID NO: 687747 - DNA, 1457 bp, Homo sapiens
gagagattattgataccctttttcttgaggaaatctgggggtccaaaattctaaataactgagatgtgtcatctagtcacgttattatgctgagtgctccttatgcatcttggaaaataaggcccatttgaaaataatatctttaaaaattttggcacaagtttttatgacagtgttgattaaaaactcaaaaaagataaaagcatatgctgtcattttaaagcacagatgtctcccttcagagaaataacattctctctctctctctcctctctctttcagacagtgcctttggttatacactgaggaatgtaatcatttccaacactgagaagtattttcttacatagatgatgttaatstctaatgtagcagtttgtctatttcttctttttaggtcttcagcaaaaagaacagctggtctcaatcttttctatgtcagtttttcacatgcttggggacttaaaatggtgagctaggtcatgcctgtcaattacaatagcagacttgaattcatataaccttgtttcttttagttctctatgcctgagaaacagagggtggggaataactggtgtttggcagggtttaatacgttgccataatcttatttccaaacaaagtgtgtcctcatcagatttgtcctaattctttagcaaaatgcctcaggaaaagtacacaggataaccaagaaaatttcttctgtgcatggttgaagaaaattcacacacaaaaaaaggcaaacaagtccctctgactcttcctgtgttattcgtgttttgtaaaatgtgttaaatgcttgttaaacacattttgttaaaccctgtgacccttacgatcctgaattgctagcctttaggttcaaaaataaaggttttagggttttggcctctatggattagcttgatcatgtcaaccctcccataagtaacaataattaaacctaaacaaaaacagtagcaaacaaacaactatttgaaggtattgcagtgaccaaaaacaagcagaaactagagaagactgcttttgaaagataagctgcaataggtgaaacataccattttgtggctatttgcctaaaaaaaaaaaatacagtagaaagacacaaaactctatatgcttgaggtctcacagaatatagttctgggttgtcagaggggtcagaatgcttgggaaggaaatctggaaagtgaagggactaaggagatgatccctaaaacaagcgtccaaaatttacccagactcttggctaaccagtaaactatatatttacagggaagatccttgggggccagaataaaagcagcaggtggaggctaaaattactgcgtagagagtcagctaataccagtgtaagagacagagtttgactatcaaattaactgcctactagaatatttttttaaaatcattcccccccagataaacacagcaaaatccagaatctttaaaatgca

SEQ ID NO: 687748 - DNA, 1165 bp, Homo sapiens
tgggttactagataacttatatatatgtaacatcatcctcagacagctctctgattatcctacccaaatttttcttttggagcatcctgattttatgattttatatggatatatgtatgtaatcatagaaatggttatagttacagatgtaaatatagagaagtagaaagagtcctttcattgttttattggacacttcatattcaagaaattcttatgcttgcaagcttcttttctcttatgtctttctaagagggcatgataaacagttgtttactgccttttgaataatggactgtcacaaatgctacttctggtttcctcctttcttggctaaacaaccttagcccctttagacatttaaatgccatgagcagatgctcaataatattacttggtggttagccataatttataktgcttatttatggaagtagatgaaaacagaagtcttatgtatttttaaacttttctttcacatatggcgtactttacagagagtgaggatttggatgaatggatagatgaatgcagctaatattatcattttggtctcatctaaaagcggggaaacataggaaacattagaaagaaagctaaaatgcacaagatgctattttactattaactcagacttttcttatgccagatggtgttggaggaaagcttttgttttcttgatgataggcatcttcttttaattttgccaaccagacacagttcctctcttttcagcatgcagagacacagcagccatcttttatacacctcttagatacagtaactggtttggcatttcctggtgactgtgagtctgacaattgctcagaatttcatcactgcttcagtcatgtgtagaagatgctcccagagataagcataagacccccatcagtagagttattttaggctcagctttacttaaacagcatcaaattctaattgggcctaccagacttaatttaaggagctagagtggatgaacaacgatgtactgtgacatccaaaatatcaacacaacgttatatgtaatcacaagtatgtatctgtgtgtgtgtgtgcatgtgatgtatatggtagaggggagggcgatgtgggtgcaggttggtgggctgaagacatctttaaccttgcttttgtactatatcagataggtcttggtact

SEQ ID NO: 687749 - DNA, 643 bp, Homo sapiens
tgctgaggttyttttataaaatggcaacatgagctgggccagtcctggggtaacaatcctaggcccctccagcaaggactgtgggaaaagcataaggggcaaaatattttgtattaaaaatactttcctcatgcaggcacctctgcaggggtgagatcttccggtcaaagtggtagagcagaatagggggtggcaggtgagtttgttcatttataccattcctgtggctatttaccgaagatcaaagcctggcttgtcgagtaactcactttgcctttattcttctatttacaaagattaactgagcatggtaccttttcccttacctgtactgtccaactgaaaaagtaagagaaatttccaaactgtgcttgcttgaagtttttgagtgtctacaccactagttgccccatcacacatattgtatacagctcaagatttaacaagaagtgtctctgaatgaatgagcgagtgctgaactgtaagttcctttaggatgtatgggtgctgttaaaaatcctgtatattagagctcaatcaattaaccctaggcgtcagtatactcaaggtccttatacatcatctgggagattttcacaagtgagtcaggcctgggaggataaaatctctggacagtgtgtgt

SEQ ID NO: 687750 - DNA, 691 bp, Homo sapiens
gggtcttcatctttttttaatgcattaaaaaaacagctgctgggcatctcccttggaccggacatgaaacctttagaggacagaaagatgaatgcagtatgtttggtggcctccaggagctgagtctaactggggagccaagacatacatataaaaggggagcacgagcagaagcaaggctatatgtaaggtgagtaattcggacacagatgtcatggcagatgaaggaaggggatcaagaccaggcagggtacaagctatgtgggcaacggcaatgtctgctcttggtcaactactgatctgtttccatgtccactaaacacgtgttttcrtcagattctccctggacttcatgaaatctgtggtcctgacttaaatgtgtaagtaggtattttctgtacactcttctccagggaaaggtcattctcaccagtgagactaaacatattcactttacaacagagtctcaaggtagagtgtcatcatattttgccaagatgagtctaggactgtacagctggcccttgggtcccacggcaggttctgacactgaaatctgactgaagagctcagacttatgtagaaggactggaattgggacaaaacgtcttgatattaatgatgagaatgctgaggcggtagaagaaccatcatcatgacctgtaccccctcacatttcttccaggccaga

SEQ ID NO: 687751 - DNA, 581 bp, Homo sapiens
tccatcctgagcgatagaacaagactctgtttccaaaaaacaaaaagaaaaggtgatcacaaaattcaggaaatgtaaaatgtaatataaagaaatcatgattcaaagatgaaattagatatatagcagtttttaagccatgattggagtacacatttgccttaaatcagaaagatctacaaaacatgatctttgartgggctggaagccctgaaaccatgtgtagagatgaaaatgttactctagcataacacatatccccatagtaatgatatttgctgattttttaaacttataaattcaaatgatagaaatcaatggaaagtcacttgtgactaccagaaagaatggagatgtttgcaaccttaatcctgtagtagtaaaagttaggctgacagcaagtaggaactgggggtaaggaaagggaggagagttcgggtgctcatgcaaggggacagaagaagaaataaagctcatggacattacctaaaaattacaaacactctcaatgaagaaccaaaaataactataaaacactggaaatagtaaaaggaagtccgcaaaattggttaaccaagaaa

SEQ ID NO: 687752 - DNA, 1886 bp, Homo sapiens
tgattattgggggaaaaacagaaagaaaaagattaataaatgatcacaaatatgtttttttgtgtattttccaacctattaaaaatggtaaaaatgccttgcaatgggaaacacacatataatataaaaagtcagtaatctgatggtgcatctaatttacatatattttctgctctatgaaaggcaatgtgcggccgggcgcagtggttcacgcctgtaatcctagcactttgggagactgaggtgggtggattgcctgagctcaggagttcaagatcagcctgggcaacacggtgaaaccccatctccactaaaatataaaaaattagctgagtgtggtggcatacacctgtagtcccagctactagggaggttgaggcaggagaattgttagaacccaggaggcggaggttgcagtgagccgagatcgcatcattgcactgcagcctgggcggcagagcaagactctgtcaaaaaaaaaaaaaaaaaaaaagacagtgtgcttagggtgggtaatacagaagtaaataactatgtgatcacttctcagaaaggtctcataatccagtgaaatataggatgaaaatataagtgacaccagatattggaggagaagggaaatgatctcctattcccaaagtcaacagggacaggttacaaaagctgtttctactttgccccaggagaaggagcagaatgacatgcaaaatccaggatgcccagtcttatccttatttctagaatttaataatttataatgtgtttcaagtatactaatactcttcctagatactggaagaataatcacagttttaagaaacggtataacgtttgtttgtttgtttgtttttcttttccaagttaggatgacagtctgagagtttcaggaaaggaaataaagttgatatcccacacaagactgaatgagtattgttacttcttcttgtagcctctcatcactttggacagcagcatttccttcacattccttgcagaaggaaccgacaccatcacagtccaggtggctgctgggaatgccctcatccaggacacaaaagagattgcagttcatggtaagccctgaaaattgttctgtgatgctccttcccgctcagttaatctcctgtgtccactctccctacaatcattgagtgtggtggaaattcctcaggccctgggaaaattacataggtcaacaggaagcttccaaacctacctccgacctagagattgaggttataagagacgtataccacaaacaggtatttgttgtcccctgtgttatgtctgcctcagaacttgtttggggttcttattagacaaagacacgtatcacaaattgaaggaaatgcaagctgggaggtatctacaacatatatgcaggacacactctttgtgagatgaggaccagcaatttccaaaagtcaggagtcatgatccctgccttgtaggactcattgctcagttaatgagatgatctctattcacaacagatggctttcttgattgttggagatttgaatatcattggctgcaaaactagataataaggctaagaatataagttaggactagggcagaagagggtgaataggactactatcctgttctcaaccctggagaaccactgttaagtttattacaaatgaaagtgcctctactgccatttcacacaacctctcccaggtccctagacacaaccagtatcactgtggttttcttttcttttcttttyttttagatttttcattactagtttgatttctttaatggtaattggttttttggttttacatgtcttcatttcatttcttcatttcttcttttttttatgtattatactttaagttttagggtacatgtgcacaacatgcaggtttgttaca

SEQ ID NO: 687753 - DNA, 661 bp, Homo sapiens
agcagctttattcataattaccaaaacccagaagcagctaaaatgtccttcagtaggtgaatggataaattaactgtggtatatccagacaatagagtattactccgggctaaaaagaaatgagctatcaagccatgaaaagataagaaggaaactttaaagggtcttactaaatgaaataagccaacctgaaaatattacatactgtatgattgcagctatatgactttctttaaaaggcaaaactatgcagagagtaaaaaggtcagtgattgcaagggttaagtagggagagaatagaagattttaaaaatagtgacaatattctgtatgacactgtagtgatggctacatgtcattgtatagttgtccaaactcatagaatgcacaacacagagtgaaccctaatgtaaactatggactttgaatgatattgatgtgtcagtataataatggctcacaaatgtaccattctggtggyggatgtagataatgggggaggctatgcttgtgctagggcagatgttatatgggaaatatctgccccttcttattaattttgctgtgtacctaaaactgctctgccaaaaaaaggctgaaaaacctaaaaaaaaaagtgtcacaagctcattattttctttttcttttttttattttatta

SEQ ID NO: 687754 - DNA, 661 bp, Homo sapiens
agcagctttattcataattaccaaaacccagaagcagctaaaatgtccttcagtaggtgaatggataaattaactgtggtatatccagacaatagagtattactccgggctaaaaagaaatgagctatcaagccatgaaaagataagaaggaaactttaaagggtcttactaaatgaaataagccaacctgaaaatattacatactgtatgattgcagctatatgactttctttaaaaggcaaaactatgcagagagtaaaaaggtcagtgattgcaagggttaagtagggagagaatagaagattttaaaaatagtgacaatattctgtatgacactgtagtgatggctacatgtcattgtatagttgtccaaactcatagaatgcacaacacagagtgaaccctaatgtaaactatggactttgaatgatattgatgtgtcagtataataatggctcacaaatgtaccattctggtggtggatgtwgataatgggggaggctatgcttgtgctagggcagatgttatatgggaaatatctgccccttcttattaattttgctgtgtacctaaaactgctctgccaaaaaaaggctgaaaaacctaaaaaaaaaagtgtcacaagctcattattttctttttcttttttttattttatta

SEQ ID NO: 687755 - DNA, 674 bp, Homo sapiens
gattctagccccatccctgcctccaaactaaactatggtatgccaaggcaggtccttctcctctctgaacctcagttgccccacatgaaaaataagaggcttagctgagatgatctcaggtcctttcagctgtgatatagcagcaggagagagaacaggtaagctttgtccctggcgccccagagcccatgctgtgaggaccagagggaaggcagaggacaggcagggggaaggagacaggagtacccagggtcaaaaacatccttcctcttgccaaagttctctcgagccaaatatatatatatatayacacacacacacacacacacacacacacacacacacacacatatacatatatatacatatatatatatatttggctcaagagagtgtgtatatatgtatacacatatatacatatatatacgtgtatatatatacgtgtgtgtgtatatatatatatatatatatatttaattttttctcagaaattgtattttctaaaataataccaggcttattgtctgagtctgtagaaacagaaacacatgttttcatgttgccacatgtaatagaaaattagtggtgaaacgaagggaaaggagagaggaagggaaaggaggtccaaaggcagaagagagagagagaaagggtggagaagagctgaaaaa

SEQ ID NO: 687756 - DNA, 645 bp, Homo sapiens
tgtctcctcctttctctttctttgaaaatttagtaggtcaaactgggagtttttaaggagattttctatatctttttttcaggcttgaagacatcaaggaaatttggcactttcctacagtgtctttaaacatgaaataacatcccaaatctasaagtatataaagagacaaaaaaaacacaaatatttttgatatgcaaaattggaagaaaatttggaattggagggcgtgatagaaataggacaaccaaaataaagacaactattgggttgattaggattgctttttggagatgaaatgatacattagaattgcttctgacttttcttttgagcatggtaatatatgtccagaaaatcatcatagtttaatttccaagaaggatatatggatatataaaacatgtataaagcatttttatgcaagatgaaagcaggagcattggtaccacagtagaaataagaaaatgtcagataatctaaaaaataatttactttcttgagcccatcaaatagttaaggttacacggcaagcagggcaaataggtcaaagcagtctgaattctaaagtgatataagctcttccaaagagacctgaaacgcagaaaaatgtgtcccctgaagcagagaagttctggcccagaa

SEQ ID NO: 687757 - DNA, 645 bp, Homo sapiens
tgtctcctcctttctctttctttgaaaatttagtaggtcaaactgggagtttttaaggagattttctatatctttttttcaggcttgaagacatcaaggaaatttggcactttcctacagtgtctttaaacatgaaataacatcccaaatctacaagtatataaagagacaaaaaaaacacaaatatttttgatatgcaaaattggaagaaaatttggaattggagggcgtgatagaaataggacaaccaaaataaagacaactattgggttgattaggattgctttttggagatgaaaygatacattagaattgcttctgacttttcttttgagcatggtaatatatgtccagaaaatcatcatagtttaatttccaagaaggatatatggatatataaaacatgtataaagcatttttatgcaagatgaaagcaggagcattggtaccacagtagaaataagaaaatgtcagataatctaaaaaataatttactttcttgagcccatcaaatagttaaggttacacggcaagcagggcaaataggtcaaagcagtctgaattctaaagtgatataagctcttccaaagagacctgaaacgcagaaaaatgtgtcccctgaagcagagaagttctggcccagaa

SEQ ID NO: 687758 - DNA, 602 bp, Homo sapiens
caatggcaccatctcggctcactgcaacctccacctcctgggttcaatccattctcctgcctcagcctctcaagtagctgggattacaggtgcccgccaccatgcccagctaatttttatatttttagtagagatggggtttcattatgttggccaggctggtctcaatctcctgacctcaggcgatccaccctcctcggccttccaaagtgttgggattataggggtgagccaccgtgccaggccagtagtctcttttgatattaytgaacaattgacaaaaaagggggaaaaaggatgaataatcctctgaaagaaatagactcatctggtctcatccaagaagtgcacgtttccatttttggccatcatgttgacaactaatttttaaaatattaattacttatgttggagaggatgtgaatatacggacatccttttacatttttggtgggaatataatttgtcgtaatctttctaaaatgaaatttggcagtacatatcaagaatctttatagtatttatatccttcaccctagtaattatatttctagaaatttatactgaagaaataaccagatattcatctagatttatatgca

SEQ ID NO: 687759 - DNA, 602 bp, Homo sapiens
caatggcaccatctcggctcactgcaacctccacctcctgggttcaatccattctcctgcctcagcctctcaagtagctgggattacaggtgcccgccaccatgcccagctaatttttatatttttagtagagatggggtttcattatgttggccaggctggtctcaatctcctgacctcaggcgatccaccctcctcggccttccaaagtgttgggattataggggtgagccaccgtgccaggccagtagtctcttttgatattactgracaattgacaaaaaagggggaaaaaggatgaataatcctctgaaagaaatagactcatctggtctcatccaagaagtgcacgtttccatttttggccatcatgttgacaactaatttttaaaatattaattacttatgttggagaggatgtgaatatacggacatccttttacatttttggtgggaatataatttgtcgtaatctttctaaaatgaaatttggcagtacatatcaagaatctttatagtatttatatccttcaccctagtaattatatttctagaaatttatactgaagaaataaccagatattcatctagatttatatgca

SEQ ID NO: 687760 - DNA, 602 bp, Homo sapiens
caatggcaccatctcggctcactgcaacctccacctcctgggttcaatccattctcctgcctcagcctctcaagtagctgggattacaggtgcccgccaccatgcccagctaatttttatatttttagtagagatggggtttcattatgttggccaggctggtctcaatctcctgacctcaggcgatccaccctcctcggccttccaaagtgttgggattataggggtgagccaccgtgccaggccagtagtctcttttgatattactgaacaattgacaaaaaagggggaaaaaggatgaataatcctctgaaagaaatagactcatctggtctcatccaagaagtgcacgtttccatttttggccatcatgytgacaactaatttttaaaatattaattacttatgttggagaggatgtgaatatacggacatccttttacatttttggtgggaatataatttgtcgtaatctttctaaaatgaaatttggcagtacatatcaagaatctttatagtatttatatccttcaccctagtaattatatttctagaaatttatactgaagaaataaccagatattcatctagatttatatgca

SEQ ID NO: 687761 - DNA, 602 bp, Homo sapiens
caatggcaccatctcggctcactgcaacctccacctcctgggttcaatccattctcctgcctcagcctctcaagtagctgggattacaggtgcccgccaccatgcccagctaatttttatatttttagtagagatggggtttcattatgttggccaggctggtctcaatctcctgacctcaggcgatccaccctcctcggccttccaaagtgttgggattataggggtgagccaccgtgccaggccagtagtctcttttgatattactgaacaattgacaaaaaagggggaaaaaggatgaataatcctctgaaagaaatagactcatctggtctcatccaagaagtgcacgtttccatttttggccatcatgttgacaactaatttttaaaatattaattacttatgttggagaggatgtgaatatacrgacatccttttacatttttggtgggaatataatttgtcgtaatctttctaaaatgaaatttggcagtacatatcaagaatctttatagtatttatatccttcaccctagtaattatatttctagaaatttatactgaagaaataaccagatattcatctagatttatatgca

SEQ ID NO: 687762 - DNA, 614 bp, Homo sapiens
catatccatatatatatcctttatctcatataatatagacacatcacataaactagatatttttaatttccagaaattatgctactctgtaatgaaactgtccagaagcagacacagtccctttaactttaggacccatcagaatctttcttttaatctttctagactacctttttttctggaaaggcgaaattcaatctaattcctctttcagtaaaacagtgtcatatttcatttttattatcatttattcaaaaaatttgcaaacaaattaagaaacattgaggttgattccagtttttatttttagatatttatratgttgaacaggcagtgatatttattgatgctttcagtgttcttacatactttggtaatttctcataagttaaatgcccaagaaatagattgaaattggttacttttaatctgaatctgatgtatttatgaaggttagattgtgattatgaatttttacagaatatatttttctctctatcatccattgaggtacttaatatcactttattctttagcttataggtgttggatttttggtgttccttccagaaagttgctgagctttctctcacttttcaagggctctaaccttt

SEQ ID NO: 687763 - DNA, 597 bp, Homo sapiens
atgattagctgcataccagctttggcatagccactcttcaccatccctaycttgtctttccagcctccattctcaattgcatttcaatgtcaccctcaagcatccaggctacaggaaagaagtcctctccagtggattctttcacagtcaaagtaactcctgctggaaatgaaattctctcaaaaggcatacacatgaaccaaataggggtggctctttgttccccttctgaaacatagcaagtgctgatttccatctccatctcccatttaaaagtagatgtaattaaaattttcttcctgctcttccatacacaggcaccactctttgagagctgcttgcacaaaacctagaaatgaacatcagtccctgtttacacagcaaaaagcttatgaaccaagatctcagaccccttcttcatccttttcttttaatttcttctgttcatccagaagctgctgctgctcttgctgcagacgttgactgcaatttctagcacatggagttaattaattgccaatttggtcaaaacaatcagtcttgctgtatttgttttagcgtcttctcctttctagttatatacagaagaggaaacca

SEQ ID NO: 687764 - DNA, 597 bp, Homo sapiens
atgattagctgcataccagctttggcatagccactcttcaccatccctatcttgtctttccagcctccattctcaattgcatttcaatgtcaccctcaagcatccaggctacaggaaagaagtcctctccagtggattctttcacagtcaaagtaactcctgctggaaatgaaattctctcaaaaggcatacacatgaaccaaataggggtggctctttgttccccttctgaaacatagcaagtgctgatttccatctccatctcccatttaaaagtagatgtaattaaarttttcttcctgctcttccatacacaggcaccactctttgagagctgcttgcacaaaacctagaaatgaacatcagtccctgtttacacagcaaaaagcttatgaaccaagatctcagaccccttcttcatccttttcttttaatttcttctgttcatccagaagctgctgctgctcttgctgcagacgttgactgcaatttctagcacatggagttaattaattgccaatttggtcaaaacaatcagtcttgctgtatttgttttagcgtcttctcctttctagttatatacagaagaggaaacca

SEQ ID NO: 687765 - DNA, 1053 bp, Homo sapiens
ttcacgaagtttgatggttttatgttttacacctaggtttatgatccactttgagttaatttcatacagggtgcaaggtacatagctctaaaataagcaaacagtaataaatgaaagtggcagtaacacacagggaactgagaaacaggcaagaatcagagcacatactcacacagctgaataccccttcctgcgaaacttccctcagttaaggcaagtattgtgctttcttcatgaagaaatgcaggttggtaacaatgttaaggctttggccaattttcctattgtgtaaattcttcagctggcccattagaccaatgaaggggtgagggagtaccaagcacagccacagatcaggagtctgcccctgtctctggacatcatcacactgatgtcctagaaggttttcataactgtgccaacttgagaatttggaaaagagagctatctcctgccagcatgagagaaggttatggggaaaatcatacgaatgcaaaagtacttataacattcccctcatgaggttctacctcaagacctgcccgtgcctcatagtgattagtaacaactcaatctttatatcatgagtatctacacatgcctgaaaatcaactggaattatctgtgactggaaacaatatatcaggtgtattgatacatatttagcatgttcaagatgtcctagacttccaaatttatgatttactttagtgaagcctacatggtcagtttttgggagtgtggaaggaaggattcctgcaaggatgggaggctgggctgtgagagctcaaatccccgcaagggatgggcacttctgaaaacagaagtgtggtcgaatcccagctgagtcacttactagctatgtgacattgggccagttgcttcccttctctgagcttcaytttcttgatctgtaaaatagactacaactcattatcgtataggggttttgctactaggtttaaatggtactgtttaaatattaaatcaatgctacttccctcctccctactttccaaaaaccacatttatacactaaaattttattaaaaa

SEQ ID NO: 687766 - DNA, 1429 bp, Homo sapiens
atagtgcctgcctttaaaaaaagcactttggctcaggaaccatatttgacatcatatgctaaatctgttttaacccttttttacctagtgcttaattttaatgtgttttaaatcaatattagagtactaagatgctaaagagcacaaatgctttctttttttacttttcttttcttttcttttttttttttatttggagatggggtcttactctgtcacccaggctggagtgcagagatgcagtcttggctcactgcaacctccatctcccgggctcaaacgatccttccacctcagcctcccaattagctggggcaacaggcacgcacctaccacactcagctaattatttgtatttttggtagagacggttttaccatgttgcccaggctggtctcgaattcctgaactcaagtgatctacccatcttggcctcccaaagtgctggaattataggtgtacgccactgtgcccagtcttttttcttatgatgtatttttagcattggaatttaagtgttttgaaactatatcacactgtttttgaagaaactttatttctgatagtagtttagtttatatgatgaagcattttaatgaggagatgaagtcattcatttcatgatggttgtttgatgtctttttttcacagtttgttgaactgttcaggacagtgatcaagtgataccacgcagtggtccaaaaccagtctgaatatggccttaggctctgggttttaacaccgctagtctgtgaaagatcagttgccacagtttttggtttccacatatgtaaagattcgtcataattagcaagttcacccttagtaggctgtatcacctcttgttccccacatcccagatttcagtccgtccttggctctcggatgggaggccactctgattgcagccacagttcatgccccacacagacattcactgagcctctgcccagcgttctgacacagacttccacaaggcccacatctggattctttgtccacgctaacaccatcacatttaattaattaatatctttgtgaagctgggtttgaaacaagaaaggtttggactgtttcagtggatgttttgttcatataactggagcaggttttctttggtggttttattttgccccattctttattawttctggatattttcaagagtgtggattatccagatttgtggcttgttctccagcctccctcccattttgttacccactaagatgcatatcatggttgtcaggggccaaaggagactccactgagtcagcctcactgctggctggaagtggggtgcatgatttaagttaggagaaacagtgcaaacaagaccaccgcttcctatttgtgtcattgtctggcaagtgcctttgaagattttctttcattgttttctgtactttttcacagactctcatatttg

SEQ ID NO: 687767 - DNA, 694 bp, Homo sapiens
atggaaatttcgccacagaagaaattacttctagctgataggatcaaagaaagctacatagacaaaagagtggaaatggtatttaactattttcaaggatatgtaggatttgggcaggtagcaattagctttcaggaagaaaagaagacttattgtaggggagggcagtccatgccggggagtggcattcacaaaggttatgagtgtgaagtgagaatagctaaggttagcaggttcgtaggtgtacactcctgaccgttgagagaatgatcctggatttactgctcgttaatgaatggttaggaatcctagtattcacacattgatgkgctacagaaatccctatggagcttgttagaaatttctatccctgggaagctctccataccctgtggttagaagatctcagagatcttgccgtctctcattccctatggccagtgtccaccctgcagccagccactggggactctgtcgctgcctcttcctgagctgggaggcgatgctgggatgccagaaacacacaggagggaaatggagaacacttttctcagaagtataatccccaaatctcctcttaagccattacaataacatctcatattttatttaattttcttttaatggaaaaaccagttataccaaatgaaaacaaatgactgaagaagaactgaatgatgtttataagcctttt

SEQ ID NO: 687768 - DNA, 1138 bp, Homo sapiens
acctggtatatttaaaagcccaatgacagtcctgtgagacatgtaatagtaataagatactaattgctgtttatcaaatgagccttgtgtgccagggactgtgataggatcagaaaggttaaacagtttacccggagtcataaaatagatgtttaaaatagttgcagagtaggtacacaaagrtatgtcttttgacttgtctagatggaccccataatgcagaagaacgagtcttggccatttgcatactgacacttgggctagcaggccagaaggttctacaataggcctggcctcaaatatatttcacttgtaataagcaccatatggggtcctgccttggagctgagtcatacaagagtgcctagagtgccttttaaaggcctacagccatccaactcttagggaagggagtccgcattggacttgggtgctctgggaagtggtctggttcctggatcaattgttgatgaggtatatatttcaatcatgttttcccacggactgtggggaaggcggtgagggtggctggagacagggttggttggggagaaggggctgctgttggttgaacattagttacacagagctgcgtgctataaattctggctcactgaatcctcacgaccactctgagacttatattattaatatgtattagaaagaggacagtccgtggggtgctctgcctcctggactcctccgtcaggaaggttgttggttcagggccagccactgcttggctaacgcctcagtgcttcagcgacaaggaccaggccgtgggcacaaataaggtcttaggtctctcctctgtgcacatccaggagagagattttagggatagttcctactggcttcatcactctagggtttaaatctgggctttgctgcctaccagctgtgtggcccttccagtgtgaacctgtccagacctgagttttagtatacccacagtggggaaaaaagacctacatcacagggttattgttaggcttaaaggacgagacagatgcaaagtactaagcatgtggcctggcacaggggaagtgctcaggaaatggtagtgactgttaagactgtgatacttggaggctgaaccttaacaggatattatcctgacctgtcagtttagctcttt

SEQ ID NO: 687769 - DNA, 1065 bp, Homo sapiens
gaatttccatggagttgatgaagaacgtgccaggcgttcaaatgaatggggtgcagcctctttccttgtgtctgcacaaaggggaggagctctcgttatcctgtacacatgactcagcaatgtgtgcaggtattcccaggcccaggtgaggacagcagcgtgaggacagcactcagaggacaggagaacgccggtttctgtgcaatcttaacattgttgcaaaagaacccacacagggttttacagccaaccaaatgggtgccccttattgaaacaaagattgggatctgctgacggggactgccagctcggggtgggggtggggggacgaccaccatggcaggtccatttgggttaattatgtgtggtttgcccccaaatagagtgctcccttgtggagtttgagatggtgggtggccacctcaccggcagactgaggagctgtttcccaggggtcctgggcagagcagttgagtgctctgctctgcaaggggacctgtcacttgcgtgtgtttgcaaggtgccaggtggccgtatctgcaactcaggcatggtcttgttcagtcccctgattcagtgctctagcctcagttgcctgagggcctggactccactcctgagtggacagaaggatgtctgtgctgcaggaggcccacgmccatctgccttgccttgccccatgggagaggtgtgacttgctgaacctggggctcccgggaagaatcctctgttggtttcttcccttctgtcatggggacctatcccatttctgcaataactgcctgcctcccatcacacacttttgcgtgccttgcctgttgctacctgaggggagctggaatagaaaccctcttgcttcctgtgagtttggagacaacctcagaagacgaattgtgtaggcccctgaagttgctcctgagagccctgaagccgggtgggcctgtggattcccaggctgtctgcacagcccagcacttgtttctgaactccatgcttcagccctttctttgaatggcatgtgtggtcctaaaaagatagaggtatagagcataatgccagaggaaa

SEQ ID NO: 687770 - DNA, 1065 bp, Homo sapiens
gaatttccatggagttgatgaagaacgtgccaggcgttcaaatgaatggggtgcagcctctttccttgtgtctgcacaaaggggaggagctctcgttatcctgtacacatgactcagcaatgtgtgcaggtattcccaggcccaggtgaggacagcagcgtgaggacagcactcagaggacaggagaacgccggtttctgtgcaatcttaacattgttgcaaaagaacccacacagggttttacagccaaccaaatgggtgccccttattgaaacaaagattgggatctgctgacggggactgccagctcggggtgggggtggggggacgaccaccatggcaggtccatttgggttaattatgtgtggtttgcccccaaatagagtgctcccttgtggagtttgagatggtgggtggccacctcaccggcagactgaggagctgtttcccaggggtcctgggcagagcagttgagtgctctgctctgcaaggggacctgtcacttgcgtgtgtttgcaaggtgccaggtggccgtatctgcaactcaggcatggtcttgttcagtcccctgattcagtgctctagcctcagttgcctgagggcctggactccactcctgagtggacagaaggatgtctgtgctgcaggaggcccacgaccatctgccttgccttgccccatgggagaggtgtgacttgctgaacctggggctcccgggaagaatcctctgttggtttcttcccttctgtcatggggacctatcccatttctgcaataactgcctgcctcccatcacacacttttgcrtgccttgcctgttgctacctgaggggagctggaatagaaaccctcttgcttcctgtgagtttggagacaacctcagaagacgaattgtgtaggcccctgaagttgctcctgagagccctgaagccgggtgggcctgtggattcccaggctgtctgcacagcccagcacttgtttctgaactccatgcttcagccctttctttgaatggcatgtgtggtcctaaaaagatagaggtatagagcataatgccagaggaaa

SEQ ID NO: 687771 - DNA, 1125 bp, Homo sapiens
acacactcacacaccgaaaacattgataaaatcagccattccagcaaaactagctacttagtgtctatctctccttgaagattcaaactagaaatgaggatttagagaggcatgatggttcgttctctcttggagcccagttcgaagttgactgactgattcagtcattgtaattggttggtcttggggaagaatccactttgactcttgggaagtcagctaggtcagcggacagagcaggggctctggagccagactgcctgcacccgacttctagctatgataccttggataaactacttatcacctgggcttcaggttcctcatctgtaaaatggggataagaatgctatctctctcacaactgttaggaggactgactgggttaatacgtgcaaagtaccaagtacataagaaaccaacagccagtgctcattacaatcattattattttgggcaagttaagccgcatggtttctttaggtataaaattaggctttatttacctacctgttgggttgttccaaggattaatcacatagtgttcatgaattccctttataaactattatagaaaagaaatatagttaacattaattgaacacctactatgtgcgatcgttttaaggcttgccatgtgctgcttcattcagtccgcaccatgacattaggatcacactttcgttttccattttttttwaaattatactttaattactagggtacatgtgcacaacgtgcaggtttattacgtatgtaagcacgtgccatgttggtgtgctgcacccattcactagtcatttacattaggtatatctcttaatgttatccctccccctccccccgcccatgacaggccccggtgtgtgatgttcccctttctgcgtccaagtgttctcctagttcaattcccacctatgagtgggatcacgcggtgtttggtttttttgtccttgcgatagtttgctaagaatgatggtttccagcttcatccgtgtccctccgaagggcatgaacacatgcttttttatggctgcatagtattccacggtgtatttgtgccacgtttccttaatccagtctatcattgatggacatctgggctggttccaagtctttgctact

SEQ ID NO: 687772 - DNA, 2724 bp, Homo sapiens
ttgttctattcatctacgattatttcttaacacttatgttaccatacatttaatgttcagtttaaacatctgctatgtctcaaagtttactgaactcctcatctttccttctaccctcactttcaaaatgtttaactctcacatttctattttcaatagcactatatatgccccattattaaatattatggtactatctttttctgcttcatctcttacatctacacattgagtcaggaccatgttttggtcatctctgtgtaacactgctaccagcagaaaatggcactcaaacaaggtagctccaaacataacactgaatttgctttttaaatgtatctatttccagatagattattactaggtttagctggccactaagcaaagtggtatgatgtttcattttcatttattgtagatagatttaaagtataacttggcatctaaacttgtaattttttaagtgattaggtttttatagaaaatatgaataaatgtagaaaactgtattaaaagttaatattacttatattaaatatcaatagtaaatatctaaattatataaagttttaatagcaaataaacatatgctattctaaaccaaattttggtatagtaacatacatacatttacagctaccatcaacagcaaacagaactgagattttgttactcatccagtagagtcagatacatgaaaacaatggtctactctgggaccatttgaagattacttacaataaccaaccctctccatttgcctgagactgtgcagtatcctgagatgcaggccttcctatcctaaaacctggaaaatcccaggaacaccaggacaggttggttacactaattccctgagttaaaaaaaaaaaaagagggccaggcacagtggctcacgcctgtaatcccagcactttgggaggccaaggcaggtggatcacctgaggtcaggagttcgggaccagcctggccaacatggtgaaaccccgtctctaccaaaaatacaaaaattagctgggtgtggtggcgcgcgcctgtaatcccagctactcgggaggctgaggcaagagaatcgcttgaatctgggaggcggaggttgcagtgagccgaggccgcaccattgcactccactccaggctgggtgacagagcaagagtccacctcaaaaaaagaaagaaaaaaaaaagagagaaaaaacacagcaaacaaataaaaagaaaacagatcattccgaggacaaaattctaagagataattactttgggttactgacaggtttcaggatatggttaccaagacgtatgcactgtatctgctgtggccagtcacatggtacaattatgttacagttaagtaggtccattattacatgatgagagtgtttgaaagtccactgtaacttagacaacagacattcccaagattggtactgactttggtaggtaattatactctggattttagaaggctgaattaacctctttcatccccaaaacatgaaaggccaaaaatcaggtatccaaatagctcattaatgagcacatgcaacatatttcatgacagataattacagctgatttggaggaaataaaaagcaatctccagaataaatcaaatgagaagaaaatatatattatcctaaaaatgtcaatgtttccttatttcccattaaaatttaaaactattttccatgtcatttgttctttataagctgagtaaccttagataaagagtgatttttttatttttcctgagccagagtttccctaacatcagtgacaaaagtgctggcctgggcctgatggacccagagctcctgagctacttgccaccagccagaaatagtccatctgtttgcccagaatgctctacaaatggtatcattaaaataatttttttttagagacagggtctcactctgtcaccgaggctggagtggtgtcattatggctcactgcagcctcaacctcccaggctcaagcaatcctcttgcctcagcctctgaacagctgggacttcaggtgcaggccaccacgctcagctaattttttttttttttttaaagagattggggtctctctatgttgcccagactggtctcgaatttccgggctcaagcaatcttcccaccttgacctctcaaagtgctgcaatcacaggggtgagcctctgagcccaaccacaaatgggcatgccctatgtgtgttacaacactatccagatggaaaacactgctctaagccatgcgtccccttatgagtaaaatgcatccaacatcaaactccttgcagagatgttatgagaagcatgaaataatgttttaaaaaagttagaagaatacaaatgattatcatagtatctcatttggatataatgatgaatttaataataaaatcacaagagaggctataaaataaagacgctgagttatcaaacatgaaaactaagaacttacctgaccagaggaagctaacaaattaattgtcgttagaagcatccagcctctactggcttcttcactctgattaatctcyaggaactgaactatggcccgacttgcagcctctataaaaccaaagggaaagccattaagtgggggaaaagtcacatataaagaggttcttctttaaaacctaccaaggaaatgaaaatttactaagcacataattatatcagcactattacatatagaaaaactttaaaaatagcaatgttttaatggta

SEQ ID NO: 687773 - DNA, 946 bp, Homo sapiens
gaacaaggtctgttttccatttaattttaatgggacttttacagaactgcttgttcattcaaacaaatcagtttttgctggctactgtaaaaatacctgtggatttgtttgatgctctccttcgaatttctgtcaccattagtcgtgagacttgtgttgtgaactgcagaagatcagaaaatttttctgtcattgtattcggcggagcatttccaaaaacctgtagataagaaaagacattgttaatgaagcactgacaaatttttctttttattttgtgaattttcaagtgtggtatgacttgaaaatcaagtccagaaaagtctacctacacagttactttgaatcttaatatgttgaaaatacaacgctttcaataaatcacatgtctagccacatttccttttacatataaatttgttgaagaaatgattaaataaatgaaatctaagacccatagacattattgataaaatttgaatcaatctcacgaaaaacattagaaattataacgtttcttttttttkgggggggacagattctcactctgtcgcctaggctggagtgtagtggcacgattttggctcactgcaacctctgccttaggttcaagctattctcctgcctcagcctgccaagtagctgggactacaggtgcatgccatcatgcctggctaatttttgtatttttagtagagatggggtttcaccatgttggcctggctagtcttgaactcctgacctctggtgatccgcctgcctcagcctcccaaagtgctgggattacaggcgtgagccaccacatccagccaacatttttctgaggaaagctaatttgagaatttagagaaaagttataaaggatctttgatggagtacaggcacactggatggtgaaaagcagctctactgctaaatcccaggctgacgtcagaattcactaaac

SEQ ID NO: 687774 - DNA, 3258 bp, Homo sapiens
  misc_feature 2618, 2619, 2620, 2621, 2622, 2623, 2624, 2625, 2626, 2627,2628, 2629, 2630, 2631, 2632, 2633, 2634, 2635, 2636, 2637,2638, 2639, 2640, 2641, 2642, 2643, 2644, 2645, 2646, 2647,2648, 2649, 2650, 2651, 2652, 2653, 2654, 2655, 2656: n = A,T,C or G
  misc_feature 2657, 2658, 2659, 2660, 2661, 2662, 2663, 2664, 2665, 2666,2667, 2668, 2669, 2670, 2671, 2672, 2673, 2674, 2675, 2676,2677, 2678, 2679, 2680, 2681, 2682, 2683, 2684, 2685, 2686,2687, 2688, 2689, 2690, 2691, 2692, 2693, 2694, 2695: n = A,T,C or G
  misc_feature 2696, 2697, 2698, 2699, 2700, 2701, 2702, 2703, 2704, 2705,2706, 2707, 2708, 2709, 2710, 2711, 2712, 2713, 2714, 2715,2716, 2717: n = A,T,C or G
aaaaataaaatgatgaatgtaattacttcaaaattaaatattttggcttagaaaggaacactgtaagccaacaaaaaaagagagaacacaatagaagatatttaaaatatccaaaactgacaagaattagaatatagaatttacaagtaatgcaacaagaaaaatacagcaatcccactggaaaaaaggcgaaaaatatgaacaaggaatctggaaggccattaaacacagaggtgttagaggtgttttaatttaattagtattcagagcaatacaaattgaaacaaaatgccacgttgcacctaatagattagcaacaatcagaaagctggaaaatgctgtgtccttagacatgtggacagaaactacacacatgactagtgagaaaatgaactggatctaaagggcaattttgcatcgtttggaatcttgcattcctcttctacatctacactctgaagaaattctctcattggaagcaattttttggaagctacttaagtggtccatcactgagcaaaagaacaggcaaaccaaagttgatatacaactatatatagttatttaaaagtatacatttcagatccatttaagttggacacgtcttagaaacatagtgatgggtaaaaaaaattaaaaaataagatgaaatacattacaatgtaacttttggaaattaaaaatacatggacagaaagcaaacattttacatggacacatattaacaaaagacaacattaactactttaaaatggttgtatctgtccttcattaaatttataggtctttaataattactttgcaatacttctgaatttagttcaaccctaaaaatcactgttttatataaaaatatatttacattaacaactaaaattaaatacttatataccaaccaattcatttcttaagttagtctcaagtgaaccacatttatttgtttatttcttctttttttttttcctttaatggaatgcttcacgaatttgcatgtcatccttgtgcaggagccatgctaatcttctctgtgctgcgaatgtgagcacaattgaaccatgtttaaatcagatacatgtatttttttctaaagtgattcttagctatttatcatcaacacagccattttggtccttttaatcctctgacacaaaaaaaattccttaaaataaatttcatcygcttagcaagtaacatgaaaaatatatgtatttgtaggaatatttagagagggaaggaaggaagggaggaagggaaggagggaactggtttttcaataggtattagatattaaataaattgcacaacatttaatagcaaaataagtctgagtctcttccagtcttcagacaaacctacccatggtctccaacaacaaaaagtcatgctgggaataccaacattgttctggtagtgttcaataccctagatttgcctctaataaaaatagagcaatttcctattagtattttggagtcatcacaactttggcataatctctcagtcttcttatgaatatatgatgaaaattatggtacagaatgatcacttttacactataatattctgaaacattaataatgtataaaacatcaaccattatgctgagtaggtgcttgggatacagtggtacatatcaacaacctggaacatgtggcatttacaccatgtgccaggaaatgacaattcatttaagatagacatgatatctgacctcgtggagtttagaaactgagtggtagcaaagattatgaagaatgataaaggctatgcatgttataccagggaaacacaggaaggctggggaaaagtacatcagggaaacctaatctagcttcagggaggtggggctgtggggaagaagagtgttaggaaagagaagcacatttttaaaagatcgtcaattacagaagaaaacaaatgaatttcactggcctatcctaagaccattctagccaatcagatttttgcagcttggtttctgcccattggcttgtaatcagtatttccaagtgtaaaacaccagccattctttccttgaatcattttaagtctaaggggacagcatcagtaattagcagctcaggctggagttaatccctaaggaactctcatttcctgcctctatgtcagttttcgtccaggaaatatagccttaatatccatagccaagtacaatgctaggtattttcacaaaaatttattcatttatttcctaccacaaaatggtatgcctactttatacatttaaaatatggaagctcagagtttaagcagcttgccaaaaagatccaacaactagcattagctaaaatttgaattcaagacatataagtccaaatccagtactcttttattaaatggaagctctttgtctttatgaaatacctttacttatgaaagcaatggcaattttattttctggttgttcctaccaaagatagtactatttgttcttccttaaaacatttggacaaaatgatcaagtatttttgtccccaagaattaaaaaagaaaaaacccacaaaacccatgtttactttgtgtatcttccaccaagggtgtaaccagattggtgacaagaaatatgactcatgagcggtatcttggcaaagaattcnnnnnnnnnnnnnnnnnnnnnnnnnnnnnnnnnnnnnnnnnnnnnnnnnnnnnnnnnnnnnnnnnnnnnnnnnnnnnnnnnnnnnnnnnnnnnnnnnnnntctaagcttttactactacattttcctacgaaagcaaagatatttctaagttctaaattaatataggctgactaattataattaggtagtgaaagtgctttaaagattgctgaaatatgtaatgcatttatttcaagtataaaaaatatgtgggctgaacatggtggcttacacctgtaatcccaacacttcgggaggctgaagcaggtaaattgcttgagtccaggaattcaagaccagactgggcaacatggcaaagctccgtctctacaaaaaatacaaaaattaaccaggtgtgttggtgtgcacctatagacccagctactcagaaggctgcagtgggaggatcacttgagcctgaggaggctgaggctgtagtgaattgtaattgtgccactgaccttcaacctgggtgacaagagtgagactctgtctctaaaaacaaacaaaaaaaggtgggaaaaatatttatctggtttccatatttatttgctgtccattgaattcagtaaccatagtagtgttgtaaatttttctttca

SEQ ID NO: 687775 - DNA, 597 bp, Homo sapiens
ggcaagacgagtgagaccatcaaatgtactggtgggcactggagtgaatgagaacgcttaggaaaattaaactttaattgtcacactgctctttcrgggcatcttcagatttgtctagcctacagtttctggaatctgtgcccacagaaacctgccagtctgagaccgttagtgcatttacaaaggcctcactagtgtttgcctctgtccatccacaccctgaaagattttttttctagttgctttagatactagggaaagcacaggaacctatcttgactcttgcgttttcaaggaatgaataatatagggcaagtcctctccagggtattaaaggggattatctggtacaatactgagagtggatggggggaagatggtgtgtgtcctcactgcgaggcacagcaccccatgggtgtcacaggtccttgctatgtaccttggtaggctgagccccgtgttaacgtgagtctgaattttagggagtaggaggatatatctgggtcttgagaatttgacagtggcaagaaagaacctcctatctttcattcagcttcaggtgcctgcatcagagctgcctgggggctctaaaataaa

SEQ ID NO: 687776 - DNA, 1460 bp, Homo sapiens
tatcataatcaacaagagcattgctatcattaccttcttagaaggacagagcatcagagacttgggcctgtggaagaatcatagaatgctgaatgctttgggggtgcctgactacattcaatgccccacccacagtgtatgctctgagaaatgcttgtctagtccctgcctgaatacttgcggtgacaagaagatataattctcaagatagctacttccaaagttgatgtcctctaagtagaagcagaccttccccgtacttacatttgcatcatttagtttaggagacacttattaaatgaatcaatagttattaccctaaaaacagaggtgactgatgctgaaggctctcaggctccctggagttagaaacaccactgatatcaaataaacgctatgtggaattagcaaggacaccgtttactcttgggcttcgttcaagtggccctctcctctccttgttcaccacacagaatattttcccaggccctgcttaccacaaattctgcagccctgtttttgagcctgggttaatagtcttttaaagtctgtgagatgaccagaaatcctggctttgctggctcctgaagccacaaaagaaacaaatattaccactttgaagcggacctcctggttgtcatgaaagaaagagtgactcccactttccaagcggaatggagatgatagttatttttatagatggttctacacatagattataccaacttattttgtttgcaataaaactgaaatactactaataattatttttatcactaactctgatcttccctggctcatggtttagtgcatatatatatattttcaaaaatcaatatttaataaagttatcagtgtctgtggcctaaattgaatccccccaacccttcccacacacactcccaccttctttgaggatctgaagagactacagctttctccaggcggctcacagctcttcactttagagagcaatgcttccttacagtacttgcctccccmccccccaactttttgttctgaaaaagtagccacttccagccgggcacgatggctcacgcctgtaatcccagcactttgggaggccaaggcgggtggatcacgaagtcaggagttcaagaccagccctggccaacatagtgaaaccccatctctactaaaaatacaaaaattagccaggtgtggtggtggacacctgtagtcccagctacttgggaggctgaggcaggagaatcacttgagcccgggaggaggagtttgcagggagtggagatgataccattgcactccagcctgggcaacagagtaagactccatctcaaaaaaaaaaaaaaaaaaaaaaaaagcaaaaattagccacttccacagcatggatggaaagatgttttgcttgcttcgctgccctgagccctgttgtatgaatgggacaccacccccaccagttctccttttctcatgat

SEQ ID NO: 687777 - DNA, 1460 bp, Homo sapiens
tatcataatcaacaagagcattgctatcattaccttcttagaaggacagagcatcagagacttgggcctgtggaagaatcatagaatgctgaatgctttgggggtgcctgactacattcaatgccccacccacagtgtatgctctgagaaatgcttgtctagtccctgcctgaatacttgcggtgacaagaagatataattctcaagatagctacttccaaagttgatgtcctctaagtagaagcagaccttccccgtacttacatttgcatcatttagtttaggagacacttattaaatgaatcaatagttattaccctaaaaacagaggtgactgatgctgaaggctctcaggctccctggagttagaaacaccactgatatcaaataaacgctatgtggaattagcaaggacaccgtttactcttgggcttcgttcaagtggccctctcctctccttgttcaccacacagaatattttcccaggccctgcttaccacaaattctgcagccctgtttttgagcctgggttaatagtcttttaaagtctgtgagatgaccagaaatcctggctttgctggctcctgaagccacaaaagaaacaaatattaccactttgaagcggacctcctggttgtcatgaaagaaagagtgactcccactttccaagcggaatggagatgatagttatttttatagatggttctacacatagattataccaacttattttgtttgcaataaaactgaaatactactaataattatttttatcactaactctgatcttccctggctcatggtttagtgcatatatatatattttcaaaaatcaatatttaataaagttatcagtgtctgtggcctaaattgaatccccccaacccttcccacacacactcccaccttctttgaggatctgaagagactacagctttctccaggcggctcacagctcttcactttagagagcaatgcttccttacagtacttgcctcccccccccccaactttttgttctgaaaaagtagccacttccagccgggcacgatggctcacgcctgtaatcccagcactttgggaggccaaggcgggtggatcacgaagtcaggagttcaagaccagccctggccaacatagtgaaaccccatctctactaaaaatacaaaaattagccaggtgtggtggtggacacctgtagtcccagctacttgggaggctgaggcakgagaatcacttgagcccgggaggaggagtttgcagggagtggagatgataccattgcactccagcctgggcaacagagtaagactccatctcaaaaaaaaaaaaaaaaaaaaaaaaagcaaaaattagccacttccacagcatggatggaaagatgttttgcttgcttcgctgccctgagccctgttgtatgaatgggacaccacccccaccagttctccttttctcatgat

SEQ ID NO: 687778 - DNA, 642 bp, Homo sapiens
tgaggaacgttgacgctacctacctctggcctggcctctacccactgctgccctggccgctaccaacatgagcctcccggagagtcctcacagccccgctactctcgactatgctctggaagacccgcaccagggccagaggtcccgagaaaagagcaaggcgacagaggtaatggcagatatgtttgatggccgcttggagccaatcgtgttcccaccgccccggcttccagaggagggggtcgcgccccaggatcccgcagatggtggccatactttccacatcttggtcgatgcgggtcgcagtcatggagccatcaaagcggggcaggaagtgactccaccacccgcggagggcctagaagcggcctctgcctcgctgacaactgacrgcagcctcaaaaatggctttccgggtgaagagacgcacggcctaggtggggagaaggctctagaaacctgtggggcagggaggtcggagtctgaagtgattgcagaggggaaggccgaggacgtgaagcctgaggagtgtgccatgttctcagccccagtggatgagaagccaggaggcgaagaaatggacgtggcggaagaaaacagagcaatagatgaggtaaacagggaggcagggcctgggcccgg

SEQ ID NO: 687779 - DNA, 581 bp, Homo sapiens
ggcagttgaacctggggtttcactgggctcgcctaggaagaatgtggggtgaaaagccaagaaaccgagtatggaacttgaggaagatttactgtaagtacttcttagaaaagagtggctacaaaaaaacatggtttgaaagaagaaaataaaattgtttattttcttttaaactcgctgcaagcagctgcattgtttactattgagtaagttcaagatagcrgacccacacaatttcccatgaagttctgtgtcagataggacacacatgccatgtaaaaaaaagggccacaaagtgctcattggatttggcaaaatgtgagtcattggtagccttggtccctgggaaatagcagggaaaactcagattgctctggtttgagagcagtcaggatataagaaagtggaaatgtggagtaggctattcttacataaaataaaagttaataatattgagggtatatgaagataaattgttggctggaaaatttcaggaaagtgtttccacttaatgtcctccctttttgagctctgatggaatagtgtgcctggagatagtggagagagtttcaagatgaccc

SEQ ID NO: 687780 - DNA, 627 bp, Homo sapiens
acagacggggtttcaccgtggtctcgatctcctgacctcgtgattcgcccgcctcggcctcccaaagtgctgggattacaggcgtgagccaccgcgcccggccctgtgtgtgcgttttcatgtgtgtgattgggaaccttgagagatgtatctgaagtaatgtaaaaataagagtctcataattcctggttaatgctggcgtattgttgtcacctgccaagtgactgttaggcaataagactagaaaatatggtaccgaatgaaaggagaaatatcttatttgctgtaacaatctaatttatattaaggtaaggattttggtggctaaggaaagaacatttagctgttatttgtgtaattgtcacatattattgtgcagatttaatctcattgttaacagaatatagagtgtgaattatttgttattaaatgttactgggctttggtgtcagtgtggtataccagaaattacctctggtctgtggttataaaatctaggtcagaagctcagtttcgccacatttttgctgtgccctagatgccattttcattctctgaacttttatagcttcrtgattaaaattgagttaattactattgtgtttcagaggcttgtgaatgattaag

SEQ ID NO: 687781 - DNA, 645 bp, Homo sapiens
taaactaacttgaaacaactaaaacatttaatgatagtttggtgctgaaacattcaagtttggtaaaaatacatcttcacaataacgaaaaaagtacattaattttcaacttcccaagtcaacaggatttacttcccgacatatacacacccactggtcgtggcggcacttccatctgctggaaattacttttgtcttggggaaaatatcctgttaagatttcagggttttttgacaattctgaaaaggaaataaacattactgtattgtcgattccttatttgctaaaagtgaaacttactttctttaagtggtaatgttttctcttaagtattggaatcattttaaaaattaaaaaaaagtccagttttttttctgaatgatctatcttgctaaagaggaaaaaaygtgcacattgagcccacttccagttaagaagctttttccctctcacttttactgttagccaaacacagttatttgttagaatgtacacgaagaatctgctacaaagtattcaaggactatccctctctacttcctaatccatctccctctcccttgactccaattatatagttcctgatcacttcaattttcattcataccttaaaaagaaagttgtcaaaaacaaaggagtcaaat

SEQ ID NO: 687782 - DNA, 645 bp, Homo sapiens
taaactaacttgaaacaactaaaacatttaatgatagtttggtgctgaaacattcaagtttggtaaaaatacatcttcacaataacgaaaaaagtacattaattttcaacttcccaagtcaacaggatttacttcccgacatatacacacccactggtcgtggcggcacttccatctgctggaaattacttttgtcttggggaaaatatcctgttaagatttcagggttttttgacaattctgaaaaggaaataaacattactgtattgtcgattccttatttgctaaaagtgaaacttactttctttaagtggtaatgttttctcttaagtattggaatcattttaaaaattaaaaaaaagtccagttttttttctgaatgatctatcttgctaaagaggaaaaaacgtgcacattgagcccacttccagttaagaagctttttccctctcacttttactgttagccaaacacagttatttgttagaatgtacacraagaatctgctacaaagtattcaaggactatccctctctacttcctaatccatctccctctcccttgactccaattatatagttcctgatcacttcaattttcattcataccttaaaaagaaagttgtcaaaaacaaaggagtcaaat

SEQ ID NO: 687783 - DNA, 631 bp, Homo sapiens
caatgcactgagacagcggtgttgtggcagagaaagtgtttaattattgcaaggcagccaagcgagaggatgggaaatatttcttaaattcacctccttgagagctcagaggctatggttttttaggaaatttggcaggtgtcagtttctcgtgggggatgtcacaggactgattgagtcatgggtctggatgggtcatggtggtgtcggtgagtctgcaccaatgcaaaggtctgaaatacatctcaaagatcaatcataggtttgayaatagtgacattatttataggagaaattggggaagttactaatcctgtgatccctggctatgtgattctcaagcagtaagcaattatagaaaggcaagctatggaataatggctggtttttgtttaactgtgcctacatcttagcagaattcaggcccctcccataatcctaaccttgtagactttgatgagacttacaaaggcagtttcagtccctgagcaaggaaggagttagtttcaggaaggaattgttatcatctttaacaaagtcagttagtttgtgctattggaagcaagatgggagtatttatgtcagatttctctcactttcataatttttgcaaaggtggttttgataacca

SEQ ID NO: 687784 - DNA, 624 bp, Homo sapiens
taaaaaaaagaagaaaaaaaatctctttgaagggcatgttcagtaaataaatgaaggtatttggcaacgtacaactcctatttgaatatttatagccatgctagccattttcaacaactactctttcattagaataaacaagaaattattgtttattcaccattgctttaccaattgcttaaacaacaagcgcatcatttgctcagtggtaagattgtacaaggaggaaaaagtgacasagcgtgctgcatacttttcagaggcgtgcctttgttgttgaaatgttgctagggcgtggcaggacccacagttggagtgaaagcaaaggcttagaaaaactcaagtatccgagggcaccccattcaccgacaatggaaaaactcacaaattagtgtgatgcttacgctgatattcagactggagccaggcacaaacaacaaaaaatagtcgtattaaaagtttcagggtaattctttctgaaaggtctttttttctctatttaacaatgatacattgctttatacagatttgcagagcactacaatacaaaacaaaacattggcggggcttaaaggagcatggaattccaaataatgcaattacttgaatttgtagaaagactga

SEQ ID NO: 687785 - DNA, 606 bp, Homo sapiens
atcaaattaaaacattttatttcctgaaagccttttttgcctgttgtaatgtgcaggacccctctcctttaatgggagagacaggaagttacctgaatctaggctgaaaaggttatgtgaaaagaaagtataataataaaagggacacttggctttttaaatctttgttttctcttaacctaagtaaggcatattaaaaataaatgttaaggtgaaaaataaatgttgtctttatgaaaaattaaaactgctctcagttccatattgttcataccttcatgctttttaacatgatattwtccatcctggaatgaccttaccccagattctgctcattttcaaaaccctgattcattgtcatcttttctgtattcctaccttgattacccacttccccaaaagagttaatcactcacttttgtactatgcctgtgccatatatatatatataattatatattatataataatataaatatatttaatattatatattgccaattctatgatatataaaatatataatatataatatatttgccaactaatataatatataatatattaacataatataaattacatataattatacatatatttata

SEQ ID NO: 687786 - DNA, 588 bp, Homo sapiens
ttcttttttttttttgagactgagtcttgctttgtcgccaggttggagtgccgtggtgcaatctcggctcactgcaacctctgcctcctgggttcaagcgattctcctgcctcagcctaccaagtagctgggactataggcgcgggccacmatgcttggctaattttttgtatttttagtagagacggggtttcactgtcttagccaggatggtctcgatctcctgaccttatgatctgcccgcctcagcctcccaaagtgctgggattacaggcatgagccaccgcacctggcccatcctattctatttgtcgttgttgttgctcattgctgcttgctgttgcagtcagatatagtccattattgtaacgttagaacacaatatttaatttctacattgcaactcttttatctcttctcttcgtctggcagcacttagtaaagaaacctatataacaagaagctaggaaatatgagaattatctctcatttgaccagtgatagtaatttctgattaattcaggaaaaaaacctgcatgcaattataaatagtccatttttatttcgacatattgatttggtttaatt

SEQ ID NO: 687787 - DNA, 614 bp, Homo sapiens
cagaaagacgggctgagaagagtgctgggagaagaagggggagcggagggagggagaagggaagcggggaaagacgatgggagaaggtggcgggggagaagaaggcagtgtgggagaagagttgagggaaaaagaaacaatagtgatgctaatgttaaacgtcgtcgtcttggagcaaaagaagcaagtgctgctttagactcccggcctaactttgttcaataaatccccacttccaaatatcttgtgattgcagtgtgggtcatttttagtacttagatccagagcagtctctgattgttagtgacagtgctgtcaaattgcatgctgttcaccagctataaacgaaaacaycacatttccttgaagtgcactttaacgtgtaattcaaagacttttccaagaggcttactggggaaaaatagaggtgtgtacctttggcattggacatggagtctctgattttagattgtagttgtttccccaaatctttaagattgtggcagaaacatgattgtgactacggcattcattttgtagggcagtgcgtgttattttaacaaagggtaaactgatatgcctataagaaaatgtaattcaatttaattcactca

SEQ ID NO: 687788 - DNA, 928 bp, Homo sapiens
tcaagctctgatgttgcacattgattcttttattgagaaatctctttgcattggctggtgagccagaggtatggaaaaatgtgtgccgagcacttgtgatgttgttcgaagtttgagtggatcgcctgctccctcacatgcgtaatatagttgagtatatgctacagaggactcaagatcaagatgaaaatgtggctttagaagcctgtgaattttggctaactttagctgaacagcaagtatgcaaagatgtattcgtaaggcatcttcccaggttgattcctgtgttagtgaatggcatgaagtactcagatatagatattatcctacctaagggtgatgttgaagaagacgaaatgattcctgatagtgaacaggatatatggccacgttttcaccgatcaaggacagtggctcagcagcatgatgaagatggaattgaagaggaagatgatgatgataatgaaattgatgrtgatgatacaatttctgactggaatctaaggaaatgatctgttgctgccctagatgttcttgcaaacgtgcatcatgatgaactgctgccatatatattgccccttttgaaagaattactttttcatcatgaatgggttgttaaagaattagccatcttgggtttaggaacagttgctgaaggtttgcatgcagggcatgattccttgcttgcctgagcttattcctcaccttattcagtgcttctctgataaaaaggctcttgtccgttccataacatgctggactcttagccgctatgcacactgggtagtcagccagccaccagacacgtacctgaagtcattaatgacagagttgctaaaaggcatcctggatagcaacaagagagtaccagaagctgcctgcagtgcctttgctaccctagaagaggaggcttgtacagaacttgttg

SEQ ID NO: 687789 - DNA, 928 bp, Homo sapiens
tcaagctctgatgttgcacattgattcttttattgagaaatctctttgcattggctggtgagccagaggtatggaaaaatgtgtgccgagcacttgtgatgttgttcgaagtttgagtggatcgcctgctccctcacatgcgtaatatagttgagtatatgctacagaggactcaagatcaagatgaaaatgtggctttagaagcctgtgaattttggctaactttagctgaacagcaagtatgcaaagatgtattcgtaaggcatcttcccaggttgattcctgtgttagtgaatggcatgaagtactcagatatagatattatcctacctaagggtgatgttgaagaagacgaaatgattcctgatagtgaacaggatatatggccacgttttcaccgatcaaggacagtggctcagcagcatgatgaagatggaattgaagaggaagatgatgatgataatgaaattgatgatgatgatacaatttctgactggaatctaaggaaatgwtctgttgctgccctagatgttcttgcaaacgtgcatcatgatgaactgctgccatatatattgccccttttgaaagaattactttttcatcatgaatgggttgttaaagaattagccatcttgggtttaggaacagttgctgaaggtttgcatgcagggcatgattccttgcttgcctgagcttattcctcaccttattcagtgcttctctgataaaaaggctcttgtccgttccataacatgctggactcttagccgctatgcacactgggtagtcagccagccaccagacacgtacctgaagtcattaatgacagagttgctaaaaggcatcctggatagcaacaagagagtaccagaagctgcctgcagtgcctttgctaccctagaagaggaggcttgtacagaacttgttg

SEQ ID NO: 687790 - DNA, 1605 bp, Homo sapiens
tattcaatgttaaattttcctctatcaatattatattacttttctcgatagcataaatgataaattacaaaatatttaatatttataaagacccaagaatgtataaaaaataaagagaaaatgaatgcctaaaataacatcaaactaaattaccaagcttacaagtatgtcagagtttaagatgtctgcgtagggattcagaaacttatcccttcacaccatcaccaccacaatagcctcttgccctttttcttactttaaaagaaaaaaaattccacacacttggattctagaaataaaaaacagtcaaagacgacgaaaaacattccctagggagttttgtatgatgagaggttggagggacaactatttggagcagagttttctgaagaacagggccagattgagaggtgatagaaggagtagaacatggagacaggataatacggagaagaagaagatcttctgggttagaggtgtccaggagttgttgagcactagagaataagtgaagacacagcatgttaataagagagtctctagactgtacttatgtctccctgaatgagtttggaagccgtcagtaagaatttgattttctgttaaattgttctttaggtgcaacactttactgctaggttgtatcagttaaggcttttacatgggtcatgcaagatacactttactcatctttagctaacagccactactgtcacttatccctcctgctctcaaccgtctcccacatgatggcagagaccatcaaaacaccactccaggtatgcctatcaggcctccagcatccacagtcctagattcaggagaaaagcaagcaagaaagagagcaggaagtcctcttttctactctcacatcttttaaaggtctacctttctgttttccacctaagacccaagagaatttttctcctcacaaagaatgagcactcactgcaggggatgccagactcacccaaaaggtgtggccttcctcaacaggcctaaattttaaaaagtcagaatggaatgcaacacaaccactccaatattcacaccagggactaactagatgatttaaaaaaaaaaaaacattagtttatttttcaaattgacaaaagttttatttatttattgcatacaaccttttgttatgaaatatctatccattgtggaataactaaattgagtgtattatatgcatttcctcaaataccatttttctgtgtggtgagaacatytaaaacctactctcttagcaattttcaaggatactatacattgttgttaactacagtaaccgtgttgtacaatagatctattccttctatttcactgaaattttgtgtcctttgaccactatctccccaaccttcccagcctccataactgttcttaatgccaagccacccttctctccatagggtcacctacatggaccaaatgaatattctttatactcttcctttttctctccacccgaaaatccatttcctgagtttcttaccacacctccatcacaaaagcagggatataagtctgtttcgtgttcttaatatatgagtatgtgtggtaatatcccttctttcatttctgacattggtcatttat

SEQ ID NO: 687791 - DNA, 1351 bp, Homo sapiens
aagggttttttctaacgctttttagaaaggctgcatgaaattatactctcatcagcaggatatgcttatacatacgctgaaccatcaccaacatttaatattatctttccaagcttgcaacttagatggttgaaaattgatcttattttttgtgttattttaaaaattattaatatttgaacatttttcagaggtttattaactttttgtatttcctgttctataaatcatgaatgtttggtttttcccattttcttattaaattgttaagagtttttcttataaatacatataagttcttcatgtgrtggttattaccctttttaaaactgtaccatagctatttaaattttgatgtgttttatttattcatttattttcagagacagggtcttgctctgttgcccaggctggagtgcaggggcatgatctcggctcactacagcctcaaactcctgggctcaggggatcctcttccctcggtgtccctagtagctgggactacaggcatataccaccatgccgagcttatttttttgtagagacaggctccctctatgttgcccaggctgggtctcaagcttctggccttaagcagtccctgaactgggcctcccaaaacactgggtttacaagtgtgaggatatttttcatttttatttatgatgtttttatgtacttaagtattaaattttcaaacactgaaatggctatgattttccttagctaatttcatctattgctttcatctaaagacagataaatattatctacatttccatccatttttactggttcaggtttttttctatttagccatgaaatccatttcaattattgctattatgtgagttcatttcaccctaaatagtcagtgtcatcaacagtcatttttacttcaaatcaacaatttttattgagtgtctattccatgccaagaatattctacatacttgagatccatcagtaaacaaaatatataaaaaccactattctaatagagtttctattactaataatccaagggtgggtaaaatacagcacatgcatcaaatctagccagatccattcatgtttgtattgcctaggactcctttctctatagtaattgtcataatagtggcaataggagtctacaaagttgaaatatttactgttttgctgtttacagaaaaagttcaccaatccctggaaatatccaatccctttccactaataggtgataatttattatatattaatatattatatatgcaaaagtctatttctggctattcatttcattccattggtttgcctacttaattctatgctcagaccacattttctttgttttcaaatccacttttaa

SEQ ID NO: 687792 - DNA, 870 bp, Homo sapiens
tataatttaaatgagtgataaatgggaggataattctttaaagaatcaaaatatacatacaattagccttgttattatatggttatttccaaacaccatggtctttttacctaagcttactattactaaaattccgtccctttttcttgtgggaaagggcatttttttttctaygtgaaccaatcatgattccttactgtcccacaccactaacattttgaagataactttactaagataacatggggctttttgtgtgtttgtttgttattgaaacagggtcttgttctgttgcccaggctggagtgcagtggcacaacttcaactcactgcagcgtcgaccttccaggctcaagcaatcctcctgcctcagcctcctgagtagctgggaccaaaggcacgcgcctccactactggctaatttttttgtatttttttgtagagacagggtttcgccatgttgcccagtctggtctcaaactcctgggctcaaccaatccgcccccttcggcctcccaaagtgttgggattacaggcgtgagccaccatacctggccaaggtaacatgtttaaatgataaaatacaccacttatttctcatctccaaagcgtaaaaagaaacacagtaagatataaaagtggaaaaataattctccccagaaaggtatcccttactggtacaaaaaaaggaaagagatcaggtagagagaaagggttttctggggtgcccctagactttccctctggtactttactgacacttaaaactcatgtttccagaagccaggcctctgggagtcaataatttttatgctactgtcaatgcaaccgccagcaagacttcctggttctgccatatcattcctggaa

SEQ ID NO: 687793 - DNA, 659 bp, Homo sapiens
aatcaaggtgtgagcagtagtgtgttccttctgcagactctaggggagagttcatttccttgccttttctggattctggaggccacctgcattccttggctcgtggccccatcccctatctttaaagccggtagtgtagtacctttcaatctccactccctatttcccgccccccttcccacaattgtcacatctcgtcctactctgatgctcctgtctccttcctataagaacacctgtgattacattggaaccacctggataatctggtataattttcccatctcaagagccttaactcaaatcacacctgccgaatcccttttggcatgtgrggtaacatgtttacaggttctggtgactaggaaagggatcatgaggacatgtgcatctttggggagggccattattctgcctatcacaatgacccttttattgacagtgagaaataacatctagaatgtagatgtagtatttacttgtggctgattaatattactgtgtagggcaatttaaatgcaaatgaatagaacaaaaatgcttggaatctatagcactttgctgttttcaaaatattttagaatattttgctacctttcaacaattctaacacatacacagaacaggcagtgttacctccacattgcaaatgtgaaaag

SEQ ID NO: 687794 - DNA, 659 bp, Homo sapiens
aatcaaggtgtgagcagtagtgtgttccttctgcagactctaggggagagttcatttccttgccttttctggattctggaggccacctgcattccttggctcgtggccccatcccctatctttaaagccggtagtgtagtacctttcaatctccactccctatttcccgccccccttcccacaattgtcacatctcgtcctactctgatgctcctgtctccttcctataagaacacctgtgattacattggaaccacctggataatctggtataattttcccatctcaagagccttaactcaaatcacacctgccgaatcccttttggcatgtgaggtaacatgtttacaggttctggtgactaggaaagggatcatgaggrcatgtgcatctttggggagggccattattctgcctatcacaatgacccttttattgacagtgagaaataacatctagaatgtagatgtagtatttacttgtggctgattaatattactgtgtagggcaatttaaatgcaaatgaatagaacaaaaatgcttggaatctatagcactttgctgttttcaaaatattttagaatattttgctacctttcaacaattctaacacatacacagaacaggcagtgttacctccacattgcaaatgtgaaaag

SEQ ID NO: 687795 - DNA, 607 bp, Homo sapiens
tgctttagatgcaaagcagaaaaaaggaaagggtaaaagagtataataagatgttaaattaaaatttttaactgaggcgccaaaatataatacttaccagattctaacagagygcaaggcaaaccataacaatgtggcaatttcaaagagttgaaagtgtacagatgcagaggaaaccctcaatgtatttctttggagaaaaaacattggtgcattttggctcccacctttatggaggaggaatgcgtgctcttccctcagctcaaacctagggctaaaagcttcaacaggatcacttggagaacttcctatgttccttgcagtggtgagggcaaaagggactgtgcctgactcacaagagggacagccaaagtggcctggcataccagaatggagggctatgtggaaagcagcctgatgcctcgaaattggtcagggcaagggatgcaagaatgcttcccagggaccagatgcaaaccatgaggaagtgggtgacctggagtcactttgactactgcctaagaggacaatgggaatccgacagtgaacatctgtgcggaagaacctgtcagaaaaatgaaggccaaggaagagaattgtggaaaag

SEQ ID NO: 687796 - DNA, 600 bp, Homo sapiens
cctaatcatctttatttcaacttttcttctttcttttcaaaattgctgtttatttctctctttcaattttctttatttttttaatttaacaaagcaaagcatgcctcttgtaaaaagagacccagcaggaaaaatgtatgaagtgaaagttaatggaaattaaacaacttgctcctgaatgacttttgggtaaataatgaagttattgtagaaattaagaaattctttgaaactaatragaacaaagatatgacatatcagaatctctgggacacagctaaggcagtgttaagagggaaatttatagccctaaacacccacatcaaaaagttagaaagacctcaagttaacaacctaacatcacaactaaaaaaaactagagaagcaagaacaaaccaacctcagagctagcagaagacaagaaataaccaaaatcagagctgaactgaaggagcttaggacacgaaaaaccattcaaaagaccaaaaaatccaggagttggttttttgaaaaaaaaaaaaataataagataggccactagctagactaataaagaagaaaagagagaagatgcaaataaatacaatcagaaacaacaaa

SEQ ID NO: 687797 - DNA, 609 bp, Homo sapiens
agcgtcctggggaagatgggggaaaaaggagtagagcatccaccctgggagaatagagttaagcattcagaataagctagcgacaccaggagatgtttcggaaagcgggctggagctgagccacctggtacatggcgcctgctctgcagtgccgctcttacaccagtaaaaccctcatcctgctgtctggcacaaggaaagatgctatcatcatcttcatcatcattagttactgarccactccagccaagcagccaaggctactcccagccacacttcccgggcagtttctaaactaagggaaggaggttaaattcagcccagcacgttgtggagctcttttttttgcatatggattgccacagtattagccattgtgctcactttggggccctctaggggtgcaataaaggagaacttctcttcattctgtcaatttgttgatagaaaatgtttaggaacacagagcatggtcagatatctggacaccttcggggaaaggacagcagagtcataaagttgttatcactccgtgacggtcaccattcttggaactgggcagcagaagagcccaaatcagggcatacatcccaagttgcacaaatgaga

SEQ ID NO: 687798 - DNA, 624 bp, Homo sapiens
tgaagagaaagaggctgtaagaagaacttgggtttcttagccaaagccagtaccaagccttcaatcatgtgatgacatcatgttggatactttagtttcagctcaactgtcatagctgacaccatgtggaaaagaaaagagccactccactgagcactgctcagatttctgactcaaacaattatgtggaaataaaatggtaactgttttaagtagctaagttttgggcttgctacatagraatagatattgggagtattcagttgtgccccctctttttagcacaggattcagctagctcactccgtatgtttgtcagttaccaccatctttctcctttctaacttccaaaaacttgttcatatcatctcttctcccgtctctttttccttaagtccaatttctaaatcattttataccattttagctgggtttggggaagagaacattaaatgcatgtggtcactctatcatctttaactagaattattttttataacacaaaaattacaaacttcagttctatagctactgttattatatattacttgaagtatacacctgtgatattgcaaaatatatatttggtcttcatctcaagtctcctggcatgcaactcctaaa

SEQ ID NO: 687799 - DNA, 624 bp, Homo sapiens
tgaagagaaagaggctgtaagaagaacttgggtttcttagccaaagccagtaccaagccttcaatcatgtgatgacatcatgttggatactttagtttcagctcaactgtcatagctgacaccatgtggaaaagaaaagagccactccactgagcactgctcagatttctgactcaaacaattatgtggaaataaaatggtaactgttttaagtagctaagttttgggcttgctacataggaatagatattgggagtattcagttgtgccycctctttttagcacaggattcagctagctcactccgtatgtttgtcagttaccaccatctttctcctttctaacttccaaaaacttgttcatatcatctcttctcccgtctctttttccttaagtccaatttctaaatcattttataccattttagctgggtttggggaagagaacattaaatgcatgtggtcactctatcatctttaactagaattattttttataacacaaaaattacaaacttcagttctatagctactgttattatatattacttgaagtatacacctgtgatattgcaaaatatatatttggtcttcatctcaagtctcctggcatgcaactcctaaa

SEQ ID NO: 687800 - DNA, 658 bp, Homo sapiens
ttctgttaatgatggactgggtaaagaaaagggggtaaatcaccagggaatactacacagccataaaaagtatataattatgtattttgctgtaacatggctgcagctggaggccattatcctaaggagattaatgcaggaacagaaaaccaaatactgcatgttttcacttggaagtggcaactaaatattggatattcatggccataagatggcaataaaagacactggggattactaaagcagagagggagggaggaaaggaggraggggagcaatggttgaaaaattaactaagtggtactatgctcagtacctgggtgatgggatcagttgtaccggaaaccacagcatcatgcaatatatacatgtaagaaacctgtacatgaaccccttgaatctaaaaaaaattttaacaaatatataggtatcaggtttttttaatttaaaaaaaatgtataatgtgttcctgtttttcatatagaaaccagaagatttggacatgatctgcatgtaaacaaactatgtcatttttaaacagtcatgaaaagtcataaaaagcctttagtatgaatgatttattaaattacaggtcctcatgtatatccagactattaggtttgaattttggcaccttcttacctgttgtttgacctta

SEQ ID NO: 687801 - DNA, 599 bp, Homo sapiens
ggagttctcttcttctctaattatatttttttatattttaccactatggagaataaagacaatctgtagtcctacttcaggcaaagtggcttgcttcatggccatgtgactaattctggccaacgtgatgtaaacagggtggtttgtgcaacatttcttattctttctgctacctgaaaactagaaagaacatacaatggctggtgctctggtaactatctgagactacacacagcagagaaaggagagaagtctatgtccctgacacygaaaatgctgtacaacacttgggccaactcgccaaggctctagaatgtaagaaagaaagaaagaaatatcccagcactttgggagaccgaagtgggcggatcacgaggtcaggagattgagaccatcctggctaacatggtgaaaccccgtctctactaaaaatacaaaaaagtagctgggtgtggtggcaggcgcctgtagtcccagctacttgggaggctgcagccggagaatggcgtgaacctgggaggcagagcttgcagtgagccaagatcacaccattgcactccagcctgggcaacagagtgagactgtctcaaaaacataaa

SEQ ID NO: 687802 - DNA, 2083 bp, Homo sapiens
tttctcaatgactgcagttaacttttatgggtgaagaaataatctactttctcattgctccttcctgattctcaaaatgtgatttccacaatgttccccttcatcccatgtctttccattttgccaatagaaagtcaagtggacctaaaatcttccagaaatagcaaaatataaacgtgtaatctaacctgcactttaaatgatatagagtcagccttccatatccatgggttctgcctccatggatttaactaactgcagagcaaaaatattttttaaacgttatgtctgtgcttaacatgtacagaattttttttctttcattatcccctaaacaatacagtataaccactatttacttagcatttgcattgtaccaggttttttcattggttttagagacagggttgctgtcatccaggctggagtgcagtggtgatatcatggctcactctaacctcgaactcctgggctcaagtgatcctcctgcctcagcctcccaaagtgctgggattacagacatgaacctctgtgcctggtctgtattagatattataagtaatttcaagatggtttaaagcatacagggggatgtgggcataggtcatatccaaatactgtgccattctatatataaagattttttgtatctgtgggaggtcctggaacaaaaaccccacagataccaagggatgactacaattctgactgagctgtaaactgaaatcctctgggatgaaacactttcctgattttttttcattcattttatacaacaaatgtagatactccattgtaggagaatcaatttgtaaagccaaaattggcgagaaatttccttgtccatttgagaaaacacagacatgcaaatttgcatcttttataaatttcaacccatgtgcctctagcatacaccccaagataattctctgaagtctgctatacctaaaacatacgttctcagttttgaagagtataatttgagagggcaaggatacttacttcatctttgcacacaaattgttcctctttcaaaggcaagatggcatatatttcaaagtgactatgatatggttccactctgtgtccccacccaaatctcatctcaaattgtaatcyccacgtgttgagggagggacttgtaatccccacatgtcgagggagagaggtgattggatcatgaggtcagttttccccatgctgttcttctgacaatgactgagttctcacaggagctgatggttttataagtgtttggcagtctctccttcacacacttctctctcctgccaccttgtgaagaaggtgcctgcttccccttccaccatgattgtaagtctcctgaggcctccccagacatgcagaactgtgagtaaattaaacctcatttgtttataaattatccagtattgagtagtatcttgatagcagtgtaaaaacagactaatagagactacaaaaaagaacttttaagaaaatcaaggagttagatttaaattaaaagagaagtattacatttaaaagaaaaggtaaagaacatttcctaaccctgggtctatagtgctttcagttggagttagttttaatttccacaggcctcattcacttacattcttctcaattatcagaattttgttctcctgggacaggtaaatagacaagaatccattgtcatcttggccgcaataatgttgcctcccttaattaagcaacttagttgttctgttgccagcctgaaattgttcttgatccactgatattttcatagggattatgtaaaatattttttcacttatgctgttttacctctccaataaatgcctcccaaatttatatgcatgcttctctgatgatgagaaacacagaactgaaagaaaattttaaaatatcctaactgtggacctgccaattcaaataccttaagagctacatagaaaatataaaggtcattaaactaagcaaactaacccaggaacagaagaccaaatacctcacattctcacttataaacattgagtacccatgaacatggagaagggaacagcagacaccatggcctacttcagggtggaggaggggagga

SEQ ID NO: 687803 - DNA, 1455 bp, Homo sapiens
gagaaaggaagaaatctgaaagactaagtgtttacttaaaagagactgtttaaatggaaagagtgggatctactgtaagttggtaaattttagacacatactcccacctttttcttcatcctatcatcactccactgggtatataagtcctcctcttaggactgtggagtggtgggctgttcacagaagaaattttggaaagagcgtggtagctgagcactgtgtttagggcactaactttttataaaccagacacacagtgtgagaggcactcactcttgcaacggtgggtrtttcttcccagattgctgccaaagggacagcttggagctgagtcagctccccacatacagactgtagtttcaattttgtaggaaatattttctagctaatgaggtatggatgttataagctatggctagagctatgaccattttttttgaagcccaccccgaaaggaatccagcaaagatttatgtgtgatgtttgtaaagtcactttttctgacaattgatttccaccccacacctgcagagaactaaaagcaacaaggcagagtctgttctcctcgccactccccaatggtggccggggcatcattactcctaaagtaatctggggctgcccttatgccacctgtaatttatcccatctccctccttcatttcctgtgactagtctgtaataaaccttttctgttctcactctgcaagtctttcttatctatctccacatcacacgcttcccactttacacctcaaccatggcctgttagcttccttatcgattttatgtgatcctccccaaaaccatctgataaattgttgggaatctaacatttcatttcattatcctactcaatattaatgttaaagtgacctgtcaatggtaaagtgacctgtccccaacctcctttcctgtctccacagtcagaattgcattcaagagttagccaagagctgcacaagttttaaaggcaggaaataccatcaaaccaatgcccatggtttggaaacttgggaggctggcaatttctatgccaagcccacagcgggcccctctatgtcttcattcatttcatgccattaggttggaggtgaagtttacatctcacgtatggcccccggccactgcacctcatatccagtcagtgtgatctattcactgcccgtgccatgaacaaatcaccttgtgagcctttgctcagcaagacctcccttgctgtctctacctcttcagatcaactcatattcctccctgtccatgaagcctttcttccatgatcaccacaggtttcgcagagttttcttttccatctgaatttttataaacagtaactttagtggtgaagactaattacattgtacctccatgccttattccttattaaagatgttcttatttcccttgccctttttaactgtaagaatgccagagtctaatcgctgtctcttg

SEQ ID NO: 687804 - DNA, 2257 bp, Homo sapiens
tgaatacaaatgaaagaacacctaagcacatcatggtaaaacagctggaaattaaagacaaaaaaaaattataagcagggagaaagaagacaacattttattcaaagaagccagaagactaataaattgacagatgactctacaaaagaaacaatgagatccaggaaaaatggaaaaacataatgaaagtatagaaataatcctgttgcttatttagtcccactctgaatcacctatctctgatgagaaaactactcccagagaggtaagtatctagcccaagataacaaagcaaagtcagaccagaattttaggttgccttaaaattcagtctcctagtttacttgtattcttcccactcaaagaagataaaaaacattttaccctaccaaagaaactactcttttctgtgcatacctttttcaaatatgtatttaggtatcccttcaaagaaaatacttttttttttttgaagatagagtctcactctgttgcccaggttggagtgcagtggcatgatcccagctcactccacctccacctcccaggttcaagcaattctcatgtctcagccacttgagtagctgggaccacagrcacgtaccaccacacccagctaaattttttttgcatttttagtagagacaaggtttcactatgttggccaggctggtctcaaactcctggccttaaatgatccacacacctcagcttcccaaagtgctgggattacaagtatgggccactgcacctgaccagaaaatattctttatataacccaactgctaaattttcactagacatattaacacttctgaaaacatagatttcatttttgctctttacaaagaactcttggaactaggagagttcctactaaaaaaaaaatccctgaagtataaaattcactggttcattttaagtactacattcctactttgtctaaaaattgggtaaaagggagtatcattttactgtgtgcgtgacgctttattcaacttcaattccaatatctcaaacaggacacaaccacttttttagacaacctctatagacccattttttaaaaaaagttttgaacatataaaaaaatcttttggtgcttaaaaacttacacttgcctaagtcatctattccacagctctggcagtaaagattaataaatgtcattcttcttaatgccacatcagaaaatgtggcctttcaacatgcacatttgtgcaattcaaaaccatggggggtctccttaaatgacttttcctgaatacattcagggatacacattactatgcatgatgaaagagatcagtaatgtttctcatttttataagacattatttccattttttacattactgtaataaagaggatatagcaaataaaatggaggcagctcactatttagaaatgtaaaggtgataacacttgctataggaattttctgtcaaatttacaggaaagaattagagattggaaagcctgaggaattaattctgggaatacgaaagcattttctgtgtagctgaattagcaatgccctcagattgtctcttgaaatactgcatagcactgagggcaccaaatgaatagaaaaaagtaggttcattttgctgctactaaatgcagaactttatatccctgactaatgttttaaaactggtcattacctaaaagtagtctcattatttttattaactgccaatcaaagcttgccctttaagtaaagtccatgagtgggcaaaatctacttttgccattgaagattttgtatctttgcggtagaatctgtttaacgttgtcttaccatgctaaatatctcagtaaccacccatgtctgtgccagatggaggtgactgctctagctccacatgcacctgtcagcaatccagcaatctaaaagagttaaatgactccatctgctcttcctgattgcctggagactgcccctcaaatgttagtggttttgtttgttaataaataataaaaggatgctttgtcaattatgtgacttgactgattcataatttgtgctaacaaatttctgtcaatattgagtgaatcaataaagaaacatttattaggtactcactgcatatctttatggtactagttgctataagatataggagaaaataaatatatcatttagaaggaaaacatacttaaaatcttcagagaatttcctagaaatttaccttctcctggttgtcacctctggtttaagcgcctaacatttttgaatttgtttagggaacat

SEQ ID NO: 687805 - DNA, 1952 bp, Homo sapiens
attgctgggcatttgggttgggtccaagtctttgttattgtgaatagtgctgcaataaacatatgtgtgcgtgtgtctttayagtaggatgatgtataatcctttgggtatatacccagtaatgggatggctgggtcaaatggtatttctggttctagatccttgaggaatcaccacactgtcttccacaatggtggaactaatttacactcccaccaacagtgtgaaagcattcctattttcggatcacataaatcttttgccttttattaatgaaaagtcatctttctattgatgtccatctattacaacagtaagacccaacagaagctttgaaattcaaaattctgtctcagttgaacagccaggtcaaagtcctgaactcccacttttcttctgtaaaatcaaaacaggaaacagttgtgatccttctgcacgatgaaaccccagagattgaagattgagtgtgcccgtagacacacacacacacacacatcacctctcaatacagatgttgaaaatagtagcttgattgccagggaccacaggaggcactgcctccctgccaagccagtggatgtctgccccaggctgccaaggcacagattgggcatgggttgacttcagtgaaaggggaactagtactcagatctagagttctggagaagatacctcgccttggactaatactgttgttgacaccaataatatcacctctcctgctgccttaaacaccatttcttatcagggtagtacttctgacaggttgccgttatgtcttgtacccaacatccatcaaagatagaagagaaagcgctcaggtagattttcagagtgttttatttgaaaccttgttgcaaaatttgaatcataaatgtggtgttatataaacacacctggaattacaggtgtgagtcaccattcccagctttctcatctttaagatgcgtactaacctaagcaaatggtaaagatatcgtttaatagatgctatgtcagcatctgaaaggcagaacccacaatatctgtggataaagaacaaattaaaggagctatttgatttgtaaaaatacatgggctagcacatatttctgagaaatagcaatagcacaaagaataaaaattatgctagttatttttactactcattccataagtatttgttagctacctactttttaataggtactgtgagtgacactgggaatacaaaataaacgaacatgatttatgacttcagagtactcacatcaggacatcaggaattgagagtaaagatatacacaaggacacgcctatccagtaatctcccctgcccggttcattttatagtaactcttttttcttccagtgctatgaatacacacgaatgagtttgccaaagttacactgcaataagaattaaaacttgctatcaagcaatttttttcttgaccatagctaggtaatatgagttaatcgttctcaaagtagactggaagaaaaagtaagataagaggcgactgattatggtaataaaataattaaattccattaagatcaattaccaacatagggatcttagcaattttctctgtaatcattctcaatggtcctttctcttactgccttatgccacaatatttattatctagaaaggaaattaacccaatcctctcatctcttcctggcttgattcagacggctcattttctcatcagaatgaatcctgcattcattccattctttgattgtgtgatattcacatttcctttgatttgccccagcacaacacattttcaacacccaatgtgaagtccacatgttgcaaaggatgactggcttttgctgagtgtctataaaccagggctggcttctttcctattcctaatctactctattgaacactgttcttttgagcaaaatcagatgcttaacatcctgaagtatcctgtaagcttgaacctgaaaaa

SEQ ID NO: 687806 - DNA, 1952 bp, Homo sapiens
attgctgggcatttgggttgggtccaagtctttgttattgtgaatagtgctgcaataaacatatgtgtgcgtgtgtctttacagtaggatgatgtataatcctttgggtatatacccagtaatgggatggctgggtcaaatggtatttctggttctagatccttgaggaatcaccacactgtcttccacaatggtggaactaatttacactcccaccaacagtgtgaaagcattcctattttcggatcacataaatcttttgccttttattaatgaaaagtcatctttctattgatgtccatctattacaacagtaagacccaacagaagctttgaaattcaaaattctgtctcagttgaacagccaggtcaaagtcctgaactcccacttttcttctgtaaaatcaaaacaggaaacagttgtgatccttctgcacgatgaaaccccagagattgaagattgagtgtgcccgtagacacacacacacacacacatcacctctcaatacagatgttgaaaatagtagcttgattgccagggaccacaggaggcactgcctccctgccaagccagtggatgtctgccccaggctgccaaggcacagattgggcatgggttgacttcagtgaaaggggaactagtactcagatctagagttctggagaagatacctcgccttggactaatactgttgttgacaccaataatatcacctctcctgctgccttaaacaccatttcttatcagggtagtacttctgacaggttgccgttatgtcttgtacccaacatccatcaaagatagaagagaaagcgctcaggtagattttcagagtgttttatttgaaaccttgttgcaaaatttgaatcataaatgtggtgttatataaacacacctggaattacaggtgtgagtcaccattcccagctttctcatctttaagatgcgtactaacctaagcaaatggtaaagatatcgtttaatagatgctatgtcagcatctgaaaggcagaacccacaatatctgtggataaagaacaaattaaaggagctatttgatttgtaaaaatacatgggctagcacatatttctgagaaatagcaatagcacaaagaataaaaattatgctagttatttttactactcattccataagtatttgttagctacctactttttaataggtactgtgagtgacactgggaatacaaaataaacgaacatgatttatgacttcagagtactcacatcaggacatcaggaattgagagtaaagatatacacaaggacacgcctatccagtaatctcccctgcccggttcattttatagtaactcttttttcttccagtgctatgaatacacacgaatgagtttgccaaagttacactgcaataagaattaaaacttgctatcaagcaatttttttcttgaccatagctaggtaatatgagttaatcgttctcaaagtagactggaagaaaaagtaagataagaggcgactgattatggtaataaaataattaaattccattaagatcaattaccaacatagggatcttagcaattttctctgtaatcattctcaatggtcctttctcttactgccttatgccacaatatttattatctagaaaggaaattaacccaatcctctcatctcttcctggcttgattcagacggctcattttctcatcagaatgaatcctgcattcattccattctttgattgtgtgatattcacatttcctttgatttgccccagcacaacacattttcaacacccaatgtgaagtccacatgttgcaaaggatgactggcttttgctgagtktctataaaccagggctggcttctttcctattcctaatctactctattgaacactgttcttttgagcaaaatcagatgcttaacatcctgaagtatcctgtaagcttgaacctgaaaaa

SEQ ID NO: 687807 - DNA, 1598 bp, Homo sapiens
gatctattatttagccagttgtgtattgcctaagcagttgattcaactcattagggcataagtcacattagggaagggatttcctttcttgctcatgctctaccctcagtgcctgaactgtgactttttcacagtaagaaatcaactaacatttatggcattaatgaatgaaccatctaaccattcattcatcctcaaagattactgccaaatatgcatgaattttctttcaatggaattgcaaataatacttattatctcactcaactttatctctggggctatgggcaaattgctgacatattattttaagtgctggcccacaattttaaaataggagctcatctctgagaatatcttgaaccaatggacacttctacttaattttcacacacttatctaccaacttattattgcactggtccaccttattaaccttttatgtttatcagcttggatgatacaggttacagacaataaacaaagaggtgtcctcagaattattgcttgttggattatcagattccagtttttttttccatcatacttttttaaaattgaatgatctgtcagtttttcacagaaagtttttgaagagaatcttcagatatgcccttggttaagtcacttctttctgggcatccattgctaatcagaacagaagacagttagaccacaacagaggcacaaatagagcaaaactctgagtggatggaaactatagatacatcttattttacctgcagagaggttttctgggggtggggggttatttatgygtgtgtggctgagggggtggttggttgccaatatataaaaatgttgttacataaagattcaaacatccaactttctagctacttcagaagtcagatctggcaacactgggtccaaagtctcatgtggtggccaaaggaaaattcctcctgtgtcctccaaaggtttgctgaaaaccaattcacaaaaagcagatgaataggagaaagggcatacaaatttattttaatgtgcatacatgggagaattgtagattgattacctaataacccaacggggtccagattgttatatacccttcttcttaggggaaagggagatggagcagtgtagatgacgttaatgggttagtaaatgatctttaggagaattcaatgggcttgaagaatatacaatggcctgggacagagtctgttggaccctcagagcgaacagtggtttgtgataaaaatctgtccaggtgtgttgacagactttagtcttccttcctgcaacatagttcagttaatgaaaactcatggaagggaccagaagtcatcctttccttttttggagggtccagattttaggcagatgagagtacttataagagtaacttaatcctgtactttgggagagacaggactgagagagaggacggtgggtgggtaggtcagaaagatctttaggcttctttttcagttcagcatgtcaaagggccatattttgggggtattgttttctgagcctcaacattcacatgagaacaggtcagggctaccctcttccataatagcttgatttctctggttctccccgtgccttcaaacccacattacccc

SEQ ID NO: 687808 - DNA, 684 bp, Homo sapiens
tccctctgaatttaaggctgcttctcaaatatgcccagatattaacactgaacgactataaactggagaacatttccattaacactctgctagttaatgaagtagataatataaattgtaaaatggtattctaagaagcaataataaagggctgagggctatcttcttaacagaaatattggaagacagaagacaataaagttgtatctttaaaaggctttatgacaataattgccaacatggaattctatactttgtgaagatgtttcaaaaatctagatgaaataaagactttcccatcaagcaaaagctttgaagatttgttgccagcacagcacatctaaatgaaaagaaatactaaataaaattcttcaggcagaggaaaaacagttccagaagcaatggtggaaatgacaaaaggaatgaagagcacgagaaaagggaaattcatgaactcaacgtaaaaacaaatgaagtttggctatgcaaaacaataggtctgcaaacactgactatgaaaaacaaygatgtctttgcagggtttcaaatatatgtaaaatagtcacaaaaatgtatgacaacggtaattcaaaaggaaagaaggggtagaattgcagtaaagtgccctaaatttctaatattatcagatagaaggtaaaagtaaatatacagcccatagtaagc

SEQ ID NO: 687809 - DNA, 1140 bp, Homo sapiens
aagggaaacgtggaggtgctctgggcctcatgtgcacacttgccccactgcctccctgtgcggccgatattcttacccacaatgcacaggtgagaacctggagcccagagaggtcaaggggcaggctgttggtcaccatctggccagtggcagcagagtgactcccatttcctcgcctccacaccagatcccactacaccaagaataccgctttctgaagagcacactcacaactgcaaccgtaacgcaaaagaacacaggctgtactagaaattgttcttccttctgtctttccttccttcctttgttcacttgtttggtccttccttcgattcattcaaaaaatatctcctgagcccttcctgtgttgcagggactgttccaggtctggagattgaacagggcaagtaacagataaattctccacctgcatggggcgtacatcctagtgggtggagaacggtgatgcaaactgaatggcatctgcgatggtgatgagtgcaagctgggaagacagatgagatgcaccaggagcacrtggggtggtggtaagattttaaataaggtggttgggaccttcattgtgactgcaccggtcgggcgggcaccccgttagactttcaaacaattttcacacttctctctcttgatcagtggagaagctattctccccacttctgcataaagagcaggaaagtaaaatggctcccaaggctccaaagaaggagtagaaatgacttgctgtgccgtctcagccctcaggtttcctggctgagctcttttcaccctttctggctttactggccgggagggaggacgaatggggccaccatgaaggcagccacagccacccagctcaacactttatcagccttcatgcagaatccctgctgcccacatgtggaggggcaggagcaccctcccagggaacgtccttgtataaggctggaagctggagtccagagctttgtaccagtcagacgccctgtgtcccctttagaaatgtaaatgacacagcaaataggcatgtctgagccccttgtaatcctgagggaaggggagctgggaatcagtctggaattaatggagatcctggatcatggacgggccacagggctaaactggggctcctcctcgctc

SEQ ID NO: 687810 - DNA, 610 bp, Homo sapiens
cctcatattcaaccacaggcagccctgcgaggagggatcattgccttctcagtagtagcattgcttctgtgagaatccatgtcctcctctgtaaagtgcgcaccctgaaactccctcgcagtgttgcatgagacagagtatccacagcactgctgttgctcattttatcattgcttctgttttggaggggagtcccagagaggagtaataggaagaaaaaaatccaactaaaattaaattttggactttttcttattcaaattgaaagaatactcattgtggaaaaacagagaaacattaacagaagaaaaaaaaattcaaatccaacgcaacaccttggggttatcccgctaggatttttcatacatatgtagctataagcgtggtgatcaaaactggatcatattatccttggyattatgtaggctgagttcttccatttataataaagcatgaggagcttacccctcagtaaaaatagattgctatcattgagttgtgtggtattccattgaattgatacactggaattgactttctctgtcccacttgtcaggccgtaagatagttgttttttcatatactacctcatgaaatgctcctggcacct

SEQ ID NO: 687811 - DNA, 591 bp, Homo sapiens
catcagtgacagagtggataaagaaaatgtggtacatacacaccatggaatactgtacagccataaaaaagcatgagtcatgtcttttgcaggaacatagatggagctggaggctgttatccttagcaaactgatgctgaaacagaaaacagaatatggtgtgttctcacttataagtggaagctaaataataagaacttatgaacacaaaaaagggaacaaaagacactggggcctacttgggggagggtgagaggaaggagaggagcaggaaaggtaactattggttactgggcttaatacttgggtgatgaaataacacacacagcaaagccctgtaacacttgtttatgtatgtacaaaagyttcacatatacccccaaacctaaaaaaaaaaaaaaaaaaaaaggaaagtgtgcttacgagctctgtgagtctgctgaaatgatggtagacgacaagctgtcctcaatcattcgccccccgctccccagccaattttctctgtgcaacagtggctatttactttggttacaagataaaatttatgtaagtggttgagcctagacttaggggcactagtttcagaaa

SEQ ID NO: 687812 - DNA, 602 bp, Homo sapiens
ccaagtaatatgaagggagcattttcattctgtcttgaacctcatcgcatcattaagctccatttgcagagaatggataagatagggcgaagtttagatgtgagtttgggattaaaaaaaattagagcaagtaggccaggtgcagtggctcatgcctataataccagcacttcgggaagctgagggaggaggatcacttgagctcaggagttcgagaccagcctgggcaacatgacaaaaccctgtctttacaaaaagtaaaaaaattakccctgtgcagtggtgtgcacctgtagtcccagcaactggggaggctgagatgggaggatcgctggagcctgggaggtaaaggctgcagtgagcagagatagtgtcactacactccagcctgggcaacagagtgagacactcactatctcaaaaaaaattaggggaagtctttatgcacattaactatgataaaacccccttcttttatattttgatatggctgtgtgtcacagctcaagttagctgcaagaggagtgatggtagagaaagccaatgtattagatgctgccaacaatgtttctggcgtcagaggctcacagagtgatcccttg

SEQ ID NO: 687813 - DNA, 3021 bp, Homo sapiens
tttatcgaggagatgtttgtgctgaaatcagaagcaagagccacagtttaaaaagctgcagagagagaatccttctttataaggagagaaataagttactgcacatgtcttttggggggaattgacggagaccaatatgactggacccaaaagagaaagggaaaatgtggtgggacaggaggcaggagaaataggagagaatggaacataataaagagttttggctttaccctaaaggcagtgggaaacaagaaatggcaagatcaagtcctacttttaaaagattattgtgctgcaatatggagaatgaattagaggcagggctagaatcagaccttttgagccactgttccctaaaacatgattatgttcctcaacatcaacaccccccaaccaaacatacacacacacacaaacacacacacacacacacgcaaataccagtctgtgatgcaaagtaaaagcaatcatataatatttaaaactgtatttaatctttaagtgacccaaatgtacatgggtgctgatagttaaagagcttttttctactttgtttcccattcccttttgtacgtttatgtgggtgtctgtcattcagtgagacagagaagtggaggaggactatgtctagaaaagactcttagtgatgatctgatctagggccagtaaatggaaggcatcacgtacttctcttacccccagtagaaactgattgttaaccacaataagcattctaacctgctgtgacttagaatcatgcttcagataagatcaatttgtcatctcagatcaaatagaaacccctcatttagaaggtaaaaaaaaaagatccaattttaaaaatccagctctacagaaaaggcattttgaataaatgcatatccttaaattactgttttaatttaaaattttaatgaaaacatttaaacaaaattctacatgtctgtgttatgctctaccattttcttaggcctataatttaagaatattacctgagttcatatccaggacagcattggcaaaccaatggagaaataaagataaatcgatattaaataaaaagatgttgtttgggtatataaatatcaatcaacaactaaaacttaacagttgcacgcttccatctgatggtcttgtatctcataggagtgtcctttggttctagaaagaaaacaagagatcacctgaaccatcgttggaagatgaggatgaggatgaggatgttgagtcccagggtggtaaagcttttggctcgaggtcacaaagcttattagtgacagaggttaggtagaaacaagtgcctcctaattcccagaccattgctcttacctgtggactacactgactccacaaacacacgtaccctggaaccctaactggacgacagatatgaaacgcaagagaagtcaacatactggattgagtgcaattattaccagtcacactcataatttttaaaatgacaatagcgttttaacaagagaacatctttgatcttcctattatcctaccagtacccttagccaacacttgagtgtctaatagcttactcacaggataacaagatttttccttttatctccctatcaatttgaaagagggtcgaagaaatgtaacacaataatggacgagaataagacttcatttaagaaaattcaatattcatgtatccaaacctacaaagagacaaattaggggaaattattcaaataatgcagactttcttataggtttgctttaaatagcttgctccattagaactttctaaatatttatagatcattaagtaattgacatgaagattgggggtggaggaagacagccttaaaatcagagcattaaaatattcatctaactgatggagaagaattttttcaaaaaaaacttaaaatacattgcaaaataatgcaaaatataatcttaagcatcaaaataatctcatatgaattgaaaatgctgtttctcaggagagaatgatggacattttattgtctgattcttgcattatttccatctctaattcagtgagttaaaggtaaacatatgcattgaaggagctctgggatatgtgttccaggaacttactaaaacggccatgtatttcacttttggaagactttatgcttttgtcctgactgcttcaaaattagaaaataatgttattttaactacatttatattcaacacagggatgttctgatccgattatttttttcttgagattccctctaatgtgtaacatgtattcactctcagaaaccacactgaaacactcatactcctccagagtatgagactcaagtcacatacttgatctcaaaatcatactcctctgcttttggctttgttgatcttacaaagctttggggcaaaagtcacctaaattgatccagagtactgaccaactaaaagtcatctaaactgatccaaaagtaatataaattgatccacagtttataaagttttccattgaaaaggtgaaggtaataaaaactaacttcgactttttgatgatttttttttctgatgagttttaagtgcttggaaggaatagtatgcagccacttcaagaaatcatattttaaaaagtggatccctctccagtaaggagggactctgaagtttaggaatatctgtagcccatggttcatggtaaatagttcaaaagcacttggagacaaggaaaggagaagagacttggagctccaaatctgagggatcctagcctagccagtagaaactgtagatgtctggggacagttaatgcttaaagtacataacaaggtgtggcaactgtattagtccattttcacactgctgtgaagaaatacctgagactgkgtaattcacgaagaaaagaggtttaattgactcacagttctgcatggctggggagacctcaggaaacttaacaatcatagcagaagatacttcttcacagggcagcaggagagagaatgagtgcaaacaggggaaacgccagacacatataaaaccatcagatctcatgagaacacacta

SEQ ID NO: 687814 - DNA, 586 bp, Homo sapiens
tataataacaataacattawtgttaactgccaattatggtacacctaatataagccaaatactgtgtcagatacaccacaaacacacaagatagctattactacccagttttacaaacaataacattgaggctctaggaagtcatattaccttcctgaggtcacagacctagtgaatgtgagagttgaatttggttctatacctatgtgaccaaaagtctctacatgaaccgtagctggtaatattaaataatattgagtgactgtgggcctactcaatgatgttttcgctgatgctgaatgtgttacacttagtgatttctctctcccttttttaaaactaaaaatgtctcctgatgcactcatatcagcatgctgaggagtgggcagttggtataagcttgtaggctttctagtctagagattgctccccgcttctgactgaggcacttttgccaaaaacataggcaatcccaataaagcgaggtgggctatttgtctcaagagcattgatacagaagacaagtgaataaatgttagttttcagtgaaaaggagtaaaagtaaaaggtgaggagtaagagaggg

SEQ ID NO: 687815 - DNA, 586 bp, Homo sapiens
tataataacaataacattattgttaactgccaattatggtacacctaatataagccaaatactgtgtcagatacaccacaaacacacaagatagctattactacccagttttacaaacaataacattgaggctctaggaagtcatattaccttcctgaggtcacagacctagtgaatgtgagagttgaatttggttctatacctatgtgaccaaaagtctctacatgaaccgtagctggtaatattaaataatattgagtgactgtgggyctactcaatgatgttttcgctgatgctgaatgtgttacacttagtgatttctctctcccttttttaaaactaaaaatgtctcctgatgcactcatatcagcatgctgaggagtgggcagttggtataagcttgtaggctttctagtctagagattgctccccgcttctgactgaggcacttttgccaaaaacataggcaatcccaataaagcgaggtgggctatttgtctcaagagcattgatacagaagacaagtgaataaatgttagttttcagtgaaaaggagtaaaagtaaaaggtgaggagtaagagaggg

SEQ ID NO: 687816 - DNA, 613 bp, Homo sapiens
ggttcattactttgggaagacagtgctaataataatgcaaaaggtccttttctgtcaatgagtataggacaagaaagcagggaatccagtcrcgactccagttagctgactgggaccaaggtctaggatctagcaatgtggcggtcaatgtgggaggacagtatcaagcacaagttgcatgttctggtatccaagttaggaactagtgttcacagaaggctccattcttggagtgtgtgtatgggagaagacaaagaggagaggctaggcaggattcagttctattatcagaaccaacatgtacatagtagaaggctgaacggaattatttatgagaccacacagcttcccagagcttactgtgggcataatggaattttacataaaaagtaagactctaaggagctaacttagaagttcagcaattgtagctgtgccactagtcctgattctggcattgacttgccaataaaaagacatttaactctatcaatttgcctctcttctttctaatacacatccgttgaagtctcctgggactaagtgatggtattaaatatttagaatgtgaagctgaaattaactaagatgcatagattcctcacctccaaaa

SEQ ID NO: 687817 - DNA, 613 bp, Homo sapiens
ggttcattactttgggaagacagtgctaataataatgcaaaaggtccttttctgtcaatgagtataggacaagaaagcagggaatccagtcgcgactccagttagctgactgggaccaaggtctaggatctagcaatgtggcgrtcaatgtgggaggacagtatcaagcacaagttgcatgttctggtatccaagttaggaactagtgttcacagaaggctccattcttggagtgtgtgtatgggagaagacaaagaggagaggctaggcaggattcagttctattatcagaaccaacatgtacatagtagaaggctgaacggaattatttatgagaccacacagcttcccagagcttactgtgggcataatggaattttacataaaaagtaagactctaaggagctaacttagaagttcagcaattgtagctgtgccactagtcctgattctggcattgacttgccaataaaaagacatttaactctatcaatttgcctctcttctttctaatacacatccgttgaagtctcctgggactaagtgatggtattaaatatttagaatgtgaagctgaaattaactaagatgcatagattcctcacctccaaaa

SEQ ID NO: 687818 - DNA, 638 bp, Homo sapiens
aaaagtagtaaaatcaaacttgagagcaagaatacactcatcttacccacgttaaaaatggttaaacaaataaaagaaatgagtaatggcattccaaagaggatactgatcatctgttttctccagtcatttgtttcaatgatacaggatggaactcagcttcacccattaaatattgaactaaatgtctgtggcactgtaaccagacggccagtgtagtatatctggctctattacgttatcccagccctccattcccaactttttaaaataagaaaataactttggggaacgatacagaggcatgggtgcctgctataacataacaccaaagtctgaaacttaggaactggaagtacaggcatgcacctgtgtgtcaagaagcaggtataagattatgtagaaccctgctattcataacaaacaactaaatatcattcatactaaactagatacattgtataatgtccatacaatggaatacactgtgatatgttcatacaacagaatgggaaagacccaaggaatgctacaatcaagagcatgaatgaaagccacacacgtagagttgagtgagggaagacacacatacaagaatatatactgttaagatycaatgtatttaaacttcaaaaaat

SEQ ID NO: 687819 - DNA, 657 bp, Homo sapiens
tgagaagcatgagtgcaaaataaacagtccctaaaatagcaagtaagcactgggctcgtgtgtgtgtgtgtgtgtgtgtgacacagagagagagrgaaagagagagaaggaggggagagaagagggagaaagaggaagaatggaatgggatgtggagaacagctagaagaaacctattaatctttctatcaatctccagatttggttagcacctggggcttcaaaaaaaagaaaagaaagaaaagaaaagacatttgctccatcagtatctccaactgcaccaaagggggaaattaccctttgacccctaaagccatttactaatgacctgcagtatcagattggatggcttttctcattagtgcatgactacattgcaaatgttattgccaggcagccgattataaaagcataaagagaaagtaattagcacaatcattttacatagagtaaattttagtgcagccagtttgtcagagatgcaatttcgtgggatcacaaccatgcattaatggagttatgggaaactgttaatttgttatttgaaatgaagtccttatctctggccagttagctcagttagttagtgcctgaagctaaggaggccaagggcatgggttgtgtttgcctccagtgctgtccagtttgactttgtaa

SEQ ID NO: 687820 - DNA, 646 bp, Homo sapiens
gaagcacaaggaatttagactaaatagtgacaatccaaggaacaaaagagattcttaaaaaactataatggatagatttagagagctaataaaagtaagacaaaagctataaaggaagaaaaattagaaagactgagatataataggtgctcaataaacattcgttgaatgaaatgaatttttataactataaaggatgtgtgtatttataaataatttataatggttcaatgtaaaacacacattcaacaaaagagttgaaagacatgagtggagaaatacaccagaaattagaagactaatccaaaagatccaatatcccattgagaaatggtcttgagagacagagatgggaacagagaggtggaggtatggaaattatcaggagccaacacaagaaaatttataatactgatggacaattatttccagacttaaaggacctacagttagccaatacagtaaatgctaaaaggtccacatttaaggccatatcattgaaatttcagaatagctggtattkaaaaaaaaaaaactcttaaaagcttctaaagagagagaaaacatattctatagaaagtgtagaaaatgtgaacaacatcaaatttctcagcagcaacactaaaagctaaaagaaaatagaata

SEQ ID NO: 687821 - DNA, 1470 bp, Homo sapiens
tgctcatggaayaattatttaactgtaataaaagaagggcagaggaagtaccaaaaacaccaccaccaatgacaataagcttgcagccttacggattttacgggactggggtttactggtgatgtatactcccgagttgtctgttcacaagtaccgcttccccccactcctgacctttcggggccacgaccccctgcttctggatgatatgtattcaagaacccccttcaggaggaggaggaatctgctgacccctgtcctttgccctcctctgagaatggtggcacaagtccatctttagtccagggaaagctgcggcggcaaatccagatgagaccacagttcctggctgagagtttaaaggaaggctgtgcccttaaggggctttacaggaacgagccctgagaggatgccactttaatagggctgagaattctgattcacattctgagttctctggcagaagatgtactcagcatcttctcagaaatggggagctgcttattttgaacaggactgcttcacttggaatattaaagtgctcttcttgctaaagggccagactccttggaataatggatatcaattccatctctgttcccccgggctgacaggtacccttcccggcttcccccatgccattttctcccaattctcctccccatcacctgccaggatcctcttctgctccccagatttcactctcttggccttcttcggctctagaaactgtattttgggaaccgcccgcagcatgtctgcccctacttctcacgaccccatactcatggacctccggcctactcacaacctgagaacaaatgcccacaagctccttcttctcgcttctggtgcctggtcacagtccaggtctcacctgctccctctaactcaacctccacctgtcctaggaaggtcctgagggtcgccccaccagcctgactcagggtgccgccactggcctcttgtatacgacggccttctacctggagtttctctagccagtcttttctccccagagccaggcttcacacggcatcaaaaggatttatctaagcccacatccctaagagtctgcgaggtgctctatgccttagcctggaacactttctggccttctttcttttgaaacccaattcaggctccaggctcccatagcacagaactgcttgtagtttccaatgaataccatgctggtttattatatcatctacttcctctgagatcatcccctccagtcccctctcagggacaactgttgcctttgttctcttctgtaagactcagcccgagcaagcaccgccttctccaggaggccccctccaaccttgcctgcccaccatggctgggctggcacaactctctctctctctgaaggggccaatattttccctacattatcacaatacatcatcatgcaattcggctttaagctagacttataaccaacaatcagaacaaaacagtctt

SEQ ID NO: 687822 - DNA, 645 bp, Homo sapiens
tatgtgcctgtgacttccactaaattgtgaaatcctcaaagacaaagaccagattgtgcccatctctgcattcccagatctccagaaacatgagagatgctccagaaatatttgtttagccaataaacctccagaaataatggaaggatatctcccccaaatgaacaaggtgtaccttagagatctttttcatcttccccctttgcctaatagaggcacccctattgcctgatataactcactttagaagagaggttaaagatgaaactctgagttttctgggcaggggtygggttgggggaaggataaagcccatactggattctaatcttcttccagatgtggcctcacatctgaaatacactccctgtcctcaggcatcatcaatgacatgccatcagttctaacaagttctcatggaatgcagtctttttaccctgcaggggcagagcactaggctaggtacagccacaagggtacaaaggcaccaagcagcaatagtaaggctcctaaccccttaagttgtgaaaccaagcctgtggtcatgggcaagtcaagagcagttaatgacttaagacttaagacttaagaatattcataaaattaaagcaaataattcggatttctggctgcagccacagtaac

SEQ ID NO: 687823 - DNA, 590 bp, Homo sapiens
caccatwtctcccttgcactactctaggtttttttttttaaactagcagtgattatcctctaacaaattatataatttacttattcattatgcctatggctttttgtctcccccattagaatgtaaattgcatgaggggagggaccttcatctgttctgttcactgatatatttcaaatccttttaacagtgcctggtatatactaagttttcaataaatattattgaagtgaataaatgaatcaagggaagacagccaatcttgtatattgcaaaacaacctaatgtcactttcttcccccaccccaccgcccccctgagacgaagtcttgctctgtcacccaggctggagtacagcggtgtgatctcagctcactgcaatgtccacctcccgggttcaagcaattatccttcctcagcctcccgagtagctgggattataggcacctgccaccaccctggctaatttttgtattttctaatagagatggggtttcaccatgttggccaggctggtctcaaactcctgacctcataatccaactgcctcggcctcccaaagtgctggggttataggtgtgagccaccgc

SEQ ID NO: 687824 - DNA, 593 bp, Homo sapiens
atataagagtatgcaaattactataatggggctaaataccaaagtgctcaacgggaacacagagaagcacttacttactacaggtgagggtctgtagcctcgggtgaaaagaaatattcttagaggctgagacatataggtaaaacctgaaacgcaatgggaaatttttccagtgaaatcattaaacagggagtatacactgcagatcctggaaacaccatatatgctgatgttgggaagatcccaccttcaggtgttttgattctgtaagtttcaagtgaagcccaggaaagtatatttttagcaagcatccccaagagattccgtgcaagtgattaaatacttcaagaagattgatggcaatatgattgtggtttcaactagttcagaatgcgatcatcctggaaaatttgtctcaggcatccatgaagcagcttctttggcaccatttatattaccaacttaaggcatgttatatctgttgtttgtaagcttcggaggctaggaatgtagttcaggagrtgggccagatatctaccaaggtggaaagaagtgcaggagggtggaatgcttgaggaatataccacaaggtg

SEQ ID NO: 687825 - DNA, 1276 bp, Homo sapiens
  misc_feature 444, 953, 979, 980, 981, 982, 983, 984, 985, 986, 987, 988,989, 990, 991, 992, 993, 994, 995, 996, 997, 998, 999, 1000,1001, 1002, 1003, 1004, 1005, 1006, 1007, 1008, 1009, 1010,1011, 1012, 1013, 1014, 1015, 1016, 1017, 1018, 1019: n = A,T,C or G
  misc_feature 1020, 1021, 1022, 1023, 1024, 1025, 1026, 1027, 1028, 1029,1030, 1031, 1032, 1033, 1034, 1035, 1036, 1037, 1038, 1039,1040, 1041, 1042, 1043, 1044, 1045, 1046, 1047, 1048, 1049,1050, 1051, 1052, 1053, 1054, 1055, 1056, 1057, 1058: n = A,T,C or G
  misc_feature 1059, 1060, 1061, 1062, 1063, 1064, 1065, 1066, 1067, 1068,1069, 1070, 1071, 1072, 1073, 1074, 1075, 1076, 1077, 1078: n = A,T,C or G
tcttgctgacttcaggagtgaagtcgcagaccttcacagtgagtgttacagctcttgcagtgcatccagagttgttctttccttccagtgggttcgtggtctcgctcacttcaggagtgaagctgcagaccttcccagtgaacgttacagctcataaaggctgcatggacccaaagagtgagcagcagcaagatttattggcaaagagctaaagcacaaagctttcacagcatggaaggggacccaagcgggttcccgctgctgggtgggtgtccagcttttattcccttatttggacccrcccacttcctgctgattggtccattttacagagcgctgattggtccattttacagtgtgctgattggttcgtttttacagagtgctgattggtgcatttacaaacatttagctagacacagagtgctgattggtccgttttancagagtgttgattggtgcgtttacaaacctttagctagacagaaaagttctccaagtccccactcgacccaggaagtcaggctggcttcacctgtcacttacatcatcatttttagtgctgtcacctctgtccttctttcttcatccctaaaggcatagttggcttacaacctgtgctgtattgactcttccctttttctcccctgggtttttttttttccctctcccttaatttgctcccagaaaataccacgtgtcagggctgggtaaagatgcaagtgtccagtttggtcagtaaatagaagatgagaataattgaagggtaagtcatttttaaattatttttgttccctctaaatggtgattatttaactatcttgatatttacactacaataaaactatctaccaaagcacacacattaaatggcatttgtgtcctgacactgagaaggaaatgcataatgagaccatcacctaccaaagcacactcagtaaatgaaattttgncctgagtaactaataagtcttttttnnnnnnnnnnnnnnnnnnnnnnnnnnnnnnnnnnnnnnnnnnnnnnnnnnnnnnnnnnnnnnnnnnnnnnnnnnnnnnnnnnnnnnnnnnnnnnnnnnnntcatcacaaggaaaccaccaaaaaaaaaaaaatggtgaaaaggagagcaggactctgaccccccgtggtggccaggtgacttctggtggattccaaggtcaccacccagatcccagaaacgatcatagcttaacattggaatattaaagcatggtcttgcttctcatttggggaattccagcatcacaaaattctggt

SEQ ID NO: 687826 - DNA, 1276 bp, Homo sapiens
  misc_feature 444, 953, 979, 980, 981, 982, 983, 984, 985, 986, 987, 988,989, 990, 991, 992, 993, 994, 995, 996, 997, 998, 999, 1000,1001, 1002, 1003, 1004, 1005, 1006, 1007, 1008, 1009, 1010,1011, 1012, 1013, 1014, 1015, 1016, 1017, 1018, 1019: n = A,T,C or G
  misc_feature 1020, 1021, 1022, 1023, 1024, 1025, 1026, 1027, 1028, 1029,1030, 1031, 1032, 1033, 1034, 1035, 1036, 1037, 1038, 1039,1040, 1041, 1042, 1043, 1044, 1045, 1046, 1047, 1048, 1049,1050, 1051, 1052, 1053, 1054, 1055, 1056, 1057, 1058: n = A,T,C or G
  misc_feature 1059, 1060, 1061, 1062, 1063, 1064, 1065, 1066, 1067, 1068,1069, 1070, 1071, 1072, 1073, 1074, 1075, 1076, 1077, 1078: n = A,T,C or G
tcttgctgacttcaggagtgaagtcgcagaccttcacagtgagtgttacagctcttgcagtgcatccagagttgttctttccttccagtgggttcgtggtctcgctcacttcaggagtgaagctgcagaccttcccagtgaacgttacagctcataaaggctgcatggacccaaagagtgagcagcagcaagatttattggcaaagagctaaagcacaaagctttcacagcatggaaggggacccaagcgggttcccgctgctgggtgggtgtccagcttttattcccttatttggacccgcccacktcctgctgattggtccattttacagagcgctgattggtccattttacagtgtgctgattggttcgtttttacagagtgctgattggtgcatttacaaacatttagctagacacagagtgctgattggtccgttttancagagtgttgattggtgcgtttacaaacctttagctagacagaaaagttctccaagtccccactcgacccaggaagtcaggctggcttcacctgtcacttacatcatcatttttagtgctgtcacctctgtccttctttcttcatccctaaaggcatagttggcttacaacctgtgctgtattgactcttccctttttctcccctgggtttttttttttccctctcccttaatttgctcccagaaaataccacgtgtcagggctgggtaaagatgcaagtgtccagtttggtcagtaaatagaagatgagaataattgaagggtaagtcatttttaaattatttttgttccctctaaatggtgattatttaactatcttgatatttacactacaataaaactatctaccaaagcacacacattaaatggcatttgtgtcctgacactgagaaggaaatgcataatgagaccatcacctaccaaagcacactcagtaaatgaaattttgncctgagtaactaataagtcttttttnnnnnnnnnnnnnnnnnnnnnnnnnnnnnnnnnnnnnnnnnnnnnnnnnnnnnnnnnnnnnnnnnnnnnnnnnnnnnnnnnnnnnnnnnnnnnnnnnnnntcatcacaaggaaaccaccaaaaaaaaaaaaatggtgaaaaggagagcaggactctgaccccccgtggtggccaggtgacttctggtggattccaaggtcaccacccagatcccagaaacgatcatagcttaacattggaatattaaagcatggtcttgcttctcatttggggaattccagcatcacaaaattctggt

SEQ ID NO: 687827 - DNA, 616 bp, Homo sapiens
atggctgatggagttctcacatagcatcactctgatttcctcttttgcctccctcttccacttttagggacccttgtgattacactaggaatacccagttcatcaggttaatctccctattttaaggtcagctgatgagcaaccttaagtccccttagctatataaggtagcatattcacagattccagagactaaggtatggatgtctttgaggmgtcattattctgcccatcacaacttatatgactctggacctctggaagtgatcctttacataacctcatgggtccagtgtggaccttccaatggtgacatcagagtcacctggaagctttttagaaatgcagatactccaaacccatcccagaccttcagaatcagaatctacattttcacaaattttccgcggattagatgtgcatgtgcagtgagtttgagaagccctctccagaggttccctgagcaggcagaggaaagagcttagactctggtgttgaaaaatgattttatctggaaacacgtaataaggaaggggtcctgaggagcccagtcaatagcacccctcttccctgtcagagctctgaacaaatagaaatgtaagaaaaagaagggagc

SEQ ID NO: 687828 - DNA, 1184 bp, Homo sapiens
aaaaaaaaaaaaaattaagtcaaatcgaatattaagaaaaaatataaaacagaccgggcacggcggctcatgcctgtaatcccagtactttgggaggccgaggcaggtggatcacctgaggtcagcagttcaagaccagcctggccaacatggtgaaaccccatctctacaaaaacacaaaaactagctgggtgtggtggcatgcgcctgtagtccaggctactctcgggagactgaggcaggagaatcgcttgaatccgggaggaagaggttgctgtgagctgagattgcaccactgcactccagcctagggaacagaatgagactccatctcaaaacaaaacaaaacaaaaacaaaaacaaaaacraaagatataaaacaatgcaaccctatttacatcaattctaccctgttagaaaactaaaaacaggcggggcacggtggctcaggcctgtattcccagcactttgggaggccaaagcaggtggatcactgaggtcaggagtccgagaccagcctggccaacatggtgaagccccgtctctactaaaaatacaaaaattagccaggcatggtggtaggcgcctataatcccagctactggggaggccgaggcaggagaatcgcttgaacccgggagtcagaggttacggtgagccgggaacccaccactgcactccagcctgggcgacaaggaggaaactccgtctcaaaacaaacaaaaaaaacaaacctatagatttgactgtattgattcaaagcctatagtctttcccataaacacgtgctgcatccaaaatcatggttttaatctagttaaatttagccttctgaagattaagcggtttaaatatcacttattagcctaatctctaggctgataactagagacctggaaactgcttaagcacttaagacccctaaagacaaggacatgtttattccttggttaaggaataaacagtttgtactctagctttctttcaaaaaaataaaatttaataaaataaaggccacgcatggtggcttctgcctgtaatcccagcactttgggaggctgagacaggaggattgcttgagcccaagagttcaagacgagcctaggcaacacaggaagactcagtctctacaaaacccatgaaaactagccagacatggtggttcaagcctgtggtcccaccta

SEQ ID NO: 687829 - DNA, 580 bp, Homo sapiens
gccagaatctatttggattttttaaataaggaaaaaaaaatttcttttgactgttgatccagaaaatcattgttagcagctacagcagatacctatctaggaaagacgaatccaatagagaacttgagatctcacagcattatataaacattttctctgtctaatgccataaatgcattgttctgtatgtcagctgtcacgtaattatattcatatgtgtatattgtatgtcatttttcatcatatgcttttttaataaagtaattttgttgaaatcgcctttttttttcattttgcatcttcttaactcttcttcctagaccttcctctattgccatgttccacaaaggatgaagaaaggaatacgaaggaagttttatttgccttcattaatttgttttatagaactcaaagggttgagtttctgttcacttaggaatatgtcatgtgactgtccactkacacttactggtggtgtgtgagattacacactagttatattaaacattgtaaatatctggacaaaaagaagagttaaatttcagagattcctatgaatttgagaggtagataaaatggg

SEQ ID NO: 687830 - DNA, 997 bp, Homo sapiens
ttttttgagacagagttccactctgtcgcccaagctggagtgccgtggcgctatatcagctcactgcaagctccgcctcctgggttcacgccattctcctgtctcagcctcccgagtagctgggactacaggcacccgccaccacacccagctaattttttgtatttttagtagagacagggtttcaccgtgttagccaggatggtctcagtctcctgacctcgtggtcctcccgtctgagcctcccaaagtgctgggattacaggcgtgagccaccgtgcctggctactatttcttaaaaaacaaacaaaactataggaaccttgcattatgtcaatatctgctccttgcccagactttaccctatgcattcctaaactcagaaattgtcctgtgccttaatattaagggaaggtgaaaggaaaattcacccagaatagactagtggattatgctctccactatataatcaaaaccactaggctttcaatggatacgtaaacatgttttggttgctaggtctttaatggctgttatttttggattctgttcatgatccacttcccaccagtaagtctgatgtgacacagctgagttctaaatatgctgcatgtgcttaaaaaaaaaacgctgctgaaggttgtgctgtctgcattcttagcggaaaagacaggtgatagggttttttagccctgttattcctattctcctgttgagatttttttgtttctcttgaggcctcatcaacctcatgaagaggaactcagggaaagcaatatccctgctaatacctctctgtggaatgtggtagcaggagcagttaatagagctgcctcctgagaatggggttagtgttgttaaggcaacagtgccccagataccctcttggcagaggactggttgaatttgagttgtatgggtttttgaaatgtttataagatarcatctatttaaagacattgtgactataaaacagctttgtgttgttaaaataata

SEQ ID NO: 687831 - DNA, 997 bp, Homo sapiens
ttttttgagacagagttccactctgtcgcccaagctggagtgccgtggcgctatatcagctcactgcaagctccgcctcctgggttcacgccattctcctgtctcagcctcccgagtagctgggactacaggcacccgccaccacacccagctaattttttgtatttttagtagagacagggtttcaccgtgttagccaggatggtctcagtctcctgacctcgtggtcctcccgtctgagcctcccaaagtgctgggattacaggcgtgagccaccgtgcctggctactatttcttaaaaaacaaacaaaactataggaaccttgcattatgtcaatatctgctccttgcccagactttaccctatgcattcctaaactcagaaattgtcctgtgccttaatattaagggaaggtgaaaggaaaattcacccagaatagactagtggattatgctctccactatataatcaaaaccactaggctttcaatggatacgtaaacatgttttggttgctaggtctttaatggctgttatttttggattctgttcatgatccacttcccaccagtaagtctgatgtgacacagctgagttctaaatatgctgcatgtgcttaaaaaaaaaacgctgctgaaggttgtgctgtctgcattcttagcggaaaagacaggtgatagggttttttagccctgttattcctattctcctgttgagatttttttgtttctcttgaggcctcatcaacctcatgaagaggaactcagggaaagcaatatccctgctaatacctctctgtggaatgtggtagcaggagcagttaatagagctgcctcctgagaatggggttagtgttgttaaggcaacagtgccccagataccctcttggcagaggactggttgaatttgagttgtatgggtttttgaaatgtttataagatagcatctrtttaaagacattgtgactataaaacagctttgtgttgttaaaataata

SEQ ID NO: 687832 - DNA, 607 bp, Homo sapiens
gcaagtaaacaagggggtcagtcatccaggagtcttacctaaaggtggttctttgtagtaagccctctcatggaacacaaatggaagatttctcagccattgctgtttgccaggggcacagggctcaagtaaagctcagcatcacctatggtcaatgtgtaarcacaagttgccattgttctttctgtttttcattaccctgtcatttctactctttggaatcacttcccaaacaaactacctacatgtaaaccttttactggctctgctttatttaggaaaactagcctaagatagaaaaacaaaggcaatctttacatttaacctaaatgaacagttaatattgttaaaaggaccagcaataccagaatagacttctggataactggcttgctctaaaatactccttggctttgaagagagctttgtcaatgcagaaacatcagtgcctgtgaatctgaaggtctgtattgaagctactgaaagttatctgaatttaggaaaaaaaaatgttcacactttcaagatttcaggtgttcagtcaataaaatatagagaatatctgactcatggactatgtataaaatatagaaaagttctttgaatt

SEQ ID NO: 687833 - DNA, 686 bp, Homo sapiens
tactaaaaacctgttttttaagatctaaaatttaaatttaattgggtatcatgtacttcatctgacaaatgtaaccccagagaagccatcactaggttataaggaattgtaaaaagatatttattgcagcattctttatggatgtcatccattggggcaacctaaatgtccactgccaggaaaattaaaaaagaaattacagttaatctgtcgtgtcaacctttcttttcttcattttttttttcttttataatagttcttttttaaaacttttaagttcaggttacatgtccaggcttgttacataggtaaggttgtttcatggtggtttgttgtacagattattttgtcaccaagatattaaacctagtactcattaattatttttcctgatcctctccttcctcccacccttcaccctacgataggtcccagtgtgtgttgttcactctgtgtgtgtccatgtgttctcatcttttagctcccatttataagtragaacatgaggaatttggttttctgtttctgtgttagtttgctaagaataatggcctccagctccatgcatgtccctgcaaagacataatctcattcttttgtatgcctacatagtattccatggtattatgtgtaccacattttcttgatccagtctattattgatgggcatttaggttgattccgtg

SEQ ID NO: 687834 - DNA, 601 bp, Homo sapiens
ttttcaaaagcatgtctctattctattctctggaacaagagtagctactttaattaggtaaattttccccagattctgacattggataataacatataccataagtttactcactacacttacagatatttttcattaagaatgtaataatgctcacaccttcattaactctgtttagcagtgttaattacattggatgctgaagtctctcacagtttttttcaatgccatttcatcaaagcattggatctcatggctagaayataataaatgtataatagagttaatatttatgtaacacaaaccctttctgttagtatcgtgttcacaaaggcaggagccatagcttatttatcagtgtttacaatctctggcattaggtcctcagccttcattctcatgttgtagaatttaaccatttgcattcaaaaatatctatgaaaatgtctatttatttagtcattcacaataggcaacatgaattcaatgtcaaagatgctgacttaatatcttcttaactttaattaatgcattctgtagggactctagcagagcagtaaagtataggggagcctgtatttgtcactctcctctaacaaat

SEQ ID NO: 687835 - DNA, 1419 bp, Homo sapiens
ggaaacataaaaactattgtgaccatgaggaatggaaagctctatttcaacttaaggaatctgtgaagataattttgaggagaaacatttgtgtaagacttttgggtatgcaaaggaaaagaatgtgataattcactaaggggatggatttcttatgatttttattttctttctctactatagctttatgttttcaaccgacttgaaattgggttcatttgtatccacatagctaaactaacagtacagagaactgagactatctttatcaatgtgataattatttctttcatgaaattattcctcaagmagataaagctataaaccaattaatagcttcaccatttgtttcaggaaattcttttaaatgaatcatctggacaaagagttccctcatgttggctattagttgtattcaatatagaatactcattcacttgggcaaagttctgcttatgaaacaaaagaaactcacctaatttttttcaacaatcttataaattatcttatgaaattttctcaaatacaatcagtccctaccttgaaaaatccactttaaactacttgattccagatcccaacccctataaatatccttctttgaactccttattttgtgacataactaagattctattaagttcatgatttttcctcttagactatgttaatatattgagctttgcttaaccaacagtttattctggtggtcttcgaacggagtcaactgctgacaattttagagtgctgaccaaaatccagttgagacacctttgctaccgtggttcaagacccttgactcagaaagtcaactactctgaagccctggagctttttactaaggactcttcatgaccatgtgatgctctcccttacagaaggacatctaataaatatttgcttgatcattgtttttctgttgttttggttgttttgacagccaacaactttaagtaatttgcttatagagaatcttaccattccatatccctaatttgagtttcatttttggcagatatgattcccagatttttttttccattgagaaaagtaaatatcacaatgaataaatgtccgttcaaaggtcacccaattattaatgaacacagataaagtttgtatcaaggtccagctaaagttatcaagactagtggtacacactgctggttaaaatttatgtaagagaattgtgcctccagaaaaaatggaatagttgcacttttctcctcttgccaagtgtgctaaaatcctgaaaattatatataaaacaaatctatggagacgctaaaggatgaagagaagaaaacagaaaagttaaggaccttgggacccaagaaacaacataggaatgagtaccatgggtttgtggttttcattttaatttttaatttatttttagtttttgtcttcattatgtca

SEQ ID NO: 687836 - DNA, 1419 bp, Homo sapiens
ggaaacataaaaactattgtgaccatgaggaatggaaagctctatttcaacttaaggaatctgtgaagataattttgaggagaaacatttgtgtaagacttttgggtatgcaaaggaaaagaatgtgataattcactaaggggatggatttcttatgatttttattttctttctctactatagctttatgttttcaaccgacttgaaattgggttcatttgtatccacatagctaaactaacagtacagagaactgagactatctttatcaatgtgataattatttctttcatgaaattattcctcaagaagataaagctataaaccaattaatagcttcaccatttgtttcaggaaattcttttaaatgaatcatctggacaaagagttccctcatgttggctattagttgtattcaatatagaatactcattcacttgggcaaagttctgcttatgaaacaaaagaaactcacctaatttttttcaacaatcttataaattatcttatgaaattttctcaaatacaatcagtccctaccttgaaaaatccactttaaactacttgattccagatcccaacccctataaatatccttctttgaactccttattttgtgacataactaagattctattaagttcatgatttttcctcttagactatgttaatatattgagctttgcttaaccaacagtttattctggtggtcttcgaacggagtcaactgctgacaattttagagtgctgaccaaaatccagttgagacacctttgctaccgtggttcaagacccttgactcagaaagtcaactactctgaagccctggagctttttactaaggactcttcatgaccatgtgatgctctcccttacagaaggacatctaataaatatttgcttgatcattgtttttctgttgttttggttgttttgacagccaacaactttaagtaatttgcttatagagaatcttaccattccatatccctaatttgagtttcatttttggcagatatgattcccagatttttttttccattgagaaaagtaaatatcacaatgaataaatgtccgttcaaaggtcacccaattattaatgaacacagataaagtttgtatcaaggtccagctaaagttatcaagactagtggtacacactgctggttaaaatttatgtaagagaattgtgcctccagaaaaaatggaatagttgcacttttctcctcttgccaagtgtgctaaaatcctgaaaattatatataaaasaaatctatggagacgctaaaggatgaagagaagaaaacagaaaagttaaggaccttgggacccaagaaacaacataggaatgagtaccatgggtttgtggttttcattttaatttttaatttatttttagtttttgtcttcattatgtca

SEQ ID NO: 687837 - DNA, 886 bp, Homo sapiens
ttgtgactccctttccagcaatgtcagtactgttcaaatggcaaagtgcaatatggcaatgacaacagtattagaaggtatgtataggttccacttgcccaggctgcctaaggctgaatcccattctgaattctaatatggtgccatgctctgggaaggccagatagccatcatgtagaaaagacagggattttccacatataaattgactctggtatgtgtttatccatccatccccatagtacttctgccagtgccactcccgtggacttaagtaatgctgtagccattgtcaagcattatacacaaaaaatcccaaccagggaagatatttagcagcagaagatcagagacattggactcattctgatagaattctctggtcttagcaagtcaccaatcttcccaaagcagctggcttagaagagctacataaggcttagtcataagactagctaaagaacagaggccagaattcatggtccaggaccctaaggatatattttcytaagtaacttacttaaggaatgtttgctttccatcctaaaatcctggggcttcgtgtatttgtgggcatagtactcaagtaaaaaatagctccatcaagaaaacttatagtttatttgtattggaagctgagtctctgtcctcagcactatatactcttaatgctgcttaggcctcagaacctgctactgaattacctatgttttaccttattttttttttatccataatctccttcccccttcatataagaaatactcttatatgaagagtatttctggccaacagcttagattttggccagggacatagctgaattatgatgagctaatggtgataaagttgctgatgattttctgtgccccttatgtaggaggca

SEQ ID NO: 687838 - DNA, 637 bp, Homo sapiens
taatggttttatataaaatgagaactgatatatatttttgtatatatatgagaactgatatayatattatagatgtatatatataaaattatatatagaaattgctgtagttcgaatggggctttttgttttatattctttttttccttgaggatttgactgcagtgaatgttgtgaatcgtcggttgactttttttctgagtgccttcgagggccacggctctgtacaggttttaggttgtatatagattcctgtggtgggtttcagaggcgttgctcattggaggaatatattttcctttggtggtataattcaggctgcagcctagcagatactgcttaggagtacgggccagcagataggctctttctcagctacacaccccttttgtatttcagtatgcatgtaacagggctcccttcttttaaatctggattgtggctgaggacacatcctggtacctgatgtctctaagcaagtttcccagcttcttccttcctcaactatggtgtttggcttccctctctatagaatttcgtgttttctcaaaatgtctctttgaagtgtaatgatttccctcgatattttggttcctcttgatgaaagagacatttcctggttgcatcataaaatgta

SEQ ID NO: 687839 - DNA, 633 bp, Homo sapiens
caagtgatttcaatgaagtttgagccatgagtgaggaaactacaaaaataagaagatgccatttcacaartggggcaaagatgatttttctagaatgtgattttactataattttgaaattacttagtgtaccataataaaatagactctgtatcattgaataattgaatcttttctagcttcttggtattaaactttgctgtagtgaacatctggaaatacattcttatgagcttctcaatttttttatgctataaattctaggaagtagaactattaaagtatttgaaatttttaaagttctggacaaatagctcaaatgcccactaagaaatgtataaaaatgtcttcttttaccaatagtatatgaaaattcaaatttcaccctcctatggacaaacctaggcatcattaaataaatgcaaaaacaaaaccaaaacagaaacattttactaatataagaggagatgatataattgttttccattttgcattattaatgatattggatgtctttttactggagatgtttatatattttgtgatttatcttcattttggttcactttattataaattcacttttatttttatattatcctccctatctttttgttttacaaatgtttttgc

SEQ ID NO: 687840 - DNA, 633 bp, Homo sapiens
caagtgatttcaatgaagtttgagccatgagtgaggaaactacaaaaataagaagatgccatttcacaaatggggcaaagatgatttttctagaatgtgattttactataattttgaaattacttagtgtaccataataaaatagactctgtatcattgaataattgaatcttttctagcttcttggtattaaactttgctgtagtgaacatctggaaatacattcttatgagcttctcaatttttttatgctataaattctaggaagtagaactattaaagtatttgaaatttttaaagttctggacaaatagctcaaatgcccactaagaaatgtataaaaatgtcttcttttaccaatagtatatgaaaattcaaatttcaccctcctatggacaaacctaggcatcattaaataaatgcaaaaacaaaaccaaaacagaaacattttactaatataagaggagatgatataattgttttccattttgcattattaatgatattggatrtctttttactggagatgtttatatattttgtgatttatcttcattttggttcactttattataaattcacttttatttttatattatcctccctatctttttgttttacaaatgtttttgc

SEQ ID NO: 687841 - DNA, 594 bp, Homo sapiens
taccatataaacctggccaaatactgttcctagattagccttttttgttttcctctccctgaccctccttactatcctttattatactacttatgcgagtatacagkgatgtctgtgtgtgcagtttcctcaggtttaacttctaaagattagggactgtgtgtagcataagatgttatacaggaaatattttaataaatgtttattgaactcaattagtcctgtcatataatattggaacagcaaaataaattttttaaatgaaggttccagtgaattacatctcaatcattgaattatagactctaagagtttaaaaaagtcctcttccaatacttgaaatttcatttcaaatctttgtttctaatagtgacccaaactctatttgaccatataatgatgagaagcttttgacctctggaatagcttatttcaataccggtaagctcagagtttaaaaattccacctttagattggcaaaaacacatcattctttagctcctacccagaacaagtctgtgaatttttccttcttatgacaaccatttaaacatatcaagacagctcatgtttcctacatcttttattcttca

SEQ ID NO: 687842 - DNA, 657 bp, Homo sapiens
aaagccatcactgcaatcaagataaaaaacacatttagttactaaacatatttagttattggaatgtcagaaccagatttcatcaccagtaaaaattttactttatgttgcatttcaaaaattaagttagatttgtgtatattcatttgtgtttagtcacaaagcattgtttttgtaactaattaatggtttttgtcttgttttttaaaaaatttagggtgtggctggaatgcatgctgtagcatgastggcctccagtggtgtctttgaagaatagcatcactgggaaagtcaaagcaacaggtgaaatttaaaagataagagcaatttgcacatcagctaagatgctgtggcacagtctaattggcaggggctggtgaaatagaacattagatcttcaaaaatggaaggtgagaactaccctcttccaatgttgggattcctcagtggcaagaagtgctctgatgctgagtgatgcttgactgcagttattactcaggaatttttcacagaggaaacatcaaggtttatattgattttctttttctagaagagacttttttaggctgcatttttttctactgtgttgatgcttcagaatatatctttattatttaccttttttccttttgtgcctttttcttcttacagctttta

SEQ ID NO: 687843 - DNA, 667 bp, Homo sapiens
tatatttttagtagagacagggtttcaccgcgttagccaggatggkctcaatctcctgacctcgcgatccacccgcctcagcctcccaaagtgctgggattataggcatgagccaccgcgcccagcgaaagtcatgtgttctactgcaagatactatactaatcagttttcattctctatgatattcattgaaagagaacaggaagctcacaaagcagattaaaaagggaaatgaggccacgcacgggggcttatgtctgtaatcctattgctttgggagggcaaggcgggaggatcacttgaggccaggaattcaagagtggccggggcaatatagcaagatcgccacctccacaaaaaaattttaaaacattagctgggcatggtggtacatgctgacagccccagctgctcaggagggtgaggcaggaggattgcctgagtctaggagttcaaggttacagtgagcgatgatcacactgctgcaccccagcctgggggacagaacgagactctgcctcaataacaacaacaacaacaacaaaagagggcaaatgagtacactttaaatggatgaactatgtagtatgtaaatcatatctcaataaaatggttaacaggaaaaaaaaaaggcaaactaaagcatttcctggataagcttaaatgg

SEQ ID NO: 687844 - DNA, 600 bp, Homo sapiens
cgagatgctggctatgagtttgacatctgcttcacctcagtgcagaagagagcgatccggaccctctggacagtgctagatgccattgatcagatgtggctgccagtggtgaggacttggcgcctcaatgagcggcactatgggggtctaaccggtctcaataaagcagaaactgctgcaaagcatkgtgaggcccaggtgaagatctggaggcgctcctatgatgtcccaccacctccgatggagcccgaccatcctttctacagcaacatcagtaaggatcgcaggtatgcagacctcacagaagatcagctaccctcctgtgagagtctgaaggatactattgccagagctctgcccttctggaatgaagaaatagttccccagatcaaggaggggaaacgtgtactgattgcagcccatggcaacagcctccggggcattgtcaagcatctggagggtctctctgaagaggctatcatggagctgaacctgccgactggtattcccattgtctatgaattggacaagaacttgaagcctatcaagcccatgcagtttctgggggatgaggagacggtgcgcaaagccatggaagct

SEQ ID NO: 687845 - DNA, 675 bp, Homo sapiens
cggcacagacttcctggcttgaccaggcattactgccatctcttctaaaayttctccaaactccactcctctcaagctcctttccaccctctcagcccctcttcttctccaccctcactttaaaaagtcattaggaagagatctgcacctcccagtgtgttctgactcacggatatttgcccaaaagtaatggtgcgtgtgaaatactaagcctcttttcaagggcaggttcacgaaggggaggctgagaaaaagtttcctaaataagaccatctgtttctctgaagatgctcagatgctgaaacatttgcttcccgctgatgtgctttagtctcaatgggtccctaggacaaacccagactcaaggatctcacccacgtcctccgtgcaccgctgctccacaccggcttgggggtgcccgcttctccatggggcagtccttagctctgtgtccacactgcagggtgaagctggagtatactgagttcgtataaggagcctcaattctggttgatcatttattcataatgctgcaaggcccttggggcagagaagcacttgagagtaaaagcaggcatggaactcagaacaaacagaacctgccccagcacccagcaggaagccccgagcgtcacaacagacacatcccacccttccaccccagacacccccagc

SEQ ID NO: 687846 - DNA, 675 bp, Homo sapiens
cggcacagacttcctggcttgaccaggcattactgccatctcttctaaaacttctccaaactccactcctctcaagctcctttccacyctctcagcccctcttcttctccaccctcactttaaaaagtcattaggaagagatctgcacctcccagtgtgttctgactcacggatatttgcccaaaagtaatggtgcgtgtgaaatactaagcctcttttcaagggcaggttcacgaaggggaggctgagaaaaagtttcctaaataagaccatctgtttctctgaagatgctcagatgctgaaacatttgcttcccgctgatgtgctttagtctcaatgggtccctaggacaaacccagactcaaggatctcacccacgtcctccgtgcaccgctgctccacaccggcttgggggtgcccgcttctccatggggcagtccttagctctgtgtccacactgcagggtgaagctggagtatactgagttcgtataaggagcctcaattctggttgatcatttattcataatgctgcaaggcccttggggcagagaagcacttgagagtaaaagcaggcatggaactcagaacaaacagaacctgccccagcacccagcaggaagccccgagcgtcacaacagacacatcccacccttccaccccagacacccccagc

SEQ ID NO: 687847 - DNA, 1460 bp, Homo sapiens
tgcttctaataatgttaaacaggggaagatggaattaagggtatttattcctttaattaaagattgatttaaaaagttacaagcatcataatttatctcttaattactgtccaaatgtatgtgaagtttatatgtagtttcatatatgttgattatctgcttttagaagtcttgtttattgtctgttaccttcactagattttaagctccgcaacggccaggatttttgcctattttgggtraggcagtatccccaaactatgacattgtgtgactctatgagtaggtactctatgaatgtttattaaatgaattaattaaaattttcactaagctaaggatgtcagaaccttgtcatttgcagggattttgcttagacaattatacattgtcacacttacttggagatcttcaaaatccctctcctttttctctgggctgaagacttcagcattaaaaacatatgattgaaacacatacttattgctgttgccagtatacaggctcatcagaatgaccaggtttacttgactagcttgtcgctatataccttggaaagcatagggtaagataatgggcagaaaatctctacagtcaaagtatggcaaagaaaagctctgaatattggtgaagatagaaaacatgttccaaggcccgggcaggagtgcagaaaggagaaaggtcactggggaaattgcttgtttgtaataccagtcctgaaattagaaatgaaatagcatgtgcaaatccaaacttttttttaacctgactgctttggatccatctgtgtattttgtcatcattagcttttctaatttctaggatacaaattgctgtagatcctaaaataagctactgaatattctctattcatttttacgcaccccatatgttacccaaaatgatgggcaaatctaccttaaagaaccaccaaatctgttcagaaaggatggcactgggagaaagactatttggctttcttcctacatggaagaaaagaaacacctccagaggagctaggacattttgtgaaccctacacgatattgtagcataacacaatgattcaaatacttgtcaagttcaaagtgactttagagactacatattctaacctccccttacaacattagataatttggataattttccacttcaagtatgtcaacacgatggttttgatgattgcacttcttttgttcctactttagagatgggagggactggctgcaatataccttgagaggctatcccctggcagggattagtcatgttaggagtctcttcaaaataactcatctgcttcccttcctcagcattcctctgtctttgtggctgtttgttttaaattttttattgtttacttaacatagcctgcaagtgacccatacggtattcatttggaacgatgcgccttagtgaggctttttatgacaccctgcagatgttaggcagcagtcc

SEQ ID NO: 687848 - DNA, 982 bp, Homo sapiens
ttacataatgaatgatagctgtcctagaataagaagtatattttaaaactttataccttaaaatatttttcttacttgagtctgcatttcatcaggtctcctgtaaagctttagttttcttccatgtccatgaggaaaaagaggtttcattatcaagactcttctaatagtgaatattttaaacttgctctggaaaaaattaagcacaagtacgtttggagaagtacatttttattttaataagacagtagatttgttgcagcaaaagatagcaaagtatcagtagttgaaatagcgattatatgtgtcttgaccaaacttagaatccttatgaagttttacatgtcatttcatacaaatcaactccaaaataaaattttaaaggcaaaatttgaattcagttatagtgatatatgatcctaaggaaaaaaaaaaaacactgtatgttccaatctgaaaacatttttggaaggaataaaacgataaaacagaaggggtttttcactgtttttaaaattttataaatatgtagagattggcttaaagtttgggatacaacaaatcagtgaagaaaaaatcgtaccattatatgttagcatcagctaacatttgtatacactttttactttttagagtactttggtaaggagtatctcattcagtgtttttagaaaagatggaatgttttccttttttatgtaacacttttcaactagtcaaaggaaaatgtttaattttaagtacagctactcttgctttcctttgcttatggcttactgaatgatctttccttttgctaaaataattaatactatataattctgmtttgaggctagaaaataagaaactcaaagatcattacaactggtaagcaaagttgtgcatggggctgaataaaacaactcaaaaagaatgattattcaaaatattgttacctaattctgcaacattaagggaattataagcagtagttgctatttcc

SEQ ID NO: 687849 - DNA, 635 bp, Homo sapiens
tctcctttactaggctgtgatggagaaaagatctaacgtttaatgaggtctcctaggaagaaggcacaatatcttctcaagagctgtagttaatggcactattttcattttacagataagaaggcccagacaagtctaataactattcatgtttggaatggagctttgacaaaattctggtaaattttagtctcaaggcctattttccatgtattaaaggaagaatgatttcttaggtcttgccatgacacacttgtttcctatttgactttccacaacagagacatttgaaactgtgagggtgaaccgtgactgaaaagttacttattttactttgttctaattttcctcagcactactaaggagtgacttcttgcccttacatatgacagttccaaattaaatgaggaagatatttacagttctgtaaatatcactttggcattttacatttygtaggaaagggcttttacgttgcagttcatagcatagtttatggtttttaaatgccaacttgagaagttgaaaagagacctttcctggagaaaaagaccaagcttcagattcaacgttgaaaaatgtgcagaatttttagggattgctgtgaagagtgaagacgttacttgatgaaaaga

SEQ ID NO: 687850 - DNA, 855 bp, Homo sapiens
atttaaatgtccacaggtatgacagaacataagccagcaggggttgctgacgctggcatgaaaatgttgatgattaaaatatcaccatagtatgaggtttactattcctaccatcatttaagaaaaaggttaaattacttaattttagctgcaatttatttttccaattattctttattgttttccccaagtagcataatgcatgatccaaaaatacaaaatgaaacgaaccaagagaaaaacctaatttaactggttgttgctgacattttgccttttctcagaaagcagcctcagttaaaaataactcaaaggcatttttggtgaacactctgacctagaataaaaatatctcagtaagctagcaattttctattttatagttggtcctgagaagaagcagccagagtgatatttgtgttcattacgctgtataaaaaattataatctcaagcttagagagagtcactaattatgtgacrttgacatgcttttgaatatttatttatcactgtgtatgaaatgaatttgtttcaaaacaaaaaaaaatcctacagaaagacaaagagattattttgtgaggttgtgagcaggtaagctagcctgcttaacatggagacttcgctcactggtcctctttccactcattaaagagtttctctgaattatctcattcttaaccatgacttcaacatccctacacactgatttccctaaaaggggccctcagactccaaatcaggctctaccctgagttccaaactgctctattcaattactgtattgtattagttatctattgttgtgtaacaaattatccaaaaacctaatagcttaaaacaacagacagtctct

SEQ ID NO: 687851 - DNA, 1334 bp, Homo sapiens
ttatttggaaaactctcaactgtagagcacctgatttctatgtgacattggataaaaggagaattaccatgcttgcatgtggactataatttccaaagagctaaaggatgcttctagtctgattttaagaaacatagttgtccctaatccatttgttgtcaggataacaggatcttgctgcagttgtgatagcttacatgacctcccatgcccagatrgtaaagggacttaaaccatattgtaagaggaccaattagagatacctgactgttcagctcatgaggaaatgcaatatgaaaaagaaacaggcatgctgactatgctcaaatattaaaaggactctcaaataaaagtaaaattagatttattttaaatggccccaagaaacctttctaggaataataaatagatatttcagggggatagatatttacttgaggtaaaggagaacattataatagccagacttctccaatgaaagaatgaattaccttagaaggtatcgagtctccttttacttgaggcattcaaggagaagttgtataaatattttacaggattgttaaaggcagtttcaaacactgcaaggttgtacctaccatctttccacacctgagatgctttgattctatcgtaataacagctaaaatgcacagggcacgaatcccatgccaggtcctgtgcattttctaagcattttctatgcattacctcatttaattgtcacaacaactgttattacactcatgactaaagataagaaaactgaagcacggagacattaaatgatttgtcttacttcccataattaggtaagaattttgacaccaggaaatctttttccagcacccagcctgttattccgcctttcatattcatacggcagatgtaagtccaaaacagaaaggccttgcctaggaaagtgaatgataaggtaagagcagtgggatgatcttaggaagagtgtgttaagaaaatgtcatcttataaactgaatggtagaggcattacggaatgatgagtttagagaatggctcaagacacttgctcacacttccatgtgatgagcacaaggcagaagccactaaacacagcactttatagtgcaacccagagtatattttgaaaacataaaaacaatttatttttatttatttatttatttttttgagaccaagtctcgctttgtcgcccaggctggagtgcagtggtgcgatctccgcttaccacaacctccacctcctgggttcaagcgattcctgtgcctcagcctcccaagtagctgggattacaggcacccaccaccatgctcagctaatttttgtatttttagt

SEQ ID NO: 687852 - DNA, 673 bp, Homo sapiens
tgaaatataaaatccaaaaaatggtaacacatatggatcttgctagagactactyggaaaaaaaggtcagacaaaccacagctgctacaatctcaggggagaggaggtttaaaggcatcattccacccacgcctctgaaccactggtggtgggacacccaagggtctgttgcaatggcactttcagagctgggcactaagatctggcccagctttctttgccctgagcctactcactatgcacggctttccctagctttcaatcatgatggatcactgcccctttaattttctctattctttcttgtagtcacaacaccttattatttttattatggtactagcaggtcagttgggtttgaatttgtcagaagttatttttgagaagctgctttcatgtccaagtagtagaaaatgacaacaggtctcactatggcctctgggatgacaaagtttgaggcccctcatgcaagacatctctgccccaaatcacttttgcctttaagactttctcaggatggcttctatgatttttaacttaatattatactccagtgtttaactggatctttgagggctatcattggaatggatatcattatgaaactcatatggctttttcttagggcgtgcattccacttctcagcttttttctgcctcccctgctttatgc

SEQ ID NO: 687853 - DNA, 673 bp, Homo sapiens
tgaaatataaaatccaaaaaatggtaacacatatggatcttgctagagactactcggaaaaaaaggtcagacaaaccacagctgctacaatctcaggggagaggaggtttaaaggcatcattccacccacgcctctgaaccactggtgrtgggacacccaagggtctgttgcaatggcactttcagagctgggcactaagatctggcccagctttctttgccctgagcctactcactatgcacggctttccctagctttcaatcatgatggatcactgcccctttaattttctctattctttcttgtagtcacaacaccttattatttttattatggtactagcaggtcagttgggtttgaatttgtcagaagttatttttgagaagctgctttcatgtccaagtagtagaaaatgacaacaggtctcactatggcctctgggatgacaaagtttgaggcccctcatgcaagacatctctgccccaaatcacttttgcctttaagactttctcaggatggcttctatgatttttaacttaatattatactccagtgtttaactggatctttgagggctatcattggaatggatatcattatgaaactcatatggctttttcttagggcgtgcattccacttctcagcttttttctgcctcccctgctttatgc

SEQ ID NO: 687854 - DNA, 673 bp, Homo sapiens
tgaaatataaaatccaaaaaatggtaacacatatggatcttgctagagactactcggaaaaaaaggtcagacaaaccacagctgctacaatctcaggggagaggaggtttaaaggcatcattccacccacgcctctgaaccactggtggtgggacacccaagggtctgttgcaatggcactttcagagctgggcactaagatctggcccagctttctttgccctgagcctactcactatgcacggctttccctagctttcaatcatgatggatcactgcccctttaattttctctattctttcttgtagtcayaacaccttattatttttattatggtactagcaggtcagttgggtttgaatttgtcagaagttatttttgagaagctgctttcatgtccaagtagtagaaaatgacaacaggtctcactatggcctctgggatgacaaagtttgaggcccctcatgcaagacatctctgccccaaatcacttttgcctttaagactttctcaggatggcttctatgatttttaacttaatattatactccagtgtttaactggatctttgagggctatcattggaatggatatcattatgaaactcatatggctttttcttagggcgtgcattccacttctcagcttttttctgcctcccctgctttatgc

SEQ ID NO: 687855 - DNA, 440 bp, Homo sapiens
atgctgtgtgattagtatacataaacacatatatagatggatatatacgtgtgtgtgtggatgtatatatctgaggttcagatccaaaattaggcaactgaaagttgtagaaaaaattcttttggactaatttatcacacaattgtttcattttcccatttaatcaaatatttatgaataaaaccagatttctgccaccatacctcctccctgttattctggggaataacasaaccatctcctatttaaattcatccacaaaaaaaaaagcagttataccaataatggctttaattgaagtgaattattttcaaattatgtttgtagaaaggggaagttacccaaactgaagtacccataagctaaatggccagtcttttgtgctaaattgttctaaagcaaggagccatgaagctgctccaaagaacttttgtcccaaa

SEQ ID NO: 687856 - DNA, 440 bp, Homo sapiens
atgctgtgtgattagtatacataaacacatatatagatggatatatacgtgtgtgtgtggatgtatatatctgaggttcagatccaaaattaggcaactgaaagttgtagaaaaaattcttttggactaatttatcacacaattgtttcattttcccatttaatcaaatatttatgaataaaaccagatttctgccaccatacctcctccctgttattctggggaataacacaaccatctcctatttaaattcatccasaaaaaaaaaagcagttataccaataatggctttaattgaagtgaattattttcaaattatgtttgtagaaaggggaagttacccaaactgaagtacccataagctaaatggccagtcttttgtgctaaattgttctaaagcaaggagccatgaagctgctccaaagaacttttgtcccaaa

SEQ ID NO: 687857 - DNA, 645 bp, Homo sapiens
tcaaccattaccaaacatttatgaatacagaaacagaaagagatcctgtgtccctctagaggcactggactgcaatcatctggcaacactaccatttttggactctctggaaatggcagagattttctgaaggaaggaccctaaaggcagctgtcctttattgagcatctgtgatgtccctagcgctgcttgtctcattcaagcctcagcactaccaaatgaagaagatgttatgtgtggtgagtacagtrggctgctggaaattaaaaaacctgcacccccatggccaatatcaagttacccaagtggcatccctgaatgcagaattgggaagggagacacaatagcacccccattgtatggtattttctaccacacagacacaataaatgtaacaacctcaagatcttagataatagtaaagtgtaataagaaattaggaaattatgagtttttaatataatttatttaattgtgagtttgtacatttaatttgtaacattagttattagaagaagtttccaatcaatttggagtcaatgtgatggtttttttccagctttcataggtcactacaatccagtgccaacacagcattgggtggatcccatgagatttcaaattccacaaagaaaaaatctactt

SEQ ID NO: 687858 - DNA, 645 bp, Homo sapiens
tcaaccattaccaaacatttatgaatacagaaacagaaagagatcctgtgtccctctagaggcactggactgcaatcatctggcaacactaccatttttggactctctggaaatggcagagattttctgaaggaaggaccctaaaggcagctgtcctttattgagcatctgtgatgtccctagcgctgcttgtctcattcaagcctcagcactaccaaatgaagaagatgttatgtgtggtgagtacagtaggctgctggaaattaaaaaacctgcacccccatggccaatatcaagttacccaagtggcatccctgaatgyagaattgggaagggagacacaatagcacccccattgtatggtattttctaccacacagacacaataaatgtaacaacctcaagatcttagataatagtaaagtgtaataagaaattaggaaattatgagtttttaatataatttatttaattgtgagtttgtacatttaatttgtaacattagttattagaagaagtttccaatcaatttggagtcaatgtgatggtttttttccagctttcataggtcactacaatccagtgccaacacagcattgggtggatcccatgagatttcaaattccacaaagaaaaaatctactt

SEQ ID NO: 687859 - DNA, 3780 bp, Homo sapiens
ctgaggagttggaaatgaaaggaaggtgctgcagaatgataatcagtcttcagaatcaagctaggaatttgtactaggttctgaaagcgagtcatatactggtaaataagaaggcaacaagatagtctttgggcagttagtaataaaaccagatgccgaaatgaaatttgaaaactgtggagacgacaaaaccatcacttagtggtgaaagaattctcagacatagttgagaatcaaggatagagaaaagggtagaagaatcaccaaaagaaagaggggcaaaaatcatggaaattatggaaaagtcctagaaaatgagtgaatagttttaagaaggaagaggagtcaaaggtttgaagagcctaaagactaagaaaaaagttaagatggcattggtgacatgagggtagtttcatcggagttgtgttgccataattggaaactgaaccccagtgttttaaatcccatggagccaggagtgattcccgagtcactcaacaaccagtatggaacagactcagatccccacaagacggacacctcctgaagcactggaaccaggtctgggaagtcactgcagggccaaggattaactctttagtagctgaatttggggacccctaggtaaggggtggagttgggtgcagggtactctgagggtttggggtagctgtagaagtgttgcaatattttagcaaccaatgtagctgtacctgtgcctctcatctgagtattggccctgcaaagaaaactgcttcagttaatgtcaagagctttctacatccctagtgcatggaagggagcactggctgattaaaaatcatttccatgtgcctgtaacacacactaaagcaaaggttccctaatgccaacctgaacactaactgcatcaaaatcatctagagagtgagcaaaaaactactgatgacttagtttcacccaaggacattctcttttggaggattggggaacacaaaaatccatatttatttgtaagctcctcagcttgggggtaagaaaacaaacaacaacaaaaaaacaatagctgctatgtattgattacctacacaagcactgtgctaggaaattctcatttaatattccccataatcctatgaattaaggatttattttacccatttaacaggtcagaagacttacagatggtaaataacttgcccaaggtttccccctgggtaaactggaatcgttccctcaatagataggcctgccttgaatagaagacaggaggccacatattgggaccttgctgtccacaggccaacctcagaagggactggcttcagagaatgtatgctattctggttctttcttccacagtaattttagcctctaaagatcaccgagcaaggtcaaaagaaaaaagtaaagaggctggggagagaggaaagggaggaaaaaattttcagmaactgcttccagatgagtgggcagtccctccatgtgtgcagggccatcccctcaacaatgggttgcatgtcatctttcatgtacatctaaatggaaagagggtttgaattccagctgcccatcctgagaatgccagcaattcagggaatactactttgcaacacagtgaatgcattttagggagcctaaaaagatggacatctgaccactccatttctcttccagtgttctttaggaaaagattgagtgaggaagctctctctccttgttagccttctagcaagctgaacttgctcttcccgttccttttaacccacttcctggttgggtttggtgtctcctcttagaatctccgaaacataccacagatcattctacattcaaccagtttgtctcatggaaaaaaaaaaaaaagcaacaggcagcagtggaattcaggccaccccaagtcaccaatgtggcctgatggatgtggaaactggaccatgcctcagggatgaggcatgtgatggttggtatgctgtcattactgaaacctgaaaggggaagttcacatgaggcctgtggttgacttctcaaccctgctggcaggggcacacgccagtaaggaaattgcaatccctaaataaacggtaggctgggaacctgagcaccagcaagggagagggcagggactgctggcctgggcagggctggccaagatggagcaaacaaagctaagatttaaactttgcaagaatgtcatgtcaattcagactccccaggagggccccctgagagtccaaattgccagtcatcaagcctcagacttggcagaatttttaaagtaggacagttagtccaatcccttcatttgtcagataagaagagtgagagccagtggggacaagtgacttgccaaatgcccaatagccagaaagctaagttcctaggtcatttattatcccatagacctcctgagacttgctattttttctccactgttttctcctttcaaagacacttttaaagtcttttcaacatgcaaactatgtgtgtattcagagctaagactctctctgcctaaaataggcttatttagttccttctctctggtggtccttgctcaaaggcacaacctcttttttacagataaaactcaattttcaaactcaaagggaagagatggagaggcaaaggattccttgatcctctattatgtgccaggattttcccatgccttaactcattttaatccccaccacaacccgtacaggctagtatcatggacccatttcccagatgggaaagctgaagcatagagaagcagtaagcagcaagcaaaattctcaatttccataaataacctaaccttctcctctttggaaccttctcagttcagaaaaacaaaaaaaaaaccaagaatttaaaaaatagggcattttcaagatttctgattatggcttttcttttaacaaacttgttttttttcaaaataataattcctgatcatttctatgtttagaaaaaagcacattattgaaaacatgaaaatttaggggagtgatatggtttggatccgtgtccccacccaaatctcatgttcaattgtaatccccaatgttggaggtggggcctgcaaggaggtgactggatcatggaggcagtttctcatgaatggtttagcaccatatgctggatgctgtcctcacaatagtgagtgaattctcatgagatcgagtcatttaaaagtgtgtggcacccccccaccccacctgttttgtgcttttactctggccatctgactgtgactcctccctcttcaacttccaccataattgtaagtttcctgaggcctcctcagaagccaagcaaatgccagcatcatgcttcctctacagcctgcaaaactgtgagccaattaaaccttttttctttataaattagccagtctttggtatttcattatagaaatgtgagaatggaataatatgggaggaaagaagaggaaaaaaatcctttataatctctcttcccagaacaaatgtcaacattttagtacattttccccgaagttgttattctacattgataaatataacctttttacacattaagaatactaaacctctaaactactataaactttaaaaatacatttcatagttggttattttgcgctttttatcaacttttattttagatttagggagtatatgtacaggtttgttactcgggtatactgcaagatgctgaggtttggggtataaatgatcccataacccaggcattaagcatagtactcaatagttattcaacctttgtccccttgcctccttcctccctagtagtccccagtttctattgttg

SEQ ID NO: 687860 - DNA, 636 bp, Homo sapiens
tgcccactggtttgtatctctgctcctttaggatattttattcccaggcctatgaggatgggatggagtacttgattgccatgggaaaaaaaaagagactgttcttgttgacatcttcagatacagctattccagattgcttggtaaatgggacagggtggagggagtgtggggcaagaccaacaaacttaatagaaatcagaaattggagtacttgactgagttttatccagtcccaatcctgcaaataaatcataccatgaattcaatacccaactgggacaactcagccaaaagccttcttgggaagtcagcttatctccccttccagtactgctggttgagtaactaatttttttattataccgtaattttatggaatcttgtggtgattggtacatgaccagtgactcactttggctagrataacagcagagcaaagcaagaggtttcaggtgttagctgagtgccggtctggcttggggcttgtctccaataccctttgttccccagctctgggtgggatagtaacaacaatcatagcaactcctcacatacgtagcacaatctggagtttccacagcactctcacatacattatctcattttacccttgaacataatccagggtagttt

SEQ ID NO: 687861 - DNA, 968 bp, Homo sapiens
gaaacagcatcaaattcagattcaacaggcatttatacactccctaactcatttgaatgtttttccctcacctataattccacaaataccactcaagacaatgagtgagctccactgtttgaataaaagaaagaatggaaaagatgttcacaataattacccacttcactccatcctttataattttcaaaaatctccacatatattatcatattgggtctttacaaaactcactgaaatagaaaaaaatagaaacaattattcctgtatttcagatgatcaactcaaggctccaaaaagttgagacagaacttgaatgatggtctcctggcttgtaatcttctacacaaygtgccatcaaatggatcatttgggggtgatatattcacaagaatttggccaagttggcaaatactcgtttttgttttggttttttaatctctattgtagaagtcggcacgacatgttcccccatctagggaggaccaatgtctatcaatagcatgcttgagtgctaactgtcatcatttccagttgttgaagcaaaacattgatgtgactggttttatgtactatacacgtgcaactaaggtaggaaatggaacctgattctcccgacactcttctttttattgggggagttggaatggccatattcatggggtgaatcaccggactgtctccctttatccagaaaacagcacatttaaggcaaatcactctgggagctgctctcctcctcatttagaattacaggaaggaaagagatttcagatctcttgcaggcaatcccatcccaaagatcatatttccctttgtgttttcacagacacgaaatccttcctcaaatacaagtaaatacctctttttcttctctaaaccctcatcttgttctgttttctgtgagcacggagaacacatggtcgtttctgggagaaacagcaaacccctgaaagcggcccactcta

SEQ ID NO: 687862 - DNA, 638 bp, Homo sapiens
ggtataaactgtgataaagggtgtttggaaaatcggtgatgctccaggtactaatcagaacattaaccttggcatttgcaaagttaaccttggtttcccaatctcatgcatgacctggaaggtccacagcaaggtcaccaattagacccccacacagccccaccagtttgcacaactccaaggaacatgatcgacgtagacagcagtatgggtggtaccttccagagtcatatggtgcggsagacctgtaggagtcgttgtcatattaacagatgctatagctagtgaacagcctagctcacttcctagcatctgtatcttgatgtggacttgttgctttctctatttaatccaaatatgccatggcgcttgcaatgtgtaaggtatgctcatatcttttttgctttagagtgtggatcgtgctccattgcccaggcaagagtgcagtgctgcgaccatggctcactgtgcccttgacctcctgggctcaagcgatcctcccacctcatcctcccagagagtatctgggactacaggcacacaccaccatgcccagttagtttttaaaattttttgtagagatgaggtttccctgtgttgcccaggctggtctcaaactactgaactcaagcaattct

SEQ ID NO: 687863 - DNA, 1163 bp, Homo sapiens
gttcataagtcccttagagctttgtttctcctttgaaccccatggagggttttgggcctcagaacaggtatattaaaccgtctccatttcaactggtaattgagggcctctcaaagtctacctagaagagaatgtcttctactatagaaagaaacagatgatgcaaaattttgattttttaacctgaagtttggtcctgtctggcaaaacaattgaagaaacatgactttccaatctatttggaaggtgagggttccaagtacaccctcactgtgatctgaaaattgtgaaaatctgtactaatgagaagcttaggaatcacctagacctgggtttaaatcctagatttgccacatttctggggtggtggggtggactgacaggccctgaacagataacgtctatgagccctagtgttttcatgtgtaaaacaggactatactgcctcacaaagatttgatgacaattaaaggaaattacagatgttaaatgcttaacaagaatctagtacatagtaagagctcaatgtatattaactgtcattgtggtgacaacaatcatgataatttcaagcktttatatccaattttgtgttggatgcttcattaggtaggaatgaacatctcaaacatatttgtccatctatcattatttctatatatgttgttcacccaaccatcatatcaaattcctgttcctttagtttggaggtccttattttttgggggggggggtcatgaacctccttgaaaatctgatgaagtatgggtgatgtgctcctctctgaagctccaatagcacctcacaggttccaccttaccccactgtacctccatccgcctgcactgtgactgcttgtttattcctttttccaggctctgggaggtcagggagtgtatctgcccagatcatcattttctttaccttgcttagctctgtgcctggcagagaataggtgtttgatattcactgaatgcataaatgaaaattgcaaagccttccccctgaccccttaaaaattcacctacactcaagtttttgcatctaatttcagaccctgtctgaggactccaggtaagaagctactattaatgactacctattgtaggtcattaaaaatgcagtagggaaattttcaggccaaataatgaagcagcctgttt

SEQ ID NO: 687864 - DNA, 1163 bp, Homo sapiens
gttcataagtcccttagagctttgtttctcctttgaaccccatggagggttttgggcctcagaacaggtatattaaaccgtctccatttcaactggtaattgagggcctctcaaagtctacctagaagagaatgtcttctactatagaaagaaacagatgatgcaaaattttgattttttaacctgaagtttggtcctgtctggcaaaacaattgaagaaacatgactttccaatctatttggaaggtgagggttccaagtacaccctcactgtgatctgaaaattgtgaaaatctgtactaatgagaagcttaggaatcacctagacctgggtttaaatcctagatttgccacatttctggggtggtggggtggactgacaggccctgaacagataacgtctatgagccctagtgttttcatgtgtaaaacaggactatactgcctcacaaagatttgatgacaattaaaggaaattacagatgttaaatgcttaacaagaatctagtacatagtaagagctcaatgtatattaactgtcattgtggtgacaacaatcatgataatttcaagcttttatatccaattttgtgttggatgcttcattaggtaggaatgaacatctcaaacatatttgtccatctatcattatttctatatatgttgttcacccaaccatcatatcaaattcctgttcctttagtttggaggtccttatttttkgggggggggggtcatgaacctccttgaaaatctgatgaagtatgggtgatgtgctcctctctgaagctccaatagcacctcacaggttccaccttaccccactgtacctccatccgcctgcactgtgactgcttgtttattcctttttccaggctctgggaggtcagggagtgtatctgcccagatcatcattttctttaccttgcttagctctgtgcctggcagagaataggtgtttgatattcactgaatgcataaatgaaaattgcaaagccttccccctgaccccttaaaaattcacctacactcaagtttttgcatctaatttcagaccctgtctgaggactccaggtaagaagctactattaatgactacctattgtaggtcattaaaaatgcagtagggaaattttcaggccaaataatgaagcagcctgttt

SEQ ID NO: 687865 - DNA, 1163 bp, Homo sapiens
gttcataagtcccttagagctttgtttctcctttgaaccccatggagggttttgggcctcagaacaggtatattaaaccgtctccatttcaactggtaattgagggcctctcaaagtctacctagaagagaatgtcttctactatagaaagaaacagatgatgcaaaattttgattttttaacctgaagtttggtcctgtctggcaaaacaattgaagaaacatgactttccaatctatttggaaggtgagggttccaagtacaccctcactgtgatctgaaaattgtgaaaatctgtactaatgagaagcttaggaatcacctagacctgggtttaaatcctagatttgccacatttctggggtggtggggtggactgacaggccctgaacagataacgtctatgagccctagtgttttcatgtgtaaaacaggactatactgcctcacaaagatttgatgacaattaaaggaaattacagatgttaaatgcttaacaagaatctagtacatagtaagagctcaatgtatattaactgtcattgtggtgacaacaatcatgataatttcaagcttttatatccaattttgtgttggatgcttcattaggtaggaatgaacatctcaaacatatttgtccatctatcattatttctatatatgttgttcacccaaccatcatatcaaattcctgttcctttagtttggaggtccttattttttgggggggggggtcatgaacctccttgaaaatctgatgaagtatgggtgatgtgctcctctctgaagctccaatagcacctcacaggttccaccttaccccactgtacctccatccgcctgcactgtgactgcttgtttattcctttttccaggctctgggaggtcagggagtgtatctgcccagatcatcattttytttaccttgcttagctctgtgcctggcagagaataggtgtttgatattcactgaatgcataaatgaaaattgcaaagccttccccctgaccccttaaaaattcacctacactcaagtttttgcatctaatttcagaccctgtctgaggactccaggtaagaagctactattaatgactacctattgtaggtcattaaaaatgcagtagggaaattttcaggccaaataatgaagcagcctgttt

SEQ ID NO: 687866 - DNA, 669 bp, Homo sapiens
ggacaccagaacgctgattcccagttcagcaatcttcctaaggtatcatgtcaaacttatgctacagaaaaactaccatgggcagggcagtgttcacatagagtttggttattgttagtgtgcttactccttaggcatattctccaaccagtatggatgataaagattttttaaaaagccatgtcaaggctacatccttagccaactatagttgatagtggaccatgtacctgagatgagctgagaggtattcagaagtctgtagccctgataggcagcagatgggctccctggtggtaagggagtgaattcccagtgcttcttaccagcaagcttcctttgcccttctcacatttgtctaggtattttcgaacagatacctttggaytggagtgttttgcacccctctcaggtcctagggagtactttctgtttgttgtaattgccccaggggatcttctttatctccctctcagctaatcctatcagcatttattgaggtctttctatcaggtacccagcacaagagggacgtcttggaaagtggagttttcagagctgggacttacaaacagtgggataccatttctgtttcagacttggtaaaaattattggagctaccatccaacagctccttgcttcattttcctcgtattttaaaatgtata

SEQ ID NO: 687867 - DNA, 640 bp, Homo sapiens
actcaccctgtctacatggggattttgcgaagtggccaggcagtcattaggtaaggagctattacaaatcacttcaccttctrgctcatgcccaacctgccctgctcactccttttcacagactttgctaatctcccccctacacttcatgtctagatatcctccccaatcagcccttcatctatgcaagttttatgctctatttcaaacccaagtgaatgtgcatctctcccacagggctctttctgccaactccaaatcattctacttttcccactttctgaattttcttagtatctattgtacatatcaaataacatagctttgaactatagaatgaggctttggggtttttttttcctctacttattctataagtattgggggttcttttcccaattaggcttgaaacttatgaaagtctgagatatttcttgtacttctttcccatcctcttctttcccatcacaccttattcaggatgttagaacagaaaaacaaacaaacttcacagagaccatttggtccagttacagatcaagaagctcatctccaaaagaaaggggccttccctaagaccaatagctctaacacagcctggagtaggggcccctgttctgtgcctccatgagaccatgtg

SEQ ID NO: 687868 - DNA, 640 bp, Homo sapiens
actcaccctgtctacatggggattttgcgaagtggccaggcagtcattaggtaaggagctattacaaatcacttcaccttctggctcatgcccaacctgccctgctcactccttttcacagactttgctaatctcccccctacacttcatgtctagatatcctccccaatcagcccttcatctatgcaagttttatgctctatttcaaacccaagtgaatgtgcatctctcccacagggctctttctgccaactycaaatcattctacttttcccactttctgaattttcttagtatctattgtacatatcaaataacatagctttgaactatagaatgaggctttggggtttttttttcctctacttattctataagtattgggggttcttttcccaattaggcttgaaacttatgaaagtctgagatatttcttgtacttctttcccatcctcttctttcccatcacaccttattcaggatgttagaacagaaaaacaaacaaacttcacagagaccatttggtccagttacagatcaagaagctcatctccaaaagaaaggggccttccctaagaccaatagctctaacacagcctggagtaggggcccctgttctgtgcctccatgagaccatgtg

SEQ ID NO: 687869 - DNA, 2977 bp, Homo sapiens
  misc_feature 2030, 2031, 2032, 2033, 2034, 2035, 2036, 2037, 2038, 2039,2040, 2041, 2042, 2043, 2044, 2045, 2046, 2047, 2048, 2049,2050, 2051, 2052, 2053, 2054, 2055, 2056, 2057, 2058, 2059,2060, 2061, 2062, 2063, 2064, 2065, 2066, 2067, 2068: n = A,T,C or G
  misc_feature 2069, 2070, 2071, 2072, 2073, 2074, 2075, 2076, 2077, 2078,2079, 2080, 2081, 2082, 2083, 2084, 2085, 2086, 2087, 2088,2089, 2090, 2091, 2092, 2093, 2094, 2095, 2096, 2097, 2098,2099, 2100, 2101, 2102, 2103, 2104, 2105, 2106, 2107: n = A,T,C or G
  misc_feature 2108, 2109, 2110, 2111, 2112, 2113, 2114, 2115, 2116, 2117,2118, 2119, 2120, 2121, 2122, 2123, 2124, 2125, 2126, 2127,2128, 2129: n = A,T,C or G
tatataatatacaatatgtaattatatgttaatatcatatataattatataatgtatattgtagattatatgcaatataatttatagactgtattaatattgtaatatattcaatatataaataattgtgtatatattctataatattatagactatacaattttcaaatatatatttatttgaatgcctaccatgtagaaagtcctgtgctagatgccaaagggatttcaaaccgtatacattgacctctgcctgcaaaaacttctagtcttatcaggggagtgaagactgaggcccccaagggatgagctggctcaccaggcaagacaatggccgtctgaagggagatgtaagtaagagatgctcttacaagtctagagatgagggagatcactttggtggaatgctaggttataaagagatgtttataaactttaggatatgagttcatttctagcttgctatcatctatgtcttttccttccattagctcgtagctccttccagagctggaaccctgccctatgctttttctcttatctccgtagagtaccaaatatcagccatacacaagtgcttagcataacttaaatagaaaactataaggagttgactttttgaaatggagatttcctctttcataaagctcatctgttcagataagagcccatttccggggatggttggagaccacgagtctgggacacaactgggaccctgttctcacctaggttttctccctctggctgaaagctgacagacatttgtgaggcctcaagctatcagggcagtcttggggattatctggtatcttattcggctctatgtatttccaacaaaaaaaatgggagggaggaaaatgacgttccaaatcaaagtaagcccctttgatagtgttttgatgtttcagctgagaattatactggggagaactgtatttttctggggttgtcaaggctccccagctaacctccacagttgccgttttaagggacgaggagttttacctaacccatggggaaggtccctggaactaaagcagtcaccatgttttctgagggtgaaccaggtacaagattctgtgctagcagggtggtatagagaaaaggacatagaactaggagtcaggaaccctcaggttttaaacatttatttaaaaaaatttttttttgagagacagggtctagctctgttgtccagactggagtgcagtggcatgatcataacttactgtagcctcaaactcctgggttcaagagattctcctgtctcagcctcccaagtagctggaactacaggtatgcatcagcatgcccgactaaatttttttctttctctttctttctttcttttttttttttttttttttttgggaagagacaggggttatgtcttgctatgttgcccaggctggtctccaactcttggcctcaagcaatccttccaccttggcctcccaaaaccctgagattacaggcatgagccatcccgcctggccttgttttaaatgagatgtttcaactaggtggcctctgaagtttcttctagtttaacaattttgttccataggagaaacaagtatttaactattcactcaattcagaccctgcagagttgagacaatgtgctcaggcttgaagggagaagagccctgggaactttcgcattagaataagctctagttttcacataggtttcacggagggaaatcctgagctccaggaggttaccactgcactgaggtagaccatgcaccacgcactcatcagtgacatgtcctgtagttcattccatgcaaaaatctgcaaagaggcctgtgaacagcagaagagcgtggaaaattctcattaagctctatggtgccaaggaaggaggaggccctagctggggaggtaggcgagcccgcaggaacgaaggctgttcccggtttcacagctgctctgcaccttggccactccaaactcctcactttactgtcaaggaaacgagatatgtgcagaatctccaatttaggctgaagtcgagttannnnnnnnnnnnnnnnnnnnnnnnnnnnnnnnnnnnnnnnnnnnnnnnnnnnnnnnnnnnnnnnnnnnnnnnnnnnnnnnnnnnnnnnnnnnnnnnnnnnaagtgttattttcccatagttctacaatggttcataaatgatctctttctttaaactgccaattctctttctatgtctaaggactttacatattcagtgctcttcctacagaggggagtgaatttgaatatttggggtgagctacttaacatcagcatgcttcactgttttcatgtataaaacataatgatgatatagtttagaaattttttattgtttttcaggtaatgggagttgagactgagtcccagatggatttttattcagatcctccaggcctyaatgaaaaaagaatcagaagctttaggttattgtgcattttacttctctagatttaagctccaatgggctatggagaacaggaaggcagctacaactacaagcagccgtaccagggagcttcatcttcatgtcggagggttttgttttttttttttgagatggagtctctgttgcccaaagtggagtgcagtggctcaatctctactcactgcaacctctgcctctcaggttcaagtgattctcataccttagcctcccgagtagctgggactacaggtgtgcaccaccatgcccagctaatttttgtatttttagtagagacagggtgtcaccatgttagccaggctggtctaggactcctgacctcaggtgatccacccgcctcagcctcccaaagtgctgggattacgggcatgagccaccatgcccagcccatgtctgagagttttatctttatatttcttaggacaacctaatgttaactgcaacagtgatattttatttagggttcctctgccctccttagggtcaatctctgtagcacccataccgtgtttaggatacat

SEQ ID NO: 687870 - DNA, 384 bp, Homo sapiens
  misc_feature 6: n = A,T,C or G
cccccnacccccccccaaaaaaaattttctctcaaattgtttttgttttgkttttttgagacagggtctcactctgccacccaggctggagtgctgtggtacaatcatagctcactgcagcctcaaactcctgaaattaagcaaccctcccacctcagcctcctaagcagctggaactccaggcgcatgccaccatacccagctaattcttttgatttttagtagagaagggagggtctcactatgttgcccaggctggtctcaaactcctgaactccagcgatcctcccaccaaactgctgggattataggcgtgagccaccatgccgggcctttagttcaggtttttaatgttatactaaggttgatccctgcttgaaaatg

SEQ ID NO: 687871 - DNA, 669 bp, Homo sapiens
aattctagggtggagttttcagccctcagatgtcaaaaagtgaagcagaggacataaaagccctgtctttgcatcctccctagattggccagaaccactccatggtcggtggtctcttaccaggaaggcatgctggtcagatgttgtacagaaaccacaaaagggaagagcagcagtcaggcctttggttgaaatcagcggtggagccagtctttccaaagggctggcttctctttagactttggggtagtaagcctaatggtggttagagagggtgagggtatagtgagatgtgyctatcatggccagaaactcagttttcaaggtttttctggagtccccttggccaggaggagcttctttccattggtttgggggtgtaggattgcatttttatttctcgttacttaaccccattgctttattatcttgcctccttagaagtttggaattcaatgactggcacttgagaacaccctctccacccccactagctcctcaggctggagcttgagctcctcctccccagggggcacccaatcttgtatcctcttctgcagccttcctccgcacagggttctaagaatgagtacacagaaaaagcatcatttagactctgatgcccctgagtggcaacgaagctgggaagccagcaccatcagcaatggg

SEQ ID NO: 687872 - DNA, 669 bp, Homo sapiens
aattctagggtggagttttcagccctcagatgtcaaaaagtgaagcagaggacataaaagccctgtctttgcatcctccctagattggccagaaccactccatggtcggtggtctcttaccaggaaggcatgctggtcagatgttgtacagaaaccacaaaagggaagagcagcagtcaggcctttggttgaaatcagcggtggagccagtctttccaaagggctggcttctctttagactttggggtagtaagcctaatggtggttagagagggtgagggtatagtgagatgtgtctatcatggccrgaaactcagttttcaaggtttttctggagtccccttggccaggaggagcttctttccattggtttgggggtgtaggattgcatttttatttctcgttacttaaccccattgctttattatcttgcctccttagaagtttggaattcaatgactggcacttgagaacaccctctccacccccactagctcctcaggctggagcttgagctcctcctccccagggggcacccaatcttgtatcctcttctgcagccttcctccgcacagggttctaagaatgagtacacagaaaaagcatcatttagactctgatgcccctgagtggcaacgaagctgggaagccagcaccatcagcaatggg

SEQ ID NO: 687873 - DNA, 2048 bp, Homo sapiens
aatgttctggttttgctttccccttgtacatagtttaraacaaactttgtaacttcagagccaggatttcatacacaattttaatccaactctttccttcacagattaacatgctgagactcgggaggtggtgatttgcctagggacacagaaaagtaaggattaaaaacttagtttaggattcccaatccagagctccttctattacagtatgcttctttagacaacgagttgttagttatgtaatgaaaagaacatatgaaactggctcacacttccataagctagcagatagttattccccactttaaaaatatccatatagggcagggcgcggtggctcacacctgtaatcccagcactttgggaggccgaggtgggcggatcatgaggtcaggagatcgagaccatcctggctaacacggtgaaaccccgtctccactaaaaatacaaaaaattagccgggcatggtggcaggcacctgtagtcccaggtacttgggaggctgaggcaggagaatggcgtgaacctgggaggcagagcttgcagtgagccgagatcgcaccactgtactccagcctgggctacagagcgagactccttcttaaaaaaaaaaaaaaaatccatatataccaataattcaaacatacgaacagataaattagtaattctttcataattaattactttatgacacgatatgtgtcactgacttccttaaattgttgtttgggtgtacgatagacacttttatttggatttattcaggactttctagaattcatctagaaaaaatcagacacattcctgctctttcttctgtagcagagtgaaatactatttttatgctattctcatttttaatttaaaaggtaaagtccctaaaaaatatcctttggaaaacctgctaatgaaagctcagatcttggggacagcatagcaatgtagaagagtgtgggccgagagacctgtgtattctcttagccccagcacttcctagacagataaacatgggagcttcagtatgtaggtaaggagtttcataagctttgccgtattcatacagcaaatgtatgaaacaattgctgtaatatgaactctctcacctgttgtgtctgtttcttctctctcatccactgagtaaaattccttcataagcggggtatcccttgagaaagcctagtgcctagagataagttcatgaccctttctcttttctttaaagtgcattctaggtacgtcagtgaattcagtcttatatttgccactcaaacttgttttgagtggtgtgaatacaaagaacaaaggttatttttagaaattctaataatggaatctgtttcagccaagcagttagtaaatgtcaaaagctttcccccaaaaaatctggacgctaactcttacacaactgctcaccaaaacaatttttccttgagtcttttaaaaggagtatgtgctattaggtttctggacataaaattctgtttataaactttctaagatttggaatatactaactgctttaagataataactgctgcgagcttccagagttttcttaactttatcacttaggttgactgaattggcatctcaggactttcctgcaaagtttatgaacattctcactgtagtttttagcttttttgctgcatcatatttgttaatctaattaattgtttagctttatctttagtccattttcttcactggctacacaacatctcactcattataatgtgttgaagagggatttttatggtccacataaaattgtttgcaagtatcttcggcaatatattatctttgtttacgatactctcacttttggtcaaaattattacatctccagggacaagattaaatagtttttctggcatgattcaggctttagtttttgatttcgtgttttcattctttggtttaccccaaaaaactaatgtttagcacacggtttagtttgttttcaaacctgataacgtatgacagtcattgtatcaggttctactattctttacatggcctcagggtgcttactgaaacttaga

SEQ ID NO: 687874 - DNA, 2048 bp, Homo sapiens
aatgttctggttttgctttccccttgtacatagtttagaacaaactttgtaacttcagagccaggatttcatacacaattttaatccaactctttccttcacagattaacatgctgagactcgggaggtggtgatttgcctagggacacagaaaagtaaggattaaaaacttagtttaggattcccaatccagagctccttctattacagtatgcttctttagacaacgagttgttagttatgtaatgaaaagaacatatgaaactggctcacacttccataagctagcagatagttattccccactttaaaaatatccatatagggcagggcgcggtggctcacacctgtaatcccagcactttgggaggccgaggtgggcggatcatgaggtcaggagatcgagaccatcctggctaacacggtgaaaccccgtctccactaaaaatacaaaaaattagccgggcatggtggcaggcacctgtagtcccaggtacttgggaggctgaggcaggagaatggcgtgaacctgggaggcagagcttgcagtgagccgagatcgcaccactgtactccagcctgggctacagagcgagactccttcttaaaaaaaaaaaaaaaatccatatataccaataattcaaacatacgaacagataaattagtaattctttcataattaattactttatgacacgatatgtgtcactgacttccttaaattgttgtttgggtgtacgatagacacttttatttggatttattcaggactttctagaattcatctagaaaaaatcagacacattcctgctctttcttctgtagcagagtgaaatactatttttatgctattctcatttttaatttaaaaggtaaagtccctaaaaaatatcctttggaaaacctgctaatgaaagctcagatcttggggacagcatagcaatgtagaagagtgtgggccgagagacctgtgtattctcttagccccagcacttcctagacagataaacatgggagcttcagtatgtaggtaaggagtttcataagctttgccgtattcatacagcaaatgtatgaaacaattgctgtaatatgaactctctcacctgttgtgtctgtttcttctctctcatccactgagtaaaattccttcataagcggggtatcccttgagaaagcctagtgcctagagataagttcatgaccctttctcttttctttaaagtgcattctaggtacgtcagtgaattcagtcttatatttgccactcaaacttgttttgagtggtgtgaatacaaagaacaaaggttatttttagaaattctaataatggaatctgtttcagccaagcagttagtaaatgtcaaaagctttcccccaaaaaatctggacgctaactcttacacaactgctcaccaaaacaatttttccttgagtcttttaaaaggagtatgtgctattaggtttctggacataaaattctgtttataaactttctaagatttggaatatactaactgctttaagataataactgctgcgagcttccagagttttcttaactttatcacttaggttgactgaattggcatctcaggactttcctgcaaagtttatgaacattctcactgtagtttttagcttttttgctgcatcatatttgttaatctaattaattgtttagctttatctttagtccattttcttcactggctacacaacatctcaytcattataatgtgttgaagagggatttttatggtccacataaaattgtttgcaagtatcttcggcaatatattatctttgtttacgatactctcacttttggtcaaaattattacatctccagggacaagattaaatagtttttctggcatgattcaggctttagtttttgatttcgtgttttcattctttggtttaccccaaaaaactaatgtttagcacacggtttagtttgttttcaaacctgataacgtatgacagtcattgtatcaggttctactattctttacatggcctcagggtgcttactgaaacttaga

SEQ ID NO: 687875 - DNA, 2048 bp, Homo sapiens
aatgttctggttttgctttccccttgtacatagtttagaacaaactttgtaacttcagagccaggatttcatacacaattttaatccaactctttccttcacagattaacatgctgagactcgggaggtggtgatttgcctagggacacagaaaagtaaggattaaaaacttagtttaggattcccaatccagagctccttctattacagtatgcttctttagacaacgagttgttagttatgtaatgaaaagaacatatgaaactggctcacacttccataagctagcagatagttattccccactttaaaaatatccatatagggcagggcgcggtggctcacacctgtaatcccagcactttgggaggccgaggtgggcggatcatgaggtcaggagatcgagaccatcctggctaacacggtgaaaccccgtctccactaaaaatacaaaaaattagccgggcatggtggcaggcacctgtagtcccaggtacttgggaggctgaggcaggagaatggcgtgaacctgggaggcagagcttgcagtgagccgagatcgcaccactgtactccagcctgggctacagagcgagactccttcttaaaaaaaaaaaaaaaatccatatataccaataattcaaacatacgaacagataaattagtaattctttcataattaattactttatgacacgatatgtgtcactgacttccttaaattgttgtttgggtgtacgatagacacttttatttggatttattcaggactttctagaattcatctagaaaaaatcagacacattcctgctctttcttctgtagcagagtgaaatactatttttatgctattctcatttttaatttaaaaggtaaagtccctaaaaaatatcctttggaaaacctgctaatgaaagctcagatcttggggacagcatagcaatgtagaagagtgtgggccgagagacctgtgtattctcttagccccagcacttcctagacagataaacatgggagcttcagtatgtaggtaaggagtttcataagctttgccgtattcatacagcaaatgtatgaaacaattgctgtaatatgaactctctcacctgttgtgtctgtttcttctctctcatccactgagtaaaattccttcataagcggggtatcccttgagaaagcctagtgcctagagataagttcatgaccctttctcttttctttaaagtgcattctaggtacgtcagtgaattcagtcttatatttgccactcaaacttgttttgagtggtgtgaatacaaagaacaaaggttatttttagaaattctaataatggaatctgtttcagccaagcagttagtaaatgtcaaaagctttcccccaaaaaatctggacgctaactcttacacaactgctcaccaaaacaatttttccttgagtcttttaaaaggagtatgtgctattaggtttctggacataaaattctgtttataaactttctaagatttggaatatactaactgctttaagataataactgctgcgagcttccagagttttcttaactttatcacttaggttgactgaattggcatctcaggactttcctgcaaagtttatgaacattctcactgtagtttttagcttttttgctgcatcatatttgttaatctaattaattgtttagctttatctttagtccattttcttcactggctacacaacatctcactcattataatgtgttgaagagggatttttatggtccacataaaattgtttgcaagtatcttcggcaatatattatctttgtttacgatactctcacttttggtcaaaattattacatctccagggacaagattaaatagtttttctggcatgattcaggctttagtttttgatttcgtgttttcattctttggtttaccccaaaaaactaatgtttagcacacrgtttagtttgttttcaaacctgataacgtatgacagtcattgtatcaggttctactattctttacatggcctcagggtgcttactgaaacttaga

SEQ ID NO: 687876 - DNA, 2144 bp, Homo sapiens
gctctttgaggatctgatgaaagctgtacctgttttatccagaaaaaagtacataaaaataaccacacagttttccgtagggttgtttgtggactcattgagcctataaataagaacccttgttactgagcaagaatgtaaaaacgctgttacccatataatgttaaacttaaaaattttttattattatatagtaattgagtttccattgactgctttgaaattagacctgttacctaatctctgagctaaaataacagattatgaactattgacctttttaaaataaacatttttgaacattcccagttttatattgagaaactcatgctaactttgattggattgaatcatatagctttaaaaaataatcttatgtctttattgtttgtctcacattatatcatctttggccaaaagctataaattgacatgctgtgtgttttttttttttttttttttttgagacggagtcttgccctgtcgcccaggctggagtgcagtggcgtgatcttggctcactgcaagctccacctcccaggttcacgccattctcctgccttagcctcccgagtagctgggactacaggcacctgccaccaygcccggctaatttttttatatttttagtggagacggggtttcaccgtgttagccagaatggtctcgatctcctgacctcgtgatctgccagtctcagcctcccagagtgctgggattacagacgtgagccaccacaacatgctgtttttaaggacctcgtatgacatgatttcctaattaggatttcttaattttactaattaaatttacctaaaattattatcgttttgcacaataaaaaagtctgtgtaaattgcataaattgcatcttgctcttctggatatttcagtactgaatagtttaattttttttctactgtgttttattagaaggcatatagaatgtagacattatgacaggatgtcaagcgttttgtgattctaggtgtcattcttcaaaaacaaattattgtttcagaaactgttttggctgggcctacttcacctataccttctctgggaaatgtgagtgaaactgcatctggatcagttacacagccaaagaaaattcgaggaattggatttggagacatttttaaagaaggctctgtgaaacttcggacaagaacatccagtagtgaaacagaagagaaaaaaccagaaaaggtggtaatgatggacttgttagattaactccactcattctctcattaagcattttttaaaatgtaaaagtcagtttgtaactctgttagatttctttttttcagatcactaataatttggttatgaatgaggaggctgtgagaaattttgtctccaaatttacaatgattaatattcatgtttgaatctaataaaattagaatgcttatttcttggtaaatttaacacacttagtagaagctttagggtttttagttagcacagtgtaaataaaaattagagggttttttgccttttaaagctaaaattatatataaatttagttatatatataattaatataataaatatatatttaatttgaattagacctaaaatggactgtttttaaaatggatttagaaaatattaaattacttgatattttggcactacttaaatttcctctagattgtcaacattcattaaatttactaaacttctttgaatgtgtggagtattttatttcattagcattttgctggcattgtgaaatgaaaccaagtaagtgagccataaattataagaactaaaaagaggctttaaaataaaaccttaagctgttaatttggtggtaaaatagctacagtctgtagaacattttttcacagttccttctatcagtcctatctctttaactctgaagaaattatagtatttcagtatttatttgattcgtgtagctacatctcatttaaagactgtgttttggttattgagatactattaagtttcctcctaagataggtggtttcaactttttttattcctttcctaacttgctacgtattttcttatgtagcagtgaagagttgggttcaggaaagagaacttccactttctatcctacatattcctagctctgagactatctggcattaggattgtggggtcaa

SEQ ID NO: 687877 - DNA, 359 bp, Homo sapiens
tgagtcagtattcattctttaaagttccataacttaacagatgtcttggtgttacatatcatgccatttttttcctcctgggacataaaggattttaatcaaggttttcttctggacaactttttttttgttatataaaacacaggtatccataaagatacttgtgtctgattactcacgtttccatggtgtcagttatttgatgaatagcacagcaaggaagaagagctataaattgttakccaaaatattctctcattacatctgtcttccctaagagcatgtctccttctccttggttttcagacttccaattattagggcttacagttagtgaggcttctctttcagctccacat

SEQ ID NO: 687878 - DNA, 2705 bp, Homo sapiens
aggggagggtcatttcttcttctgagacatggtggttgggtccaggtgacatccacagtctgggccctgacccctttcactctcagcgggaccccttgagacaccagcttcccttccttgctygggtgtccacaccagcagttctacctactacattattacagccagatcaggatcaatgtcctctctctggaataaatgcagtgaccactgttctttgagcattatttatcttaaattattgttttaattagaaatgtatttcacttatattagccaaatttcctttcaatctaaccaaatttcttttaagtgaaaattaaatatttaccttctgctatcaagcattctatgtacacaaaatgtttatttttttcaactttagaaaaaaattgaaaatgtctacatgctactaatctaaaaatacaggctctgggtttatatggtgtttacctttcttccaaattttaaggaatagatatttaaatggcatctactttgttttaaaatacataaaatgttttaagcttttgacctcaaaatttacagtagcaaagctactccgtaatgaataaaccacagaatcaaaacaaagaaagattccacagaccagtctaaccaacaatacaattataaactagttgttcaaatatcaaaaaccaatttcaatgacaaatgaatggtatgaaaaccccgcaaatgtcaagtagaatatattatacttgaatgaaattatgagttgagagtaggaaatctatgtttaaccaagcaaattaaataatgtttatgaggaaattatctgctaatgttttattatttggcaagctattcagtggaacacaaagatattcttaatgaagtcgaaaatatattttaaaatgttactgaagtggattaaaaaataatgaggacatgaataacttttaaaagtattctgggataaagagagaaaaataaatttagatttcatacatacataaaatatattttaaaagttgtgttttctggttgctcaaataaaaggagcagatatttaaattccatgcctttcattttaaagtttaggaaatgcttatagctttccacactgacatttatactgacacagttaatctaatcgagtgataacaaaatcaaaacaagcagaattctcttgagcaatctattttcttgatttttaaaagtcaatgtactctcaaagaaacaaaactattattcgtggattctgttatttgaaaacatttactgatcatttaccttacaccaaatgatctccagctcgtggaaaaatatgtaaagttgcccagctgcattaagcttaaactcttctgaaggagaaaagaagcaatggagtagggacattaaagcaggagtgtggtgatatggctgagacttctacttgcacactgtggtagctgtgtggagaatggattgaaaaaagggcaatgacagaagcttaaattagtatcaaatatggcaatcctgtaaatttaggtgtccttgaaataagaatgtataatagttctcattatttccccaagaaatctctgcatttggccttgtgagggaagcgctatagttaccaagtggtgggggtgggaaggtgaatttgaaacaacatttggaattactacactttaaaggtaaagctggcaggaattccatacacgtcagatctgaaaatgtgtgtgtgtgtgtgtgtgtgtgtgtgtgtgtctgtctgtgtgtgtttgtgtgtgtgtgaagcagggagagagagcaagagtgaaagtgagcaagagagagaggagagagagagagagaatcagacagatacagaaaaagattgacagagctgcagagacagaattaaaaggggacaccaagaatattgagctgagaaactataaaatgggagtagccgttaaacagaatggggaagagcaaatttggggagtttcagtggctcaatatagacatattaattttgagattcctaactgacatccacgtggataagtcagggagtgttgggtgtagtgtccagtgtttaggtgtaataagaaatatcaggaaattaatgacacaaacattagtaagaaagcaaagataagaagtcgaagtcctgagcctaatggtcctctaatatttaaaaaatagaaaagatgaaacctgcaataaaggactaggggtaattatccaaaacatggtgggggggaagtaggttaagtattctggaattctataaaaaagttttacaaagagaaggtggagatcaactgtgtgaaatgctgctgatatataaattaagacgaaggccgaggagttatggttcaatttatagtttaacaatatggatagcacttatgttttgatacgagcagcttcgttggagtgagtaggtgagaaatcatattggagtggttgctgaaatgaaagtctgatctctggattcttaaggaaaaattttattggactgcagagacataaattggatttttaattctggagtcaggatgtgctcagtaaacatgtgcccattaatgcctcctcgcatttttttagctcggtattctgttatcttttaataatataataatgacttgcaaaacctacacccattttgcagcaaaccgtgacacatgtatacctgtgtaacaaacctgcatgttctgcacatttatcccagaacttaaagtatatatatacactttatatatatatat

SEQ ID NO: 687879 - DNA, 2705 bp, Homo sapiens
aggggagggtcatttcttcttctgagacatggtggttgggtccaggtgacatccacagtctgggccctgacccctttcactctcagcgggaccccttgagacaccagcttcccttccttgctcgggtgtccacaccagcagttctacctactacatyattacagccagatcaggatcaatgtcctctctctggaataaatgcagtgaccactgttctttgagcattatttatcttaaattattgttttaattagaaatgtatttcacttatattagccaaatttcctttcaatctaaccaaatttcttttaagtgaaaattaaatatttaccttctgctatcaagcattctatgtacacaaaatgtttatttttttcaactttagaaaaaaattgaaaatgtctacatgctactaatctaaaaatacaggctctgggtttatatggtgtttacctttcttccaaattttaaggaatagatatttaaatggcatctactttgttttaaaatacataaaatgttttaagcttttgacctcaaaatttacagtagcaaagctactccgtaatgaataaaccacagaatcaaaacaaagaaagattccacagaccagtctaaccaacaatacaattataaactagttgttcaaatatcaaaaaccaatttcaatgacaaatgaatggtatgaaaaccccgcaaatgtcaagtagaatatattatacttgaatgaaattatgagttgagagtaggaaatctatgtttaaccaagcaaattaaataatgtttatgaggaaattatctgctaatgttttattatttggcaagctattcagtggaacacaaagatattcttaatgaagtcgaaaatatattttaaaatgttactgaagtggattaaaaaataatgaggacatgaataacttttaaaagtattctgggataaagagagaaaaataaatttagatttcatacatacataaaatatattttaaaagttgtgttttctggttgctcaaataaaaggagcagatatttaaattccatgcctttcattttaaagtttaggaaatgcttatagctttccacactgacatttatactgacacagttaatctaatcgagtgataacaaaatcaaaacaagcagaattctcttgagcaatctattttcttgatttttaaaagtcaatgtactctcaaagaaacaaaactattattcgtggattctgttatttgaaaacatttactgatcatttaccttacaccaaatgatctccagctcgtggaaaaatatgtaaagttgcccagctgcattaagcttaaactcttctgaaggagaaaagaagcaatggagtagggacattaaagcaggagtgtggtgatatggctgagacttctacttgcacactgtggtagctgtgtggagaatggattgaaaaaagggcaatgacagaagcttaaattagtatcaaatatggcaatcctgtaaatttaggtgtccttgaaataagaatgtataatagttctcattatttccccaagaaatctctgcatttggccttgtgagggaagcgctatagttaccaagtggtgggggtgggaaggtgaatttgaaacaacatttggaattactacactttaaaggtaaagctggcaggaattccatacacgtcagatctgaaaatgtgtgtgtgtgtgtgtgtgtgtgtgtgtgtgtctgtctgtgtgtgtttgtgtgtgtgtgaagcagggagagagagcaagagtgaaagtgagcaagagagagaggagagagagagagagaatcagacagatacagaaaaagattgacagagctgcagagacagaattaaaaggggacaccaagaatattgagctgagaaactataaaatgggagtagccgttaaacagaatggggaagagcaaatttggggagtttcagtggctcaatatagacatattaattttgagattcctaactgacatccacgtggataagtcagggagtgttgggtgtagtgtccagtgtttaggtgtaataagaaatatcaggaaattaatgacacaaacattagtaagaaagcaaagataagaagtcgaagtcctgagcctaatggtcctctaatatttaaaaaatagaaaagatgaaacctgcaataaaggactaggggtaattatccaaaacatggtgggggggaagtaggttaagtattctggaattctataaaaaagttttacaaagagaaggtggagatcaactgtgtgaaatgctgctgatatataaattaagacgaaggccgaggagttatggttcaatttatagtttaacaatatggatagcacttatgttttgatacgagcagcttcgttggagtgagtaggtgagaaatcatattggagtggttgctgaaatgaaagtctgatctctggattcttaaggaaaaattttattggactgcagagacataaattggatttttaattctggagtcaggatgtgctcagtaaacatgtgcccattaatgcctcctcgcatttttttagctcggtattctgttatcttttaataatataataatgacttgcaaaacctacacccattttgcagcaaaccgtgacacatgtatacctgtgtaacaaacctgcatgttctgcacatttatcccagaacttaaagtatatatatacactttatatatatatat

SEQ ID NO: 687880 - DNA, 2705 bp, Homo sapiens
aggggagggtcatttcttcttctgagacatggtggttgggtccaggtgacatccacagtctgggccctgacccctttcactctcagcgggaccccttgagacaccagcttcccttccttgctcgggtgtccacaccagcagttctacctactacattattacagccagatcaggatcaatgtcctctctctggaataaatgcagtgaccactgttctttgagcattatttatcttaaattattgttttaattagaaatgtatttcacttatattagccaaatttcctttcaatstaaccaaatttcttttaagtgaaaattaaatatttaccttctgctatcaagcattctatgtacacaaaatgtttatttttttcaactttagaaaaaaattgaaaatgtctacatgctactaatctaaaaatacaggctctgggtttatatggtgtttacctttcttccaaattttaaggaatagatatttaaatggcatctactttgttttaaaatacataaaatgttttaagcttttgacctcaaaatttacagtagcaaagctactccgtaatgaataaaccacagaatcaaaacaaagaaagattccacagaccagtctaaccaacaatacaattataaactagttgttcaaatatcaaaaaccaatttcaatgacaaatgaatggtatgaaaaccccgcaaatgtcaagtagaatatattatacttgaatgaaattatgagttgagagtaggaaatctatgtttaaccaagcaaattaaataatgtttatgaggaaattatctgctaatgttttattatttggcaagctattcagtggaacacaaagatattcttaatgaagtcgaaaatatattttaaaatgttactgaagtggattaaaaaataatgaggacatgaataacttttaaaagtattctgggataaagagagaaaaataaatttagatttcatacatacataaaatatattttaaaagttgtgttttctggttgctcaaataaaaggagcagatatttaaattccatgcctttcattttaaagtttaggaaatgcttatagctttccacactgacatttatactgacacagttaatctaatcgagtgataacaaaatcaaaacaagcagaattctcttgagcaatctattttcttgatttttaaaagtcaatgtactctcaaagaaacaaaactattattcgtggattctgttatttgaaaacatttactgatcatttaccttacaccaaatgatctccagctcgtggaaaaatatgtaaagttgcccagctgcattaagcttaaactcttctgaaggagaaaagaagcaatggagtagggacattaaagcaggagtgtggtgatatggctgagacttctacttgcacactgtggtagctgtgtggagaatggattgaaaaaagggcaatgacagaagcttaaattagtatcaaatatggcaatcctgtaaatttaggtgtccttgaaataagaatgtataatagttctcattatttccccaagaaatctctgcatttggccttgtgagggaagcgctatagttaccaagtggtgggggtgggaaggtgaatttgaaacaacatttggaattactacactttaaaggtaaagctggcaggaattccatacacgtcagatctgaaaatgtgtgtgtgtgtgtgtgtgtgtgtgtgtgtgtctgtctgtgtgtgtttgtgtgtgtgtgaagcagggagagagagcaagagtgaaagtgagcaagagagagaggagagagagagagagaatcagacagatacagaaaaagattgacagagctgcagagacagaattaaaaggggacaccaagaatattgagctgagaaactataaaatgggagtagccgttaaacagaatggggaagagcaaatttggggagtttcagtggctcaatatagacatattaattttgagattcctaactgacatccacgtggataagtcagggagtgttgggtgtagtgtccagtgtttaggtgtaataagaaatatcaggaaattaatgacacaaacattagtaagaaagcaaagataagaagtcgaagtcctgagcctaatggtcctctaatatttaaaaaatagaaaagatgaaacctgcaataaaggactaggggtaattatccaaaacatggtgggggggaagtaggttaagtattctggaattctataaaaaagttttacaaagagaaggtggagatcaactgtgtgaaatgctgctgatatataaattaagacgaaggccgaggagttatggttcaatttatagtttaacaatatggatagcacttatgttttgatacgagcagcttcgttggagtgagtaggtgagaaatcatattggagtggttgctgaaatgaaagtctgatctctggattcttaaggaaaaattttattggactgcagagacataaattggatttttaattctggagtcaggatgtgctcagtaaacatgtgcccattaatgcctcctcgcatttttttagctcggtattctgttatcttttaataatataataatgacttgcaaaacctacacccattttgcagcaaaccgtgacacatgtatacctgtgtaacaaacctgcatgttctgcacatttatcccagaacttaaagtatatatatacactttatatatatatat

SEQ ID NO: 687881 - DNA, 2705 bp, Homo sapiens
aggggagggtcatttcttcttctgagacatggtggttgggtccaggtgacatccacagtctgggccctgacccctttcactctcagcgggaccccttgagacaccagcttcccttccttgctcgggtgtccacaccagcagttctacctactacattattacagccagatcaggatcaatgtcctctctctggaataaatgcagtgaccactgttctttgagcattatttatcttaaattattgttttaattagaaatgtatttcacttatattagccaaatttcctttcaatctaaccaaatttcttttaagtgaaaattaaatatttaccttctgctatcaagcattctatgtacacaaaatgtttatttttttcaactttagaaaaaaattgaaaatgtctacatgctactaatctaaaaatacaggctctgggtttatatggtgtttayctttcttccaaattttaaggaatagatatttaaatggcatctactttgttttaaaatacataaaatgttttaagcttttgacctcaaaatttacagtagcaaagctactccgtaatgaataaaccacagaatcaaaacaaagaaagattccacagaccagtctaaccaacaatacaattataaactagttgttcaaatatcaaaaaccaatttcaatgacaaatgaatggtatgaaaaccccgcaaatgtcaagtagaatatattatacttgaatgaaattatgagttgagagtaggaaatctatgtttaaccaagcaaattaaataatgtttatgaggaaattatctgctaatgttttattatttggcaagctattcagtggaacacaaagatattcttaatgaagtcgaaaatatattttaaaatgttactgaagtggattaaaaaataatgaggacatgaataacttttaaaagtattctgggataaagagagaaaaataaatttagatttcatacatacataaaatatattttaaaagttgtgttttctggttgctcaaataaaaggagcagatatttaaattccatgcctttcattttaaagtttaggaaatgcttatagctttccacactgacatttatactgacacagttaatctaatcgagtgataacaaaatcaaaacaagcagaattctcttgagcaatctattttcttgatttttaaaagtcaatgtactctcaaagaaacaaaactattattcgtggattctgttatttgaaaacatttactgatcatttaccttacaccaaatgatctccagctcgtggaaaaatatgtaaagttgcccagctgcattaagcttaaactcttctgaaggagaaaagaagcaatggagtagggacattaaagcaggagtgtggtgatatggctgagacttctacttgcacactgtggtagctgtgtggagaatggattgaaaaaagggcaatgacagaagcttaaattagtatcaaatatggcaatcctgtaaatttaggtgtccttgaaataagaatgtataatagttctcattatttccccaagaaatctctgcatttggccttgtgagggaagcgctatagttaccaagtggtgggggtgggaaggtgaatttgaaacaacatttggaattactacactttaaaggtaaagctggcaggaattccatacacgtcagatctgaaaatgtgtgtgtgtgtgtgtgtgtgtgtgtgtgtgtctgtctgtgtgtgtttgtgtgtgtgtgaagcagggagagagagcaagagtgaaagtgagcaagagagagaggagagagagagagagaatcagacagatacagaaaaagattgacagagctgcagagacagaattaaaaggggacaccaagaatattgagctgagaaactataaaatgggagtagccgttaaacagaatggggaagagcaaatttggggagtttcagtggctcaatatagacatattaattttgagattcctaactgacatccacgtggataagtcagggagtgttgggtgtagtgtccagtgtttaggtgtaataagaaatatcaggaaattaatgacacaaacattagtaagaaagcaaagataagaagtcgaagtcctgagcctaatggtcctctaatatttaaaaaatagaaaagatgaaacctgcaataaaggactaggggtaattatccaaaacatggtgggggggaagtaggttaagtattctggaattctataaaaaagttttacaaagagaaggtggagatcaactgtgtgaaatgctgctgatatataaattaagacgaaggccgaggagttatggttcaatttatagtttaacaatatggatagcacttatgttttgatacgagcagcttcgttggagtgagtaggtgagaaatcatattggagtggttgctgaaatgaaagtctgatctctggattcttaaggaaaaattttattggactgcagagacataaattggatttttaattctggagtcaggatgtgctcagtaaacatgtgcccattaatgcctcctcgcatttttttagctcggtattctgttatcttttaataatataataatgacttgcaaaacctacacccattttgcagcaaaccgtgacacatgtatacctgtgtaacaaacctgcatgttctgcacatttatcccagaacttaaagtatatatatacactttatatatatatat

SEQ ID NO: 687882 - DNA, 2705 bp, Homo sapiens
aggggagggtcatttcttcttctgagacatggtggttgggtccaggtgacatccacagtctgggccctgacccctttcactctcagcgggaccccttgagacaccagcttcccttccttgctcgggtgtccacaccagcagttctacctactacattattacagccagatcaggatcaatgtcctctctctggaataaatgcagtgaccactgttctttgagcattatttatcttaaattattgttttaattagaaatgtatttcacttatattagccaaatttcctttcaatctaaccaaatttcttttaagtgaaaattaaatatttaccttctgctatcaagcattctatgtacacaaaatgtttatttttttcaactttagaaaaaaattgaaaatgtctacatgctactaatctaaaaatacaggctctgggtttatatggtgtttacctttcttccaaattttaaggaatagatayttaaatggcatctactttgttttaaaatacataaaatgttttaagcttttgacctcaaaatttacagtagcaaagctactccgtaatgaataaaccacagaatcaaaacaaagaaagattccacagaccagtctaaccaacaatacaattataaactagttgttcaaatatcaaaaaccaatttcaatgacaaatgaatggtatgaaaaccccgcaaatgtcaagtagaatatattatacttgaatgaaattatgagttgagagtaggaaatctatgtttaaccaagcaaattaaataatgtttatgaggaaattatctgctaatgttttattatttggcaagctattcagtggaacacaaagatattcttaatgaagtcgaaaatatattttaaaatgttactgaagtggattaaaaaataatgaggacatgaataacttttaaaagtattctgggataaagagagaaaaataaatttagatttcatacatacataaaatatattttaaaagttgtgttttctggttgctcaaataaaaggagcagatatttaaattccatgcctttcattttaaagtttaggaaatgcttatagctttccacactgacatttatactgacacagttaatctaatcgagtgataacaaaatcaaaacaagcagaattctcttgagcaatctattttcttgatttttaaaagtcaatgtactctcaaagaaacaaaactattattcgtggattctgttatttgaaaacatttactgatcatttaccttacaccaaatgatctccagctcgtggaaaaatatgtaaagttgcccagctgcattaagcttaaactcttctgaaggagaaaagaagcaatggagtagggacattaaagcaggagtgtggtgatatggctgagacttctacttgcacactgtggtagctgtgtggagaatggattgaaaaaagggcaatgacagaagcttaaattagtatcaaatatggcaatcctgtaaatttaggtgtccttgaaataagaatgtataatagttctcattatttccccaagaaatctctgcatttggccttgtgagggaagcgctatagttaccaagtggtgggggtgggaaggtgaatttgaaacaacatttggaattactacactttaaaggtaaagctggcaggaattccatacacgtcagatctgaaaatgtgtgtgtgtgtgtgtgtgtgtgtgtgtgtgtctgtctgtgtgtgtttgtgtgtgtgtgaagcagggagagagagcaagagtgaaagtgagcaagagagagaggagagagagagagagaatcagacagatacagaaaaagattgacagagctgcagagacagaattaaaaggggacaccaagaatattgagctgagaaactataaaatgggagtagccgttaaacagaatggggaagagcaaatttggggagtttcagtggctcaatatagacatattaattttgagattcctaactgacatccacgtggataagtcagggagtgttgggtgtagtgtccagtgtttaggtgtaataagaaatatcaggaaattaatgacacaaacattagtaagaaagcaaagataagaagtcgaagtcctgagcctaatggtcctctaatatttaaaaaatagaaaagatgaaacctgcaataaaggactaggggtaattatccaaaacatggtgggggggaagtaggttaagtattctggaattctataaaaaagttttacaaagagaaggtggagatcaactgtgtgaaatgctgctgatatataaattaagacgaaggccgaggagttatggttcaatttatagtttaacaatatggatagcacttatgttttgatacgagcagcttcgttggagtgagtaggtgagaaatcatattggagtggttgctgaaatgaaagtctgatctctggattcttaaggaaaaattttattggactgcagagacataaattggatttttaattctggagtcaggatgtgctcagtaaacatgtgcccattaatgcctcctcgcatttttttagctcggtattctgttatcttttaataatataataatgacttgcaaaacctacacccattttgcagcaaaccgtgacacatgtatacctgtgtaacaaacctgcatgttctgcacatttatcccagaacttaaagtatatatatacactttatatatatatat

SEQ ID NO: 687883 - DNA, 2705 bp, Homo sapiens
aggggagggtcatttcttcttctgagacatggtggttgggtccaggtgacatccacagtctgggccctgacccctttcactctcagcgggaccccttgagacaccagcttcccttccttgctcgggtgtccacaccagcagttctacctactacattattacagccagatcaggatcaatgtcctctctctggaataaatgcagtgaccactgttctttgagcattatttatcttaaattattgttttaattagaaatgtatttcacttatattagccaaatttcctttcaatctaaccaaatttcttttaagtgaaaattaaatatttaccttctgctatcaagcattctatgtacacaaaatgtttatttttttcaactttagaaaaaaattgaaaatgtctacatgctactaatctaaaaatacaggctctgggtttatatggtgtttacctttcttccaaattttaaggaatagatatttaaatggcatcyactttgttttaaaatacataaaatgttttaagcttttgacctcaaaatttacagtagcaaagctactccgtaatgaataaaccacagaatcaaaacaaagaaagattccacagaccagtctaaccaacaatacaattataaactagttgttcaaatatcaaaaaccaatttcaatgacaaatgaatggtatgaaaaccccgcaaatgtcaagtagaatatattatacttgaatgaaattatgagttgagagtaggaaatctatgtttaaccaagcaaattaaataatgtttatgaggaaattatctgctaatgttttattatttggcaagctattcagtggaacacaaagatattcttaatgaagtcgaaaatatattttaaaatgttactgaagtggattaaaaaataatgaggacatgaataacttttaaaagtattctgggataaagagagaaaaataaatttagatttcatacatacataaaatatattttaaaagttgtgttttctggttgctcaaataaaaggagcagatatttaaattccatgcctttcattttaaagtttaggaaatgcttatagctttccacactgacatttatactgacacagttaatctaatcgagtgataacaaaatcaaaacaagcagaattctcttgagcaatctattttcttgatttttaaaagtcaatgtactctcaaagaaacaaaactattattcgtggattctgttatttgaaaacatttactgatcatttaccttacaccaaatgatctccagctcgtggaaaaatatgtaaagttgcccagctgcattaagcttaaactcttctgaaggagaaaagaagcaatggagtagggacattaaagcaggagtgtggtgatatggctgagacttctacttgcacactgtggtagctgtgtggagaatggattgaaaaaagggcaatgacagaagcttaaattagtatcaaatatggcaatcctgtaaatttaggtgtccttgaaataagaatgtataatagttctcattatttccccaagaaatctctgcatttggccttgtgagggaagcgctatagttaccaagtggtgggggtgggaaggtgaatttgaaacaacatttggaattactacactttaaaggtaaagctggcaggaattccatacacgtcagatctgaaaatgtgtgtgtgtgtgtgtgtgtgtgtgtgtgtgtctgtctgtgtgtgtttgtgtgtgtgtgaagcagggagagagagcaagagtgaaagtgagcaagagagagaggagagagagagagagaatcagacagatacagaaaaagattgacagagctgcagagacagaattaaaaggggacaccaagaatattgagctgagaaactataaaatgggagtagccgttaaacagaatggggaagagcaaatttggggagtttcagtggctcaatatagacatattaattttgagattcctaactgacatccacgtggataagtcagggagtgttgggtgtagtgtccagtgtttaggtgtaataagaaatatcaggaaattaatgacacaaacattagtaagaaagcaaagataagaagtcgaagtcctgagcctaatggtcctctaatatttaaaaaatagaaaagatgaaacctgcaataaaggactaggggtaattatccaaaacatggtgggggggaagtaggttaagtattctggaattctataaaaaagttttacaaagagaaggtggagatcaactgtgtgaaatgctgctgatatataaattaagacgaaggccgaggagttatggttcaatttatagtttaacaatatggatagcacttatgttttgatacgagcagcttcgttggagtgagtaggtgagaaatcatattggagtggttgctgaaatgaaagtctgatctctggattcttaaggaaaaattttattggactgcagagacataaattggatttttaattctggagtcaggatgtgctcagtaaacatgtgcccattaatgcctcctcgcatttttttagctcggtattctgttatcttttaataatataataatgacttgcaaaacctacacccattttgcagcaaaccgtgacacatgtatacctgtgtaacaaacctgcatgttctgcacatttatcccagaacttaaagtatatatatacactttatatatatatat

SEQ ID NO: 687884 - DNA, 869 bp, Homo sapiens
tttaaataaatttgtacattcagtgcctagaacaaaaccagcattttgtagattccaaagaattatttgttgtataaatgatgaataacttaaataagttattatttataacatctatatacaaacaatatattacctgagaatacagtgataacatttgttatgtataaaatgattgcaatctcagttaaaaaatattttttgcatgagttattatcatatgcagatgctcacattgttttgtttagatgaaaatgtttgtaactactatgcacatttttgttacttaagccttttggtcttgctgccatagcaaataccgtgcctcttaagaacatgaacctgtttttcttcattttttagcagatttcttaacgaaatatatagcatactattttgtttaacacataagcagacaccctgtcgaagcaaagagacatctactccaccattaccacccatccctctgctaacgtggctgctgaagatgttacctagagcagaggactttgtgttcagcytaagcactttgtatcctttattttcaattgggtaggagataaaataattcagcagcaataaaagtcacacttcttaaagttgcagtctcaccaatgcaccacaatgtagcagtctctcttatgaggtatcacgtggagttcttcatctcaccaccaagatgattaaggaacagggacacacgggtgaggttggagggaaagtttaataatcaaaaggaggaagctctctgcagcagacaagagagtccaactggattgccgtttttactgttgaatcaaaaagcttttataagaaactcctctcagctctatataaaactgtctgcacaattccctttatatatccag

SEQ ID NO: 687885 - DNA, 869 bp, Homo sapiens
tttaaataaatttgtacattcagtgcctagaacaaaaccagcattttgtagattccaaagaattatttgttgtataaatgatgaataacttaaataagttattatttataacatctatatacaaacaatatattacctgagaatacagtgataacatttgttatgtataaaatgattgcaatctcagttaaaaaatattttttgcatgagttattatcatatgcagatgctcacattgttttgtttagatgaaaatgtttgtaactactatgcacatttttgttacttaagccttttggtcttgctgccatagcaaataccgtgcctcttaagaacatgaacctgtttttcttcattttttagcagatttcttaacgaaatatatagcatactattttgtttaacacataagcagacaccctgtcgaagcaaagagacatctactccaccattaccacccatccctctgctaacgtggctgctgaagatgttacctagagcagaggactttgtgttcagcctaagcactttgtatcctttattttcaattgggtaggagataaaataattcagcagcaataaaagtcacacttcttaaagttgcagtctcaccaatgcaccacaatgtagcagtctctcttatgaggtatcacgtggagttcttcatctcaccaccaagatgattaaggaacagggacacacgggtgaggttggagkgaaagtttaataatcaaaaggaggaagctctctgcagcagacaagagagtccaactggattgccgtttttactgttgaatcaaaaagcttttataagaaactcctctcagctctatataaaactgtctgcacaattccctttatatatccag

SEQ ID NO: 687886 - DNA, 869 bp, Homo sapiens
tttaaataaatttgtacattcagtgcctagaacaaaaccagcattttgtagattccaaagaattatttgttgtataaatgatgaataacttaaataagttattatttataacatctatatacaaacaatatattacctgagaatacagtgataacatttgttatgtataaaatgattgcaatctcagttaaaaaatattttttgcatgagttattatcatatgcagatgctcacattgttttgtttagatgaaaatgtttgtaactactatgcacatttttgttacttaagccttttggtcttgctgccatagcaaataccgtgcctcttaagaacatgaacctgtttttcttcattttttagcagatttcttaacgaaatatatagcatactattttgtttaacacataagcagacaccctgtcgaagcaaagagacatctactccaccattaccacccatccctctgctaacgtggctgctgaagatgttacctagagcagaggactttgtgttcagcctaagcactttgtatcctttattttcaattgggtaggagataaaataattcagcagcaataaaagtcacacttcttaaagttgcagtctcaccaatgcaccacaatgtagcagtctctcttatgaggtatcacgtggagttcttcatctcaccaccaagatgattaaggaacagggacacacgggtgaggttggagggaaagtttaataakcaaaaggaggaagctctctgcagcagacaagagagtccaactggattgccgtttttactgttgaatcaaaaagcttttataagaaactcctctcagctctatataaaactgtctgcacaattccctttatatatccag

SEQ ID NO: 687887 - DNA, 763 bp, Homo sapiens
gtcgttcaagcatacatgwgcaagattgtgacataggtaaagttgtgacgggggtgttcagtgtgcagatgatttcatcacccgggtagtcagtgctgtgtccgacagtattcgtgttttgttttcttcctgaagctgtctctccttccacccctcctccctcaagcaggcttccgcgtccccggtccccctcgttctgcccatgcaagaactgtcatctgtaagttcccacttctagatgagaacacgcggtatttagccgatctttgctttcatcttcggtggtggcggtgaaagaggcatgacactaaatcgacccttaggacgccgtttatgttgaagtcgaggagcttatcggggaaataggagaagtacggacgccacacgtggccgagagaaaagtctgaaaatgcccctcgcatccaagcggggacccggcctcgacctcccgaaatcatacaccgagtggggaagcccagcaaggcccgcctgtctagattcctctcggcctctctaagcaccgaagcacgcgcttctcactttcatgggaggggcagggccctacccggcacgggggtgtctgacagactgacagagaaagagacagacatagaaagacagagatggacagcgagagatagagtgaaacagacagacagagagagagagagagagagagagagaaacagacagggagggagaaagacaaacagagagagagacagacagacagaaagacagagacagagagaaacagacagaa

SEQ ID NO: 687888 - DNA, 763 bp, Homo sapiens
gtcgttcaagcatacatgagcaagattgtgacataggtaaasttgtgacgggggtgttcagtgtgcagatgatttcatcacccgggtagtcagtgctgtgtccgacagtattcgtgttttgttttcttcctgaagctgtctctccttccacccctcctccctcaagcaggcttccgcgtccccggtccccctcgttctgcccatgcaagaactgtcatctgtaagttcccacttctagatgagaacacgcggtatttagccgatctttgctttcatcttcggtggtggcggtgaaagaggcatgacactaaatcgacccttaggacgccgtttatgttgaagtcgaggagcttatcggggaaataggagaagtacggacgccacacgtggccgagagaaaagtctgaaaatgcccctcgcatccaagcggggacccggcctcgacctcccgaaatcatacaccgagtggggaagcccagcaaggcccgcctgtctagattcctctcggcctctctaagcaccgaagcacgcgcttctcactttcatgggaggggcagggccctacccggcacgggggtgtctgacagactgacagagaaagagacagacatagaaagacagagatggacagcgagagatagagtgaaacagacagacagagagagagagagagagagagagagaaacagacagggagggagaaagacaaacagagagagagacagacagacagaaagacagagacagagagaaacagacagaa

SEQ ID NO: 687889 - DNA, 763 bp, Homo sapiens
gtcgttcaagcatacatgagcaagattgtgacataggtaaagttgtgacgggggtgttcagtgtgcagatgatttcatcacccgggtagtcagtgctgtgtccgacagtattcgtgttttgttttcttcctgaagctgtctctccttccacccctcctccctcaagcaggcttccgcgtccccggtccccctcgttctgcccatgcaagaactgtcatctgtaagttcccacttctagatgagaacacgcggtatttagccgatctttgctktcatcttcggtggtggcggtgaaagaggcatgacactaaatcgacccttaggacgccgtttatgttgaagtcgaggagcttatcggggaaataggagaagtacggacgccacacgtggccgagagaaaagtctgaaaatgcccctcgcatccaagcggggacccggcctcgacctcccgaaatcatacaccgagtggggaagcccagcaaggcccgcctgtctagattcctctcggcctctctaagcaccgaagcacgcgcttctcactttcatgggaggggcagggccctacccggcacgggggtgtctgacagactgacagagaaagagacagacatagaaagacagagatggacagcgagagatagagtgaaacagacagacagagagagagagagagagagagagagaaacagacagggagggagaaagacaaacagagagagagacagacagacagaaagacagagacagagagaaacagacagaa

SEQ ID NO: 687890 - DNA, 878 bp, Homo sapiens
atgaaaatgaaaatgaaacgcaccaaaataattaaaaagtgagtttctggggaaaaagaagaaaagaaaaaagaaaaaaacaacaaaacagaacaaccccaccgtgacatacacgtacgcctctcgcctttcgaggcctcaaacacgttaggaattatgcgtgatttctttttttaacttcattttatgttattatcatgattgatgtttcgagacggagtctcggaggcccgccctccctggttgcccagacaaccccgggagacagaccctggctgggcccgattgttcttctccttggtcaggggtttccttgtctttcttcgtgtctttaacccgcgtggactcttccgctcgggtttgacagatggcagctccactttaggccttgttgttgttggggactttcctgattctccccagatgtagtgaaagcaggtagatttgccttgcctggacttgcctggccttgccttttctttctttctttctttattactttctctttttcttcttcttcttcttcttcttcttcttcttcttcttcttcttcttcttcttcttcttcttcttcttcttcttyttttttttgagacagagtttcactcttgttgcccaggctagagggcaatggtgcgatctcggctcaccgcaccctccgcctcccaggttcaagcgattctcctgcctcagcctcctgattagctgggattacaggcatgggccaccgtgcctggctgatgtttgtacttttagtagagacggtgtttttccatgttggtcaggctggtctcccactcccaacctcaggtggtccgcctgccttagcctcccaaagtgctgggatgacaggcgtgagccaccgcgcccagcctctc

SEQ ID NO: 687891 - DNA, 622 bp, Homo sapiens
gtttgtgatggtcagggaaagtaagagaattttccatgatgacatgtcttttactctttttttttttttaatttaaaatccccgcctgactctgaaacatcaggttgtataataattcaatgcttggattactatttagcagtgcttgacatttcccaaaacattatyttcactgctattctatcatgcgaaagccttaagccaccccatgaagtcagtaggtggataataaatatttttctaaagaatattctttttctaagaattaactgtagttaggatgcttcatcaactatcaattcttgattactcaacatttaacagtgaaaaagtggaaaaatccagctttcatagctgaaaatgttgaatatgtaaaatgtatttttattttcttttgacctcaatccatgtggatttgaaggaatgaatgaattagtagatggatggatagatggacaaacagttggacagaaggttgaatggatggatgtaataggtccgactgcacttctgggaagagcccagatttatactgaactggaaagcatcctgatgcatgagaactccatccccaacctcacacttttctgttccttattccttttgaggaatagctggaatc

SEQ ID NO: 687892 - DNA, 1419 bp, Homo sapiens
gctaatgtttattgagcactcactatgtgccaactagttayataagttctgtacatgcattaactcatgtaatacttataataatcttctttaatgaatgagaaagatgaggcacgtaaagattaagggtgaagcgcaagatatctcaacagaaccatggcaggttggctataggacctgcactgctattgaggatcctgtggcatgtccttgtcctgtctttccaaatggaaagcgatagcacccttagctacattgtgcactgataaaattatattaatagtaaaatgtgaaggtattaatttttaaatgtgagattattcaaccaaaaaattgggatatttttcaatcttcattcagcacttctaaaataactgcacaattctaaggattttgtgttctgttgtgttagagtctgaaagctgagcttttggcatctttgatcatagctaggataacatataccaggaaagctaaagcaaatgtaaagaaaattaaaacccaatacttatttttcttctcagttcaaaggttttatcagcaaatcagattattttagtgtgcaatcatgaagataaaaaagaaagagacttcctggatgataaacaccctaactgcaacaaacacatccctacatatatagtgttagatcgagcacattttttcttccttgtcttgttccagaaagccacaagactatccagagttatctctttctagaattatgaaatccaaggttacttatccactgtcttcttttatagccttccaagtacagaaggcaaacacaatataaccttctcctctcagttaatttgacataagacaactagtttttcacacatacacacatccagtctttcactcgtctttcttattttcttaactttcttgaggttaccttatgaacaaattatcacttcctgctttctttgtcttccattctttgttgtgagaattaaaaagttgatgcacatcatggcatacaaacacaaaaataatgctacaaatggttacagctataccaaggaaaagcaatgccctgtgtttcaaaacgaaataagacaataaccaaagctactaatatctaaaacccttgccatttcttagcagtcccttactagtccactctacttcctcatcctcttttaattaaaaccgtgcctttataagcagtagcactcaagagaaatcagctactatttttctaattcaagtttatatgttcttctgttttgtttcattactagttgcaagagaattatttttcttcagcacatgtgctgagtttcagctccattatgggctcaataagcttttatgtgttggccatgggacactcccctcccctcctaccactgccatttataacactttttatgggagaaaatgttgtgaattccacgcaatcaatgttta

SEQ ID NO: 687893 - DNA, 2053 bp, Homo sapiens
tacagcttcggctgctgagtggtgaaggagcttaaacctcctgggcccattagatctaacttgtttactgcattgatatctatatgttaaatgacaagagagttcaagttattgaataatttaaaattcagctctaattggtgtcatatgacctggaaaaggccatggatgatgccaggagcatgctgtgaatttcttataaataattcatgaattagatgattcatttgcttggatgtcttgctaaatgcagaagtttgtaagttgcaactgatgatataacacctgtaagtatttagttcatatgcttagaaggtaatctaccttgatgatcttctagcaaaatctgccagcagaggagagttaattgcatgggggaaaatgaacatttatttgggatgagactttggcaaaccacacagtgcagctgttgcatcacatattttctgtcaacttgacgactggtccatatatgcctagtgttaaaaatgcatcatgtcattctgtrccttcttttacattaactccagatgctctgggagatacaacgacctggcccacacagtagtttaggtttagaaatatttatttaggtcttgaaatactgacttctcaatagaataaagagcagagagggaaattttgaagttacaaaactgagatttattcattcttataaggctgtaagtgggaatatgaggattgttatagggtgcttatcaggataggaaattattatttatcattagagaatgaatagcaataagacctgttggtactattgagtaatcctgtggtgaacaactcataaatgcattggaagtaatcacatcctaaacatctaaagttaataacaacctgttataagaaattattactgcagtttagttcacctctttatgagactgaccaggcctataaaaatgatttacagaaacttatagaacatcactgtttacttgttgatgggatttcacaaagtaatactgcaattgttttttgacatgtgagaacgtgagaaaatcctggcttatcataagaatagtatgtgatttttggtatgtgttcatatatgtgcttatgtacatgtgtatgtgtgcatacatgtatacaagatcatatacatatttataaataggcattgttttctatgcagtctttaaaacattgtatttttaaaattatcttaaagatttagaaaatatttttctaactcagaaatttatttatcttcaatattagaaaatccttcattgtatccaaaccaagtctctcacaggttttttttttaatccttgttcttttgtcattagtttcttttatctagtcattagcctgtgcctacccaagttatgaaatattatgcttcaattctgtcgtaaaccaaagataccttcattttctcctcatctttgttttatgctgtggattccatagcacaccatgttagaagtcgcccttgatggaagttatttttagtagccaaaaattgtggtatctttagtataagacaaatccttttctcttttttttgaaatggagtctccctctgtcacccaggctggagtgcagtagtgtgatctcggctcactgcaacctctgcctcctgggttcaagcagttctcctgcttcagccttccaagtagctgggattgcaggagtgcaccaccatgcctggctaattttcagttaagatggggtttcactatgttggccaggctggtctcaaattccttaccttaagtgatccacccaccttggcctcccaaagtactgggattacaggcatgagccaccacgcccagcctatataagacaaatcctaatatgctaccactgtgaacttaacttttttatctgttgtaatctatagattttttcctgtctaaatacagtttgtttttgtagcctatgtatatccccctacatgcttttctgctaaatgtcatttgttcattcatgtagctcatttttattacatagaaaaaaatgtaaatatgtagtacatttcaagtcatattgttcacttttattactgggttttgagcatatt

SEQ ID NO: 687894 - DNA, 2053 bp, Homo sapiens
tacagcttcggctgctgagtggtgaaggagcttaaacctcctgggcccattagatctaacttgtttactgcattgatatctatatgttaaatgacaagagagttcaagttattgaataatttaaaattcagctctaattggtgtcatatgacctggaaaaggccatggatgatgccaggagcatgctgtgaatttcttataaataattcatgaattagatgattcatttgcttggatgtcttgctaaatgcagaagtttgtaagttgcaactgatgatataacacctgtaagtatttagttcatatgcttagaaggtaatctaccttgatgatcttctagcaaaatctgccagcagaggagagttaattgcatgggggaaaatgaacatttatttgggatgagactttggcaaaccacacagtgcagctgttgcatcacatattttctgtcaacttgacgactggtccatatatgcctagtgttaaaaatgcatcatgtcattctgtgccttcttttacattaactccagatgctctgggagatacaacgacctggcccacacagtagtttaggtttagaaatatttatttaggtcttgaaatactgacttctcaatagaataaagagcagagagggaaattttgaagttacaaaactgagatttattcattcttataaggctgtaagtgggaatatgaggattgttatagggtgcttatcaggataggaaattattatttatcattagagaatgaatagcaataagacctgttggtactattgagtaatcctgtggtgaacaactcataaatgcattggaagtaatcacatcctaaacatctaaagttaataacaacctgttataagaaattattactgcagtttagttcacctctttatgagactgaccaggcctataaaaatgatttacagaaacttatagaacatcactgtttacttgttgatgggatttcacaaagtaatactgcaattgttttttgacatgtgagaacgtgagaaaatcctggcttatcataagaatagtatgtgatttttggtatgtgttcatatatgtgcttatgtacatgtgtatgtgtgcatacatgtatacaagatcatatacatatttataaataggcattgttttctatgcagtctttaaaacattgtatttttaaaattatcttaaagatttagaaaatatttttctaactcagaaatttatttatcttcaatattagaaaatccttcattgtatccaaaccaagtctctcacaggttttttttttaatccttgttcttttgtcattagtttcttttatctagtcattagcctgtgcctacccaagttatgaaatattatgcttcaattctgtcgtaaaccaaagataccttcattttctcctcatctttgttttatgctgtggattccatagcacaccatgttagaagtcgcccttgatggaagttatttttagtagccaaaaattgtggtatctttagtataagacaaatccttttctcttttttttgaaatggagtctccctctgtcacccaggctggagtgcagtagtgtgatctcggctcactgcaacctctgcctcctgggttcaagcagttctcctgcttcagccttccaagtagctgggattgcaggagtgcaccaccatgcctggctaattttcagttaagatggggtttcactatgttggccaggctggtctcaaattccttaccttaagtgatccacccaccttggcctcccaaagtactgggattacaggcatgagccaccacgcccagcctatataagacaaatcctaatatgctaccactgtgaacttaacttttttatctgttgtaatctatagattttttcctgtctaaatacagtttgtttttgtagcctatgtatatccccctacatgcttttctgctaaatgtcatttgttcattcatrtagctcatttttattacatagaaaaaaatgtaaatatgtagtacatttcaagtcatattgttcacttttattactgggttttgagcatatt

SEQ ID NO: 687895 - DNA, 873 bp, Homo sapiens
aggaacagtgctcagaagcacaccacagaactagttggttaaagaaacagccttgggccaggtgcggtggctcactcctgtaatcccagcactttgggaggctgaggcaggcggatcatgaggtcaggagatcaagaccatcctggctaacagcgtgaaaccccatctctactaaaaacacaaaaaattagccgggagtggtggcaggcacctatagtcccagctacttgggaggttgaggcaggagaattgcttgagcccaggaggcrgagcttgcagtgagccgagatcacgtcactgcactccagcctgggcgacagactaagactccatctcaaagaaaaaaaaagaaagaaactgcctcaactgctaatgacccaatgagcgtgagcttctgcagttcatgtggctccccacatccaactttcttgcaatcctagcagacaccaacatcttggcaacttctgtaccagaaactagaccttacaaggactatcattctcaaaagctggatgtctcttctgccatccttaccagcacaataggttttgcctttgtcaagctgttccccttgaattaaattcacacacagatgagtctgactggtgggacacatgtctgttcccttgctccagagaaacctggggaatctcactctctaccttggctagacaaaactcataatgctggatatctttcaaatgtaaccaatgtgttcaacaaacgctagacagccgaaaacatgacagatgtctacagcactagatgaagaacgacaagagcaatccaagaaaacaaaatagcatatctgaaagctcagctatgggaaggggtcacaacacatttaaggaacttaaaaaagacagttcagca

SEQ ID NO: 687896 - DNA, 657 bp, Homo sapiens
ccaaaagctcctatttcaaagtagaggccattgttgttaaaggtctgcctggtcctctggaatctcatcatccaggtttcctctctcccactggtgacctctcactgckcactcatactcttcccccttacccacgccacttgagccacaggggctcccttgctgtccctgggccatgtcaagccagatcccaactcagagactttcttctggtgcttccctctttctggaagcttttcctcagatgtttgtaccctcagcttcttgaagtctatcttcaaaaggcccctactaggtgagacgtgtataaccagcccctagcctccaatcctccactctctgctcttagcatctcctgcctcttgtccttgctcttcctcattaatccccggagtaaatgctattattgcctctattttacagatgaagaaactgagggacagaaagattattaataattaccttgcccttgcttactagccccaaagtggggagaccaggagttgaacccaggcagtcttactctaagttcatgttcttaactactccattaggctatgtctctggctgttttcggggagagaaggaaatgccactttctgagtaaacaatgcatcaggcaggacccatgcagtgtagttttgtacactatttctc

SEQ ID NO: 687897 - DNA, 686 bp, Homo sapiens
gatttaatttgtaggaaatttccagaataggcaaatctataaggaagtagatacctggttgcttagggctgaggggagtgagagtttgaggactgacagctaagtggggaagggtttctttttggtgtgataaaaatgttttaggatgggtgcagtgcttcacacttgaaatcccagcactttaggaggccaaggcgaggggatcacttgagcccaagagtttgagaacagcctgggcaacatgrcaacaacctctacaaaaaatacaaaaaaaaagctgggtgtggtgccatgtgcctgtagttccagctactcaggaggctgaggtgggaggatagcttaaacctgggaggtagaggctgcagtgagttgtaatgccaccactgcactccagcctgggcaacagagccagaccctgtctccaaaaggaaaaaaaaaaaaaacaaactttaaatcacaatttgtgctgtcaaacaagtaaggaaatataagtataggctacaatatcaaaaacattttatgatttttgataatagtacagaaaaacagataatagtcttgcaaaaatatctaattggtttatagatctaactgacatactatgtaatacaaggacaattgaacatgttaaacaatgtcatagtatacagtatgcaaatctaaacttcaaaattctacaaaataaa

SEQ ID NO: 687898 - DNA, 2523 bp, Homo sapiens
ataagataataaacataaaattaatacaaatgattacctctggggaacaaactggagtggatgaaaacaggagtgagtgcaaaagttttagtgcatacctttttgtattgttttgattttatttaaccgtgaaactgtattacctattcaaataaaataaaatttatataaaatgttctagtggaaacatttctctagatgcacatatttattagattattagagtttgcctagcaccaattcacaaaagacaccatttcttaccattgcaactagcataacacaattacaatacattccaattgaaatcccatcttgcattacatttgcataaagcaatcgctctttccctatggagaaaaaacagcaaatcacattcttaatattacagtaaagtgttaaatttatcatttttattatataaatgtttttaaccactttttgaagttgaaaagggattgtatacaaaggtctccatgtttgaaaaatatattttagagaaacaagatctacaaatgactttttaaaccaaaaaaaaaaaaacagctccataccatatttttgctatttctagaacatggactttttattctgtggcttgtgttctcttaytaacagatcaaaatcttttaaatagatgaccaacctggagaaatagaattcttgtttttaaagcagtttaattcataatttttagttttatgtaaaaaaagtcctcacatttttcacggttacaaaagtacacagaagttagggaaatgttttcaagcagaagtactttatagctttatcaatggaagcttcatattcaaaacatatatttttaattctttgcctgggaagtgttccaagtagtcagtcattatcgagaccctgaaatcacaaaatactaattttattcagtattcaaaaatatctgtgttgttttgctgaatgtttgtgtccaggaaatttgctatgattcagtattccactgtggtcattcctagaagaatgtcaggctgtacttttgccaccaagccatgggttggtttatgtcagtcctgtgaagctcaaggggcctctttgtgaccacgctgatggatatgcagcatcttgctcagcactgtgccagctctgtttctgtctggaggacttcacccaccactgctccaagatgatatatttgtagtgagaccataaaggggccactcaccaccatcagtaagtacataaacacaactgcagcactaactttttttccagtgcagttgctgagcttagagtactggtaactaacccattttctggagtattgtgtaaagatgagtaagagtgcaggtgtgccatggctcacgcctttaatcccagcactttgggatgccgaggcaggtggatcacctgaggtggggagttcgaggccagcctgaccaacatggagaaaccctgtctctactaaaaaaaataataataataattagccgggcgtagtggtgcatgcctgtaaccccagctactcaggaggctgaggcaagagaattgcttgaacctaggagagggaggttgcagtgaaccaggattgcaccattgcactccagcctgggcaacaagagcgaaaatccatctcaacaaacaaaagtgcaagtgagcaagagcgcacagacaccgggaactgagggacacggcaaggggccaaaagaaagggtctttttggcagacacagctaattgccatgacggttaataatctgatgggaatatttattaaaacctagaatttttcagtccatgctccaagtcctaaggccactgggcctgcatctcctaaggattgtttatggcttctttgtgagcttcactcatgcaaatggataccacaatacaatccccttcctgcttgcataggggtcagcaaaatgttttctgtaaaggaccagatggtaaatattttaggctctgttggccagatcatctctgttgcaaatactcaactctgccatagacaacacaaaaacagtagaaatggctgtgtactaataaaattttatgtactaatgaaaccatcattgcaattggctgttatttgaatttcacgtaattttcacattcatgaaacagtcattttttgacaaccatttaaaagtgggaaaatcattctttgcttacaggccatacaaatacagctggcaggccaggtttgacctgctggcgttgtttgccaactgctattctaggtgttggacaaaaacagctggaaggtaagctaaaacccccctgggccatccccttacaattttatttaaactgagctttctggctacagaactacatgtcattatgatcattaataaggttttgggacccttcaagtcttcattgaaaagtccacttaattctagcttaatgtcataattgttgctctctaccttgcaaaagctttcaagcttatgggttctacggtcggatttaatgtttaagctattatataaaaaatggtaaaacttgtcccgtagcatttgagatttaatctgagtctgtgttgagg

SEQ ID NO: 687899 - DNA, 2523 bp, Homo sapiens
ataagataataaacataaaattaatacaaatgattacctctggggaacaaactggagtggatgaaaacaggagtgagtgcaaaagttttagtgcatacctttttgtattgttttgattttatttaaccgtgaaactgtattacctattcaaataaaataaaatttatataaaatgttctagtggaaacatttctctagatgcacatatttattagattattagagtttgcctagcaccaattcacaaaagacaccatttcttaccattgcaactagcataacacaattacaatacattccaattgaaatcccatcttgcattacatttgcataaagcaatcgctctttccctatggagaaaaaacagcaaatcacattcttaatattacagtaaagtgttaaatttatcatttttattatataaatgtttttaaccactttttgaagttgaaaagggattgtatacaaaggtctccatgtttgaaaaatatattttagagaaacaagatctacaaatgactttttaaaccaaaaaaaaaaaaacagctccataccatatttttgctatttctagaacatggactttttattctgtggcttgtgttctcttattaacagatcaaaatcttttaaatagatgaccaacctggagaaatagaattcttgtttttaaagcagtttaattcataatttttagttttatgtaaaaaaagtcctcacatttttcacggttacaaaagtacacagaagttagggaaatgttttcaagcagaagtactttatagctttatcaatgraagcttcatattcaaaacatatatttttaattctttgcctgggaagtgttccaagtagtcagtcattatcgagaccctgaaatcacaaaatactaattttattcagtattcaaaaatatctgtgttgttttgctgaatgtttgtgtccaggaaatttgctatgattcagtattccactgtggtcattcctagaagaatgtcaggctgtacttttgccaccaagccatgggttggtttatgtcagtcctgtgaagctcaaggggcctctttgtgaccacgctgatggatatgcagcatcttgctcagcactgtgccagctctgtttctgtctggaggacttcacccaccactgctccaagatgatatatttgtagtgagaccataaaggggccactcaccaccatcagtaagtacataaacacaactgcagcactaactttttttccagtgcagttgctgagcttagagtactggtaactaacccattttctggagtattgtgtaaagatgagtaagagtgcaggtgtgccatggctcacgcctttaatcccagcactttgggatgccgaggcaggtggatcacctgaggtggggagttcgaggccagcctgaccaacatggagaaaccctgtctctactaaaaaaaataataataataattagccgggcgtagtggtgcatgcctgtaaccccagctactcaggaggctgaggcaagagaattgcttgaacctaggagagggaggttgcagtgaaccaggattgcaccattgcactccagcctgggcaacaagagcgaaaatccatctcaacaaacaaaagtgcaagtgagcaagagcgcacagacaccgggaactgagggacacggcaaggggccaaaagaaagggtctttttggcagacacagctaattgccatgacggttaataatctgatgggaatatttattaaaacctagaatttttcagtccatgctccaagtcctaaggccactgggcctgcatctcctaaggattgtttatggcttctttgtgagcttcactcatgcaaatggataccacaatacaatccccttcctgcttgcataggggtcagcaaaatgttttctgtaaaggaccagatggtaaatattttaggctctgttggccagatcatctctgttgcaaatactcaactctgccatagacaacacaaaaacagtagaaatggctgtgtactaataaaattttatgtactaatgaaaccatcattgcaattggctgttatttgaatttcacgtaattttcacattcatgaaacagtcattttttgacaaccatttaaaagtgggaaaatcattctttgcttacaggccatacaaatacagctggcaggccaggtttgacctgctggcgttgtttgccaactgctattctaggtgttggacaaaaacagctggaaggtaagctaaaacccccctgggccatccccttacaattttatttaaactgagctttctggctacagaactacatgtcattatgatcattaataaggttttgggacccttcaagtcttcattgaaaagtccacttaattctagcttaatgtcataattgttgctctctaccttgcaaaagctttcaagcttatgggttctacggtcggatttaatgtttaagctattatataaaaaatggtaaaacttgtcccgtagcatttgagatttaatctgagtctgtgttgagg

SEQ ID NO: 687900 - DNA, 529 bp, Homo sapiens
ttcccagtcgcctccttgcccagcctgctaactgctagaaaccaacaagggcataccagggtctgacttgggaagagttgccaatccatccaggagggcccagtgaaagcaaacattccgaaggtaggtagccatgatggagggcagcccccagaacatgagcagacctcccctgcaggaatcctctccctgtggggagggagcaacgaatcaaatctcagctccctgggggatatctgacacccccacctgtgggattgtgccatccccagcctcagataacacatgaacacacacaaagagagccccaacyccaagctttcagagaagtgacattttagcattcttgaaagatgaagcagatgttgctcagggaaagaaggcaaggaaggatgatctaggcaaagggacaggtctatacaaaggacagtggcttgagaacgtgtaatgcatttaactgaccttctggagggcagttgagttagagaggatgcagggggtacccagacagagtgatgagaagagactg

SEQ ID NO: 687901 - DNA, 625 bp, Homo sapiens
tgtaagccagcaaggcccacagcctttgggacgtgaacggcttccttcagaaatggagagtcaagaaacttgattttatccacatcycccactcccagcagcagaggagccagaaaacagccccagaagctcaaggtgatgcctcagccccccccgcaaaccccccccttaatgtcccctgtccccagggccaggaggagagtgcggctgcagcggcccccctccagagctaatcggcctggccggagcaaatggcattaattgtggagatggattagctgtcacagctgggcctcccaccgagaatccaagggccgagccactcagtgtggggggaataggcagccgcctgggaagcgggtggttggacagggtgggggtaagcgcgcaccgcagccaccgggcacccgggaagcgggcggcgtttggggggaggtaggcgcgcaccgcagccacccggcacctgggaagcgggccggtgagggggggcctcatggatggggacttttctggcaaggaaaaaccacacaaactgggcgtgggagctcatgtaatcccagcactttgggagcccaaggtgggtggatcccttgagcctggggagtttgaggctgcggtgagctgt

SEQ ID NO: 687902 - DNA, 625 bp, Homo sapiens
tgtaagccagcaaggcccacagcctttgggacgtgaacggcttccttcagaaatggagagtcaagaaacttgattttatccacatctcccactcccagcagcagaggagccagaaaacagccccagaagctcaaggtgatgcctcagccccccccgcaamccccccccttaatgtcccctgtccccagggccaggaggagagtgcggctgcagcggcccccctccagagctaatcggcctggccggagcaaatggcattaattgtggagatggattagctgtcacagctgggcctcccaccgagaatccaagggccgagccactcagtgtggggggaataggcagccgcctgggaagcgggtggttggacagggtgggggtaagcgcgcaccgcagccaccgggcacccgggaagcgggcggcgtttggggggaggtaggcgcgcaccgcagccacccggcacctgggaagcgggccggtgagggggggcctcatggatggggacttttctggcaaggaaaaaccacacaaactgggcgtgggagctcatgtaatcccagcactttgggagcccaaggtgggtggatcccttgagcctggggagtttgaggctgcggtgagctgt

SEQ ID NO: 687903 - DNA, 613 bp, Homo sapiens
ttacaaagttattatatatattttacctatgaatctggattttattacaatataatttgtgtgtgtgtgtgtgtgtacatccacccttggagttatcatttctgcttcccttcatttttttgtgcaagtccataccacttttcttctcactgaaagatgacctttacaatctcttgtagtgcctttctcctgatgataaatttattcagggtytgtatacctgaaaaacagcttatgttgtcataattattgaaagacgttcactgggtagaattctaagctgacagtttatttcgtttgtttttaacccttttaaccttcagtgctgtaaggataatgctccctgccttctcacatgcaatgttcccaatgagaaatcagttgccttccttgtctttgtttctctgtttataatgtgtccttgttctctggttaccttagtgattgtttttatcattggtttcaacaactggatcattcattatgtgtcttctagtgattttcttcacatttcttgtgcttgaagctcatcgagcttcttggatctgtgagtttatagttcttatgaggtttgggaaaattttggccattatttcttcaattacccacactc

SEQ ID NO: 687904 - DNA, 613 bp, Homo sapiens
ttacaaagttattatatatattttacctatgaatctggattttattacaatataatttgtgtgtgtgtgtgtgtgtacatccacccttggagttatcatttctgcttcccttcatttttttgtgcaagtccataccacttttcttctcactgaaagatgacctttacaatctcttgtagtgcctttctcctgatgataaatttattcagggtttgtatacctgaaaaacagcttatgttgtcataattattgaaagacgttcactgggtagaattctaagctgacagttkatttcgtttgtttttaacccttttaaccttcagtgctgtaaggataatgctccctgccttctcacatgcaatgttcccaatgagaaatcagttgccttccttgtctttgtttctctgtttataatgtgtccttgttctctggttaccttagtgattgtttttatcattggtttcaacaactggatcattcattatgtgtcttctagtgattttcttcacatttcttgtgcttgaagctcatcgagcttcttggatctgtgagtttatagttcttatgaggtttgggaaaattttggccattatttcttcaattacccacactc

SEQ ID NO: 687905 - DNA, 613 bp, Homo sapiens
ttacaaagttattatatatattttacctatgaatctggattttattacaatataatttgtgtgtgtgtgtgtgtgtacatccacccttggagttatcatttctgcttcccttcatttttttgtgcaagtccataccacttttcttctcactgaaagatgacctttacaatctcttgtagtgcctttctcctgatgataaatttattcagggtttgtatacctgaaaaacagcttatgttgtcataattattgaaagacgttcactgggtagaattctaagctgacagtttatttcgtttgtttttaacccttttaaccttcagygctgtaaggataatgctccctgccttctcacatgcaatgttcccaatgagaaatcagttgccttccttgtctttgtttctctgtttataatgtgtccttgttctctggttaccttagtgattgtttttatcattggtttcaacaactggatcattcattatgtgtcttctagtgattttcttcacatttcttgtgcttgaagctcatcgagcttcttggatctgtgagtttatagttcttatgaggtttgggaaaattttggccattatttcttcaattacccacactc

SEQ ID NO: 687906 - DNA, 613 bp, Homo sapiens
ttacaaagttattatatatattttacctatgaatctggattttattacaatataatttgtgtgtgtgtgtgtgtgtacatccacccttggagttatcatttctgcttcccttcatttttttgtgcaagtccataccacttttcttctcactgaaagatgacctttacaatctcttgtagtgcctttctcctgatgataaatttattcagggtttgtatacctgaaaaacagcttatgttgtcataattattgaaagacgttcactgggtagaattctaagctgacagtttatttcgtttgtttttaacccttttaaccttcagtgctgtaaggataatgytccctgccttctcacatgcaatgttcccaatgagaaatcagttgccttccttgtctttgtttctctgtttataatgtgtccttgttctctggttaccttagtgattgtttttatcattggtttcaacaactggatcattcattatgtgtcttctagtgattttcttcacatttcttgtgcttgaagctcatcgagcttcttggatctgtgagtttatagttcttatgaggtttgggaaaattttggccattatttcttcaattacccacactc

SEQ ID NO: 687907 - DNA, 613 bp, Homo sapiens
ttacaaagttattatatatattttacctatgaatctggattttattacaatataatttgtgtgtgtgtgtgtgtgtacatccacccttggagttatcatttctgcttcccttcatttttttgtgcaagtccataccacttttcttctcactgaaagatgacctttacaatctcttgtagtgcctttctcctgatgataaatttattcagggtttgtatacctgaaaaacagcttatgttgtcataattattgaaagacgttcactgggtagaattctaagctgacagtttatttcgtttgtttttaacccttttaaccttcagtgctgtaaggataatgctccctgccttctcacatgcaatgttcccaatgagaaatcagttgccttcyttgtctttgtttctctgtttataatgtgtccttgttctctggttaccttagtgattgtttttatcattggtttcaacaactggatcattcattatgtgtcttctagtgattttcttcacatttcttgtgcttgaagctcatcgagcttcttggatctgtgagtttatagttcttatgaggtttgggaaaattttggccattatttcttcaattacccacactc

SEQ ID NO: 687908 - DNA, 652 bp, Homo sapiens
tcttctatcaaattattcaatgttgggattttatgaagaaaaataaaatggtagtatgttttaaactaatacataaaattgagaaggttatttttgttgtttatgtttttcaagtaattcacttaaactaaaatattcacttaagctatatttgtttttgtaaaacaatgaaagtgtttattaactctaacatattgttttctattactggtatttcaccaatacatagattaaatattagttgttcaatataatatttgcagtgatcaaattgcactgaatgtttactttggtaatttcatttatgttttcttttttcactttatccaccattaattaatatctcctttcaattcttcatcctgataatcatatgctacattatttttaacctttattacatgttcagcctattgaaataagtatttgaagtggaaagataacacagtaggaaagtcagcctgaaaagaaactgctttcaaagatccagatccagyagggaaagaatcttctaaaaggttttgttcacagccacccttggtacaagtaccggaggttctagaaacagaatccacaaaatttcaagcattttccactgaaacatgatgtgggctgatgtgatcataagcagaaagggtgcatgcatcttctt

SEQ ID NO: 687909 - DNA, 1921 bp, Homo sapiens
ttttctttatctttctgcatacttttctagaatacttcatttcaatggtgcttcaaattctcctacctacctattgtggattcaaagcaatggaaaaaacaaaaagtcacagaagttaaaaatattgcagaaaacaaaacagttgggtggatttaatttttctttataagtgaaactacggatatgggtatatgtacctgtgtatgtctgttgctaaatgaattaataaaatgaatacatttaatttgagagtaccaataattcagttcacatctttttgccctaccacactggaagcaaaaaccttggtggaaacattgatgtgctttacctcgaattcatcattagccctaaatatacctttatttgttcaccctctttctgatgccattttgcttgttaagcagtgacagacatcaacacattagtgaagaaagttagaggtcatgatgccttgaagttttgtgaatgcttgtccttctttacaacctttaaatgaaccctatatagatatattttatgtgtctaagtacatatttccatagcacacaggttttttatctgttgttttttgttgtccattcaagcattacgactacattttgagataatttagaaatcattagctgtacagtgaggtgataaggagagcaagtttaggacagtgtgtctttactgtcatcttcagaaccttccatttctttgcacacttgcacctttgtttaataacagtaattttgtaaacacatgcaaatatgagcaaaagaaaagaacatggtctccttagatggttttaaagatccgaagtttccagagctaaaactcttccccataagcaagccaatcaagggagaaatgggaatacatgatgcacgaaacatatctaagtctgattctatattccacttacatcttctgatgccttctcatgattttaagttttatctctgcctgtaatgttattgttgatgtccctcagctgtctttcatttgtataaaaatgttgcaaggagagacatggctgcaaactttctaagggttgtcacggctactcctgacaaacaaacaaaaaaattcaatcctttcttctacaccgcttaaaccactcaacctttctcacccttttcctatatattccaacttgatttggctccttttgcagggaaaacttataggaaactaattgattcagcacagcttgtccaactcagaaatgaatagaggggaaaaattatttatttatttwtttgaccagattgtgaacagaagactgtgtttcacactctgtctcccatggggcaatgtgatgaactaatcatgtagtgatctaccaggtcacagcaaataattaagatacttgttacagtgttccgtgtggtgccaccctgtagtgattctgaatgcattttccataaattccagaaacggtcctttaaaaccctaatttaaaatctacatcttagctaattaagaccactgtggctcaaactaatgtgtcctttcatatctagtgtattgataatgtgccatcctgagtgtaggtgtaaatttttcctcctgtccttagctcttccaaattctaaggtatttgctaaaaaaggaacacagacataaattttacagctttagtgatcagcatgttaaaaaaaaaatgcctaagacagtttgcatacactgggtaccaattatctgatattttcttattttcatgttataaaacaagttttaaaagccactggaaaaaatattgttgttcaaaaagaaggctcccctgcagtgtagggctgattaacattagatgaattagacaaagatgctaaggtatccttttcagaatttttttttaatggaggtaaagtcacatatctgtcaagcacagtttacaagacagaaacaatgcattaccccacaatattttcca

SEQ ID NO: 687910 - DNA, 692 bp, Homo sapiens
tagaacctcatatctgtcataaaataaatgggaaaggcaatatgacagttatctatccctgatttgaaaagtgaaataaagcaaactcaaagtatactgaaacctaatttacagtgaatgaccatgtaaactcccgtagaaatattatataagaaaattttatctaccattgagtagctgtgatgatgagtatgttcacaatttattggacatgaattacayaatggaacactctgcctgtattaattattaagaactgttgtcacaaagaaacctcaaatgctagtggtttaatgaatacaagtgattttttttccttattaacataacatttcaaagcagctgtcttgcttgataggtggaattccttcttgcagtaatttggagacttggtctccttccatcttgtgtctttaccatcccttagggtcttctggttctttgtatcccactggctgaagggaaaaatcggttgtagagagcacatctactttctaaattgttagctgagaatgagatatatgacttatgctcacgttccattagtaagaacaagacttaggaccacatttacatccaagggagttagactatgaaatcctagtcagagcagccacttcctatattcccacagtaatatagaaaaggaagcatatatctggaattttacattgatattaacactgacatga

SEQ ID NO: 687911 - DNA, 2106 bp, Homo sapiens
atcgtgtcatgttgccttgagaagctactccgaaatgccaaaagaaaattagaagacgggcagagcatttgtcctatgcaattgcaggatggggtggggcaaggagggggttgagatgctccattttggcactccaatagccctgaactgggggtgtggctctgaatatttacagggaaatacaagcagataaatgctgctgactgatcagccaggrgagtccgtggtaaatagagaccattcccctccagtcataactgctgaactgcttaatgtttcagactaatcataggtctacttgcaagcatggaagggataggatctggttcaataggatggtaccactggaggttcacatatttcagagcggcccttccctgaagctcaagaactgaaatttcctccaggctaattgcagtgttgagacttctgcttcccccatggggaataaagaaggtgtaaaccaaaaagtgtctgagactcaatccatttagaagtttattttgccaaggttaaggacacatgcccgggagacagggagacaagtctgtgcctttctacaaagatgattttgagggcttcaatatttaaaggggaaagggcagacactggggaaagagggagaaatgtttaaaaggtgtggggaggtaagaggcaagaggtcgcattcttctgagtttttgatcagccgttcacatgtgagagaggggtagaggaatagtcacttgtgcattcatctagctcagcgaatctgcattcttacaaaataaaacagacatgggcagaggaagcaattagaaatgcatttgtctcaggtgagcagagggatgactttgagttctatcctttgtcctgaacccatgaagataagttatccatttacattgtcacggtgaaattcaacagaactgttttagggtaaagaccttgcggcccacagtgaatttcctagtgggcaaaatgtgaggtgtgttgcttttttatctttgtagccgtcttatttaggaatagaatgggaggcagctcccagcttgacttttctctttggcttagtgatttgggggtctcgagatttattttcctttcacaaaggaggttagggtgtagattggcagggtttatgtgttttaaaatatttctacttcttgtattttctgctattaagtcacagcatcagaccaagagtctggttaagatggaccataaatgccaatactagagaaaaggcatcagggtgtccctaaagtgggtcctctaaggaaggaccttggaagtgtagtggttctttgggatggagttcatataagaagattctggtggggcatgttggctcacacctataatcccagcactttgggaggctgagacgggtggatcaccggaggtcaggagttcgagaccagcctgaccaacatggtgaaaccccatctctactaaaaatgcaaaattagccgggcttggtggcacatgcctgtaatcctagctactcgggaggctgaggcaggggaatcgcttgaacctgggaggcggaggttgcggtgagccaagatcacgccattgcactccagcctgggcaacaagagcgaaactccattaaaaaaaaaaaaaaaaaaaaagattctttctatcttaatctcctcaacagggagctcctttatgcttggattagtcttcacttcctctgagcacaataagaaaagtacagacaaaccacaagctcaaaggtcagctgtaaaaggaaataggggcttaggacctcaggggttttaatcatatagaattcagctctgtttctcaaagtgatgccaggccgagatggtgtgggcagtgtggcagactaagtcctttgaggggaagatggtgaagtaggagctctgaagaaatccttaatagaggaccacttaaaagaagaaataatttgatatataattttttttaagttagaaggagccacttaaagttcgaaatgggaaaattaagctgtattcaataacatatgttgaactgtatttataaacacatgagatggaaaaggatgaatgaaaagagaaaagaaatagagttaaaatctcaatatgtcatagtctcaaggacaaagaaccagca

SEQ ID NO: 687912 - DNA, 652 bp, Homo sapiens
tggaattcagctggtatatgggcatagtccctgagagaaaataatctgccaccataaaagagaccttgcctatgagatggtgtcacttgtggtaagcagtatattatgtggcatgctgagttattttgatagcaaaaggcctgaatgaaaagcagtgagatctcagttgttgttcttgtcctacaatacaccactggtaaagatgcttaatttagtacatgtgttctcatcacttcaaataatttttttgtcatgaaagtattcgagtataaatagcaagctaattttacagagaaaagaaatatcaatcgattccgaacagatcaaaactataatgtggaaatgaaataatcatacttaagtatttctaaaagtttcagctgcaacattatgctaaacctacactaggatttacattcaacaaaatatgaatttcctcaagtttacatgctcaaatagaaggtaatactcacaggttgccaaatatttgtatgcaatgcaagaacacrccaaaattttgcaacctatcttttgcctgtgataccctacattcaaatacctttatatatgtatgcataaacccaaatacctgtaaatgtagaaatattaaaatgagtggtgttctctacccaagtagaaaatatctaatgat

SEQ ID NO: 687913 - DNA, 613 bp, Homo sapiens
ttttttctttgttagttctataacattagtcccaaattacatatgatattttaaaaaaaacactgattagtgtgaagtaaatagataaaccctgacagtgtcagatgtcgctatcatgaaaagtacttgtatgcaagatgaagctgttaggcctttacaagcatcagtatgatcctgaaactttatatacagggcaattttacttattatttcttcaattccaaattatttttaaagcatctagttttatgcctgaaagttagtatcattttattaatagtagctattgttttcatattttatgatgattgtggattcccatgggttttatgtataatacatatatacaggcattgtgatggcttatacatgtacatatacatcattgtgtatagaacactcacttccaaaaatatatctctgaaactattacatattacatatcaccttacatacataattctctcaaaaaggcccttcacacttctataaacaaatgacctctgtgttcttaaatgtaccataaaaccttgtaaaaacttatgctaagtggaagaagccagatgcaaaaggtcacgtatagtgtgattcwatttatttaaaatatccagag

SEQ ID NO: 687914 - DNA, 623 bp, Homo sapiens
tcacgctttctgctccctaattccagagcatagacttgttaccatggtagtgctttcacatctatctttggctttgggtgsaggcaatccagatgtgtttccagatgctgcacttggttaaagccgggatctgtatttccccctcggtgttgtcgtagccaggcttccccactcgggggcagcacctcacaagcgattggggccttaagagccaaaggagtttgggaaacagcttcatcccaaggacacggaaaggggcagaggcactctaatgaaaatcagtcacggatcttttattgtccatataaagcaaagacagattttaaagcatattctggaggagtacaggaaataacactttttttggagcaaagaaaccagcttgggtgcgtgcttcgaggctcaatctattttctcccagctgcagagccctcctccccatcgcagaccctgcaactacttggttttgaaaagcagagcgcttttggagctggcttgcaaagcaggtgtcagccctcctgtttcatggagagcctgcttgttcatatttgaaacgttcagggaggccagttcccactcttattctgtctctggatatttttggagggtggcctgggccatga

SEQ ID NO: 687915 - DNA, 605 bp, Homo sapiens
gggggccccgctttgaacacagaagagatgaaagagcagatctcccagactactagaggagttggtacacatacggcacagacataaaaatatttttcacagccatccataaatgtatgcaagcgcttgagacctggggatgtatttcattccatgctaacctcataaatgaacacctggtttattaagggcaaacttattaatttggtattattaagaatgcctcccattttatgtaagggtgaataatttgaaaaggaccatcacgttattgttctgttcctcatgacaagtcatgcaggcccactttaaaggtaaaaaagatgagggacttaaaactaggatatttcctccatacttatgaagcagggttactgaagtatygcttttctttgaccccacttttttccctcaattttttttaaaaaagctttattgtgatataatttacataccataagtttcaagtgtggaattcatttttagtacatttacagagtcatggaagctcttaccatatcaccataatcctagaactcttttcgccaccctgttgtactcattagcaatgactccccatttccctcccccaggctgtagacaca

SEQ ID NO: 687916 - DNA, 611 bp, Homo sapiens
agagtggtttaaaataatttttatttttactgagccaaattttcttctatgaaaagtacctctgagcgctgtgggggaagattaaaaaaggctgaatgccggtatttgttttgcatgctcgagaactctatattcttctttgtgccctgaagtttagcgtaggaacacasacaatctgatttgaccttaagtgcctccccaatctgctcaggggactccctttatgaatataagctgacaccaccttgcctgagcttctttcaatcaataacatggcagagtacacatgatatgaataggcggaccgctaagaaagaaaagcatatctcttgatacaaatggagcgataaaaggactggtttctatccaaggactttgaaggagaaatcaaggagagaaagatggccaaatgagaatgtgtagtcaattaatttttcttctgaaggattttttttattacttgtgttccgaagagaatggtcaagttgttctatgccagaaaggaatttgttactctgattcttggaacaacaagcctcttgggagcatgcattttgtgactgtaaatctacagtggcaaaattgtgttaatttgactgactagaaatatt

SEQ ID NO: 687917 - DNA, 1483 bp, Homo sapiens
tcctggattgaactgacactcaggtcagaggacaccagattagagagtgaatctggactgctctagcctttcccctggaggctctctctgtgatacacagacctggctgcactgtccatttctcatagccaccacacggggggtataatcattctcttcccacctctctctgccaactcatctcatttctctgtcctggtagaaattggctggcgggcagaatttctccctacagaccattctctgtcggagtttgagtttgacgtcatcattggtgccgatggccgcaggaacaccctggaaggtgaagactcttcttcttggtgtgggaatggggkgatgggaatgggagagggtacattggggaagagttggagaaagtgggcaagatgcagatgccagagctggatggaggttttgataggagggcagaccatcctgtccctcttgaggtagaacagcccatccacctgtggggtgggcagttcaggggacagccatctcattccgtctgaacctcagttttctcagctgtaagatgtggatcacagaaccctttcaaagtgttgttatgcgggctgggaaaggactggtatgtgaaaatgctttataaagataaagtgtcatgggggaaaaatgaacatccattattgagcacctcctggtgtgtgagccatggtgccgagcactttcatacttacttcagctaagataaacatttttataatactattaatggtattcgcttactttcaagtgtaatattatttatacttgaaggaggaactcacctctttttgtaacttttaagcactgctgggcaggcaggtatgtcttgccaaactgtcaaggtacaaaggccacacttctctgagttctaaagctgaagcatagtatctttcgtggggtaagatcctgtcagtttgtgagagaaaccccattgccagaaaatgcttccgtcccctccacctcaacaccaagactgatccatccacaggctgtactcattgatattaaccatgctaaattgagaccatgggttataaacaacatggccccaaatagggcagttctgctttttgagcctgccccctcaagagccacaggctgcagatgcctgactgagaggatacgtcactctgaggatgggacatgctccctggaacagggctaatcttagaaaactcaggatctgtgggccgcctggctcaggaccttcccatctgccacataactggggctgtttgccactcccttttccctttccatacccacctcgccaaccataggtcatcaatatctgacagggaatgtttaagctgccaacttggatgtagtactgttggaattttacacttggtaaaagtgtaagttagaatatttgagaatccaggacccattttcagcttgagtatagttgggcatttcttgaacatggaaagaagggtggagagtgatggagccatttgagccactcaaggcc

SEQ ID NO: 687918 - DNA, 1483 bp, Homo sapiens
tcctggattgaactgacactcaggtcagaggacaccagattagagagtgaatctggactgctctagcctttcccctggaggctctctctgtgatacacagacctggctgcactgtccatttctcatagccaccacacggggggtataatcattctcttcccacctctctctgccaactcatctcatttctctgtcctggtagaaattggctggcgggcagaatttctccctacagaccattctctgtcggagtttgagtttgacgtcatcattggtgccgatggccgcaggaacaccctggaaggtgaagactcttcttcttggtgtgggaatggggggatgggaatgggagagggtacattggggaagagttggagaaagtgggcaagatgcagatgccagagctggatggaggttttgataggagggcagaccatcctgtccctcttgaggtagaacagcccatccacctgtggggtgggcagttcaggggacagccatctcattccgtctgaacctcagttttctcagctgtaagatgtggatcacagaaccctttcaaagtgttgttatgcgggctgggaaaggactggtatgtgaaaatgctttataaagataaagtgtcatgggggaaaaatgaacatccattattgagcacctcctggtgtgtgagccatggtgccgagcactttcatacttacttcagctaagataaacatttttataatactattaatggtattcgcttactttcaagtgtaatattatttatacttgaaggaggaactcacctctttttgtaacttttaagcactgctgggcaggcaggtatgtcttgccaaactgtcaaggtacaaaggccacacttctctgagttctaaagctgaagcatagtatctttcgtggggtaagatcctgtcagtttgtgagagaaaccccattgccagaaaatgcttccgtcccctccacctcaacaccaagactgatccatccacaggctgtactcattgatattaaccatgctaaattgagaccatgggttataaacaacatggccccaratagggcagttctgctttttgagcctgccccctcaagagccacaggctgcagatgcctgactgagaggatacgtcactctgaggatgggacatgctccctggaacagggctaatcttagaaaactcaggatctgtgggccgcctggctcaggaccttcccatctgccacataactggggctgtttgccactcccttttccctttccatacccacctcgccaaccataggtcatcaatatctgacagggaatgtttaagctgccaacttggatgtagtactgttggaattttacacttggtaaaagtgtaagttagaatatttgagaatccaggacccattttcagcttgagtatagttgggcatttcttgaacatggaaagaagggtggagagtgatggagccatttgagccactcaaggcc

SEQ ID NO: 687919 - DNA, 661 bp, Homo sapiens
gaagaatttggagtttttttccttgcttgtttaaaaatagatgtattagtcgtatttaagaaactttctttaccattatacttaataactgaaacaaggataacaatgtgatagtttagtgaatttcaacttgtttaagctttgttatattgacaaaataaccctggagaaaatgtaattatatagtaaaagatgactgtgatatcctgctgtgtatcaggaagaacaatttttactacttgtacatgctctgaaagtatgtctaaattttcctctttatggaaagcatgatgaaaatctcagtctccttactattggaaatctgtatcttctcttgctactaaccatctgctcacctacctgaagtatctgtagattctgataaataaaaatttccctaaatatatcataaccaattacagtttacagctattagtcaggcagacttgtttaaatagtggggggtttttaaagcttcaaaaatacaaccagggatgcaattttgaaatttagcatttaccacagaagttgcctccattgtttatgctaaaagtagatttaaaatgtctcactctcactaagcaactaaaatataacrtttaaaatgctactcagcgtgggaagatttatgagcaagcaattatatcaaactctcatttgt

SEQ ID NO: 687920 - DNA, 1002 bp, Homo sapiens
tctctagctaagttagtaaactctctttttgaatgtgtttgctggtaacatatttttatgtcaatcaaagagcaattaaaacaccatgtttccttagtaattgaagttgcagtacattacagattgagattttatttttaaggtgtatatttaaacacaattaggtatttgtctaccatctataacaaatgaaaacaatactgcaaatattttatatgtttttaaatgtaatactagtaaagtttattaaggtatagtaagctagcctttgaattttggagctaaatctttccattcttggaggaraatacactgaggacagtgttcaagcacatatcacatataaaatggaaaaaaaaagtagtttaaagtagataggatgttttctgaaagctgatagtttacttatttcttgtttcttttccttttatgtccagttctttgggctatgcttctttctgggctcaagtgatcctcccatctcagcctcctgagtagctgggataagaggtgtgtgccaccatacccagcttttacttgttttttagaaactgttctgttatatttcttgaagaaagcaagaataatattctcacaaccactttttgcacctttcaataaaattttgaaaatatacaacagaaatgctttgccatataataaaagtatagtatttatatggaaccaaaaacaatctttcaaaactcagcaaatttaagaacaaatgagaatgagggaacaacattaataccctcacagaaaacagattttttaaattaaaaataaattataaaaaccaccatattttattttattgggtcataatttatcttcttgcaatctatatatctcaaggtctaattataatctggcatacatgttgtaccagcaatatctatagttcactttatttatatttttgagtcctagaactcaggataaatgaaaactagtgaccctacacctcaaaaatcaaagaattgttgccaaaactcaatctcc

SEQ ID NO: 687921 - DNA, 500 bp, Homo sapiens
tggggcctggttgggaaggctcggtgcactgtgggctgcaggtgctggcaccaggcaagtcggaggctgcccctcccgtcctttcactgcagctggcctgaagcccctggctcggtcccccgccacgttctcagcagcgggtggcctgtgagccagggccyatcatccctgatgctattccgcttactggcgaaagcagaggtctgggttttgggtccaccatagctcagagcctcaggtcctcacccaaggcctcagtcccctagcctggcccacaggcaggagtctggcttgaagcagagccctgaccaatccacctcctctgcccacattctcttgctggatggctgccatccacaggagaggggctgggcatgtcctgccagggcttcctcctgcccactccagccctgctgcaggccctgatctccaggaggaaaaggcagcctgggtacctttccaacagaggcattgcttccttcctccctccgtccctccct

SEQ ID NO: 687922 - DNA, 604 bp, Homo sapiens
ggtgtctgcagggagggttcctactggaagctccaggaaggaatctcctccaggcctctctcctgacttcttgtggctggcgacaattcctggcattctgtggcttgtggactcatgactctcacttctgcctcctcttcacatggcctccccctcgtttttcctcttcctaggacacttgtygggggatttagggcccaccctgttaagcctggatgatctcatctcttaagagccttcacttcactgcaaaggtcttttttccaaataaggtcacattgcaggtaccaggggtcaggatgtggacatagcttttaggggccacagtgcaacttatgatgagtactacctcctttttacagagaaggaagcactggcttagacaggatgagggacttctcaggctgcactccctgagaggtgagggtggacctcgcactccaggctctgggtacttgacaaataacgtgggtgctcgtctctccctgccacaagggccccaccacagacttccggaaagggtggcctcaggacaccatcttcatgtgccccatttcctaggagccctctaatctttaatgacaatttaaggaacgctgagaaa

SEQ ID NO: 687923 - DNA, 604 bp, Homo sapiens
ggtgtctgcagggagggttcctactggaagctccaggaaggaatctcctccaggcctctctcctgacttcttgtggctggcgacaattcctggcattctgtggcttgtggactcatgactctcacttctgcctcctcttcacatggcctccccctcgtttttcctcttcctaggacacttgtcgggggatttagggcccaccctgttaagcctggatgatctcatctcttaagagccttcacttcactgcaaaggtcttttttccaaataaggtcacattgcaggtaccaggggtcaggatgtggacatagcttttaggggccacagtgcaacttatgatgagtactacctcctttttacagagaaggaagcactggcttagacaggatgagggacttctcaggctgcactccctgagaggtgagggtggacctcgcactccaggctctgggtacttgacaaataacgtgggtgctcgtctctccctgccacaagggccccaccacagacttccggaaagggtggcctcaggacaccrtcttcatgtgccccatttcctaggagccctctaatctttaatgacaatttaaggaacgctgagaaa

SEQ ID NO: 687924 - DNA, 653 bp, Homo sapiens
ggggaaagttctcacacaagagagggggaaatggtcaaaaaaaaaatcaatgtttgcattaatggagttgcctgttcagcatttctcctcttttatagatttagataacatgctcgtcagggatatatcttcatttcccagagcaaagaaattrattactcactaatggcacaattcagaaattaatttgtgctaccgtctcaaatatgttgttattaatcaattgagagtgtggggctggcaggggaaaaggtgtccaccagggtctgaggctctcaaggctgacctatatttgatggacatttccagaggctcaacttgggccactcaaaaccaggggccagagggtacagacccgaaagacgattccgaggatgctgtgggaagaacattagaccggaagttggatgactcaaaatctaggattgactttgggcgagtccctctgggtctcagttttcctgtctacactgagaaaggttggatttgagcagtgcttctcaaccctcctctaactgcagagttcgttttataaaacagcttgcagaattccagggtgcaagatgtgcaggtgggagcaggagtggggggcctggaggctctgaccccccccccagttatggtccccagggctctgcagagcactatcgagc

SEQ ID NO: 687925 - DNA, 584 bp, Homo sapiens
caacagagtagacaaaatgactaggccagttgacattaggcagtctctgagctgatgtgactgacacatgaacggagcagccacagtgcagagatagaagccatacatgggctccgtctcacacctcagtactgacgcctgtgcaagtctaacctgtcagcaacagggaaaaacaccgctcccaatacgacatcttcaaggaggtgatcttcaatcgtgattttccttgtgggaggggatccatgtgcatccgacatatgtggcagcacattcgacrttttcttgaaaaatcctgggaattgtagtgccttcagtgcccagattaccctcaatgttgggtcatttcctggcttcagcctcatgcctattaagttgaatgagcacagtcgtacaaattactcaggaaaaccaaccaatgaactaaggctttttgttttgttttgttttgcttttttgatacggagtcttgctctgttgcccaggctggagtgcagtggagtgcagtggcacgatcttggctcactgcaacctctgcttcctgggttcaagtgattcttctgcctcagcctcccgagtagctggga

SEQ ID NO: 687926 - DNA, 1553 bp, Homo sapiens
gactttatttttattttttttgagacggagtttcactcttgtcacccaggctggagtgcaatggcaccatctcggctcactgcaacctctgcctcccaggttcaagtgattctcctctgtcagcctcccaagtagctgggattacaggcacctgccaccaagccctgctaatttttgtatttttagtagacatggggtttcaccatgttggccaggctggtctctaactcctgacctcaggtgatctgctggcctcggcctccaaaagtgctgggattacaggtgtgagccgcagtgactggcctaattgactttcttaatcaggagaagatagctcttctcttacatgatggcgacagaaaagaatastcccttgcctaattttgatgataaatggataagtacaacaaccatgactgagaaacagtggtggtgatggaagctatttataggcccaacaacacgtgctctcacttgctaaggctgatctagttactgccactgctgaagatccagcctgacagcaacagataccatcactgagtctccagtatggctccatccctcaagaagaccaaccagcttcttaatggcaaattattcttcttaatgacaaaatgggtcctttccaccatgtgattccaccctgtgattttgatacgaatggacacttatcctattcatacaacttcagctagacagtgcctatgtagcatttgatccactgaaacaggatcctgccaaacattgcattggactaaagtaactgcttatgttaatggaagtttaaccttaattacttccttataggccttaactccaaatacagtcacattgggggttatagattcaacatatgaattttggaaggctcttcttttcccagaattgtctttgctgaaaatcaattgaccataaatataacgatttatttctggactgtcaattctgttccattggtctatatgtcttcttactgcaaataccatactgttgataactgcagctttatagttagttttgaaatcaaggattaaacattctccaactcctttcttcccacgcatggaaaatcactgatctcttttctgtctctacagatttacctattctaggtacttttctttttaaacagtgtcttttggctattctaggtcttttgtacatctatgtaaattttacaatctgcttgtcagttcgtgatgaaaaaggctggtggaattttgagagggattgtgttgtctatatatcaatttgtagaaagttgccatcttaacatattgagttttcaaatctcagaacatagaatgttagaggtccctgttcttttttaattttaaatttcttttcataatttaaacattttttctattgaggtaaaattcatatagataaaattaactattttaaagtgaacaattaagtggcatttattacattcacaatatcgtacaacaactacctctatctagttccaaaatattttcatcaccacaaaagaaaactgtgtacccatcaaacagttactcctctttcctttttctcccaacctc

SEQ ID NO: 687927 - DNA, 631 bp, Homo sapiens
ccacgcccagataatctgttttagagacaggatcttgctatgttgttcaggctggtcttgaactcctgggctcaagtgatcctccatcctcagcctcccaaagtgctaggattacagatgtgagctaccatgcctggccaggtgttacctttaatcaactattaaaaataagtggattgaggtcaggagttcaagccctgcctggccaacatggtgaaaccccgtctctactaaaaatacaaaaattagccaggcatggtggtgcatgcctgtaatcccagctacttgggaggctgaggcaggagaatcgcctgaacccaggaggcggaggttgcagtgagccaagatcgtgccactgcactctggcctgggcaacagagctacactctgccccccmcaaaaaaaaaaaaaaaagaaaaaagtgaagaattgaccagaccaaagtcacacagtcaagagcagtgctagaatttgtctacaaatctcaaaaacttaagtctagtgctgataataatagtacaatttccaattaaatctataacataaagggaattttagtagtaaccatttatattaccctaaaattttaaaaacataaataaatcatttgagagtcagtggatgacagaaa

SEQ ID NO: 687928 - DNA, 648 bp, Homo sapiens
tgtgacaccctatccatgtcttaattctccccaaatagggcaaagtaattacggtttcataactcctttttagaatgggtaataatgacatcagaggagaatggtcatgttgttatataaagttggttcaccactttatatctcattcttatacagaaacttgactattttaccgcaaacacatgtttaacatttaattatttgtttattcatttttagactttaaagtagttctaggaatacaaaggtaaactgcaaacacatttctttttcctgagatggcaaaaaggatttagtccagaagtgctaatgctaatgtggtaygacactgtagaaaacacaagaaaccaaagcagatgttaaaggttaagtttacctgtggccttggactccgctctaactgccctcagggtctaaaaaattaactaggctttgctgaagacataactgccttgacttaagcttaatcccaaagactccaagcctaggagagaaaaaaatagtcactgaaataaaatcaagaatatatgcaatgtaagatgatttctggtgggtacttccttttcctcagtgtttcctgtaatggaggtttacactgacaagaaggtgaagtccagtatttggggataagaaagatgtaagaatata

SEQ ID NO: 687929 - DNA, 625 bp, Homo sapiens
ctcaaaaagtatttgttgaaacaatgagtaatatacaacataaaaaaatatgaaattcaacatttggactagtaacatataagcaaaaatctcagatcaaaaaatggagaaaggtaaaaagaaataaaataattatgaagaacttaactaaggaaatatcaaaacttggctaaaatttaaatatcctggaagtcaaactaaataatttattaaaataagtttaataacagcatggtttcactgaaggatggatgaacagctagttcccaagaaggctttgtcttgagggtggttccaagatggcygaataggaacagctccagtctacagctcccgtctacagctcccagcatgagcgtcacagaagatgggtgatttctgcatttccagctgaggtacttcatctcactggggctcgttggatagtggtggcagaacagtgggtgcagcccaccaagcgtgagccaaagcagggtgaggcatcgcctcacctggtaagtgcaaggggtcagggaattccctttcctagccaagggaaagggtgacagatggcacctggaaaattgggtcactcccaccctaatactgcactttgccagtggtcttagcaaacatcacaccagga

SEQ ID NO: 687930 - DNA, 652 bp, Homo sapiens
agtgatccacttgcctcgccctcccaaagtgctgagattacaggtgtgagccactttgcccagccacaaatatgtatttaatcccaactatatacatggcacaatgctgggtgtcttttcttttgaatagtgttattagtgatgtaaattttccagtggaatggcgactgatcattggtagaaggaggcatttccatggggggcaggaaaatgaactacttgtttgtgagaccaagatctccagtagcatagaagaagggagaaggataagaaaacaagagggcaggacttagctgrcaaacttagactatttccatatgtatacccaaggccaactctgactgcttacaaggcaaacaccaaacagtcaccaattaaagtttttttcctccacagagaatgattctgacatggaatgtgattgtgacaaggccgtggaacagagcaagtgtttgctgtgcaaaatttgttttgactagaccaacaaggctgttcctatgggccatctgctgagacctagagctttgttactcagaatctttgtttaacctgcttccatgaaaaagagtttgctaagtaaattaatagagtaaacaaggaaaatgttatgctgattaagagtgaaggccttcagctgaaacatttgtactca

SEQ ID NO: 687931 - DNA, 655 bp, Homo sapiens
tttctgggtatatactccaaagaattaaaagcagtgtcttgaagggatatttgtacaacagtgttcgtagcagcattactcacaatagccaaaatgtgaaaacaaccctaatgtccatcaacagatgaataaacaaaatgtaatatatacttaacaatggaatattattcagtcataaaaagtaatgaaattatgacacatgctacaacattgatgaaccttaaaaacattatactaattgaaataagctagattaaaagggataaatgctgcatgacttttatatggtacttcgtttgcatgcggtacttagartagttaaattcacagagtcagaaagtaggatagtggttgctgggagctggtgggagagcggaatggggacttactgtttcatgggtacagagtttcagtttgggaggatgaagaagttctgaagatgaatggtgatgattgcatagcaaacaatatgaatgtgcctactgccactgaactatatacccagaaatggttaaaatggtaaagaggtttatgttaggtactgcaataacaaaaaaagaaaatgagaacagagaaaacattacagaatctattcttcacggggttatcagttactgcaagagcaatttcagcagggaggaaagccaagttctga

SEQ ID NO: 687932 - DNA, 2000 bp, Homo sapiens
tggatcagtaaaaaataatccaaggagaaaagaggtttgtaagaaatcctgatctgttttggagccaatagaaggcctctggacagtcagggtttccacaagcggtggaaaatgaacagcagagtgagcagacaaggctttgctcttctgttgtacctcttcttcacccagaaacttattcttctgcataaattgagatcttatataaaattttatttgatgtaagtttccaaacattttacaaatgtgaaaacattgagttagtgagtataaaatagccttacaaatcttcagattagagccttcatcttccctgatggcctctactcctgcctgatgcctagcattgctcttggccgagggcagcaggcatttatggaatggaggctcagcaacaggactttgttctttcttgtttgatctggtagagacttggttcctgagatcctgtttttattttcatagctttttttttttttgcttctttttacaatttaacactcccctttcaaacaggattgggcccctaaaataatattttcatgttgtgactgtttcttggccataatgggatgtactatgttaaatctgtaaatgggattacatgacactggctgtgggaagtataggaatacatgtactagaaagctgccctcatttatacacgcacccttatcagaactgaagtttacagttgctttgaacagctccaggatgcaacattcaccttcacagtttagatttctagaattattatgaccttatgccagcagatggcagtaaaatattttatttttaagaaggcaaaatattctaattagcacaagttgcacagggtggatttctactaccaaacacagtatggattgatttttaaaagttggtaattgttcattaaatgaatggatgccctgcatgccaattaaaaacaactgtggaaaattgtcataaatgaaatgaagtgaatgattctggatttaatattaaggtaaaaatgtggtggcccaaattttttgaagtcttgtttcagtccattttcccttgcctgtgaaagtctgaaatcattctatatctataccttggcaaaatattctgagaagtgagaaactggcacatgttggcatggatacctaacatccacaccgtttccctctgacaagttattaacagaaatgcttcactgaaactgatgggctttgctttactgaggaagcattttctgccaaaatatttcttttctgtaacagggccaaccgaaatggtcgatttgggttcttgctttaatctcctttacttctttcttcaattagatgtaaatttcacagacttggcttatagagatcatcaaacatttactaagtacttatattattatttccttcccattttcctattcctaacctaatccagctctcattcttttatgtatctttctcaaagaattttaaactgatctctctgtctctagctcttcttttttccctccagtgcatcaaatgctgataaattattattattttttatatatggccctgtgacttttggtgatttgtctcacctgttaatttggcgtgtggaatggttctagaatcaccttgaggtctagtgtgccttaaatgcccgtaggttttgtttactttctatattcttttctttctctgtgtktgtgtgtgtgtgtgtgtgtgtgtgtgtgtgtgtgtgtgtcaattcagaaagattgagagtgattctgccagtggcaccgtcttcccagaatcctctcaattaaagtgtttttaattaaattcaagtatgtaatatatgtataattttcagtacagcatacatagtgtagccactttatatctattgacattttatacctatctattgacatttttatatcaatagctactctcattcttgatatatgcaatcagaatattgggaaatatatatgcaaaatagtaaagttagttatgactcctagtattttatgattgatagaattgtaggtgttt

SEQ ID NO: 687933 - DNA, 1542 bp, Homo sapiens
caaataaaagcatgccacattataataaaggcaggttatttgccatcttttattttattttccattaccatgacatgcagctcgaagtcctacaaaaagggaagtcacatcttcaagtaatttcctcagtttctactagatggagccaaagtataaaaaataggtccttgtggagctacacattataaggaaccctaactaaagctgtttcgttagtgtaataaagcaatggaaaattataagaaactaagtttatatctaaggccatttactagaatcatttgaacttcaatcatggtccattcacatacttttttgtgaaaaattctttatatttaaaacatatactctcatgraatgtttctagattcatttgccaattattgatatttttctcatatgtatatattttaaagtcattagtaataataaccattatttgaaacatatacagcaaaatacagtttagtcaatttttttctaaaattacttttatttttgttcagaaaaaggaaaagagggaaaagaaaatgatcagtgaaagaaatgatgaagtacgctaccaaatcaaagaatagtttatagtaacttaaaaagttaaagataagaaagaaatgttaacataatttgtttgaactattcatttacatgttattttttaaaaaaattgtttcctgtatcacatcgctaaattgtccatgtcatgactagctagcagtgtagactccccttacttttcagacactttttggctagctgagtggtgagctaaataaatcaaaaaaaaaaaaaggaacaaaagttttctgttgtaattttgctactttaggtataatcttattttaatgtcttagaaagtaacaagaatttttgaatatacaaataaaactgaatgtaaataccttctttttgttgggattttttttaacttttttctagggatagaagcctacaaagtcaatcacaaagaaaattaatgtattgataaattattttaattaaataatagaatttgtgatttcaaaaatcatatttgtcagtatgtaaattatttgcaacttcataacacggttaaatttatttcatatacatgaaggaggtactcttgagatctttgacaaacagttgaatcccaggatgatgatggcaggaaccttctttgactaagttattcacatttataaaatttacttcattagttattttagcaactcttctttttcactggttgtatgttaccaatcttcctagataacgttaaaaaacagcagtttgagtaatgaaacattttcccataaaccaatttatttgccatctttaaagcaaacatattagatgagtaattctattctctgtaattctactaaatcaatcgtttgagtagcttagtaatgtataatcatgccttttacagataagctaggcctattgcttcaatcccaagagtctataacatacgggttctgtttactacacaaaactgcaacttatcaatattatcaggctactcaaataacagttgaggtcaggtttaaaaaaaac

SEQ ID NO: 687934 - DNA, 583 bp, Homo sapiens
tttaatataatgtttagtatgtatgtctatctaacttggcaaaactattttgtctatcacactgacacgtttttaatcttttaaatatattttaaatgagaagctgaaataaacaacccagaccaccacttgcattgtttgattattaattctgaattcacttctcacagagtttttaaaaataaattcctgacagcagataattctgttacaatcaccatgataaccaatggccattttatttgcagtctgcctgtttacaactctgttttaatattgccttaaagtatgacagtgtgctttaagacaaattcaaaagacatttagatggctttataaatgtaatttcttttagcatgactttaaattttttaaaaaatgtgttgtcttataaattacaggggttcaygtgtaagcattattcaattttatttgtatgaattgccttgatgatgttttccctcagaaaaggattgggttaaggtagacataatctttaattattaggcttataaatttatttcactaaaaagcctacaatgcattaatagtgttattgattttataaaacaagttcactttg

SEQ ID NO: 687935 - DNA, 1018 bp, Homo sapiens
ttggctatatctcttcctggcttaatgcccaataacacatcatttaataacctctggtagcctaattttgcttatgggcaaaattagaattaaaagcagggtctcatagtggtgctgtgagcattatatgcagtaatgyaaatgaagctcttagagcattgattaatgcaaaataagaattcttacccttgctatttttaggtatataaatgttaatatgatgatgaccaaccttcaatttaacttttttctaaaggtacacttcatacttaattttattttgtttgaagtcagtcaaccttaacagaacagtggggcaaacttgtcccaattaccattgctggagttcaagtcctttctcctacttttccacacagctcttagtagacatgtggagaaggtgctctgttcccagagaagccttggcagattgattttatttgtttgtttgtttgtctatttcaaatttgggcagacagttagcaatgtcagtttcacatctaaatctgtgagggagaaatggatcagtagctaccatattgtgacaaaacaaatcaaagttaccccatttaggacctgacagtaaattatgagggcagtagaggaaggatttctaagaatacataaattttaagaagaaattgggagattcaaaagcaggtagatagacttgaagttaaacatcttgtaatttatccttagaaagtaataatacagtgtgcaaaatatacatatgaataaagatgtccagtaaaaaaatgaaaagttgtttatggccttgtatgattacacttatttgtatttttacttttactatgtatgtgtatgaaaaagtatacctttatatatatccacacccttacatatcaaaataagagttgttttcttggaatacttgaaatttgttttactcaggaatatttgatatttgaattacagttagatgtgaaaataataataataaaacagaactggagttaacagtaatttataattgagacactgcaactaaatgtca

SEQ ID NO: 687936 - DNA, 1018 bp, Homo sapiens
ttggctatatctcttcctggcttaatgcccaataacacatcatttaataacctctggtagcctaattttgcttatgggcaaaattagaattaaaagcagggtctcatagtggtgctgtgagcattatatgcagtaatgtaaatgaagctcttagagcattgattaatgcaaaataagaattcttacccttgctatttttaggtayataaatgttaatatgatgatgaccaaccttcaatttaacttttttctaaaggtacacttcatacttaattttattttgtttgaagtcagtcaaccttaacagaacagtggggcaaacttgtcccaattaccattgctggagttcaagtcctttctcctacttttccacacagctcttagtagacatgtggagaaggtgctctgttcccagagaagccttggcagattgattttatttgtttgtttgtttgtctatttcaaatttgggcagacagttagcaatgtcagtttcacatctaaatctgtgagggagaaatggatcagtagctaccatattgtgacaaaacaaatcaaagttaccccatttaggacctgacagtaaattatgagggcagtagaggaaggatttctaagaatacataaattttaagaagaaattgggagattcaaaagcaggtagatagacttgaagttaaacatcttgtaatttatccttagaaagtaataatacagtgtgcaaaatatacatatgaataaagatgtccagtaaaaaaatgaaaagttgtttatggccttgtatgattacacttatttgtatttttacttttactatgtatgtgtatgaaaaagtatacctttatatatatccacacccttacatatcaaaataagagttgttttcttggaatacttgaaatttgttttactcaggaatatttgatatttgaattacagttagatgtgaaaataataataataaaacagaactggagttaacagtaatttataattgagacactgcaactaaatgtca

SEQ ID NO: 687937 - DNA, 2227 bp, Homo sapiens
aaaagtgactttagaacaagtgagattcatgttcacattctggcagagctagaataagtgactcattctaaagtcactgttatttccagtacactgtgcataactataggggagtgcaaaataattgctgtttttgccgttacaatggcaaaaacgcaattacttgtgcaccgacctaataggtgtgacttcacttttatttccattacgccgtacataactataagttgggacacaagaattggggggtttgtgccattacttccaatggcaaaacccaccatttttcaccaacctaataggtgtgacctaaggcaagtcaattatattatctgaacccaagtcctcatcttaccttgcaaggaaattagaggattagaaaacacatgtgtaaaacagtgtttacaagctcagtgcaatgatagattatccaggaaaaatatttaatttcaaaatatataaattgatcttataaaatgatttttactgctacagtttcagaaataaactgggactgaacagattttttttcaaaataaatactatatcataatctattcgagacttmtaaaatcaacgcttctttaaaaatgcaacatatagaaagaacttccttcttttcctttcctcccactagttttagagccattgatttatgaagattcactcaatttatgtactaacatgttaccttctgaacagagaagactgaagctgaaaaactccttctgaaagtggctatccatttcttaattggttaatgatgccatgtgggcagtccctggtttcctttgcaagacaagctatcttgggaaacacccacttcatatttcacaggcacagatcaccacaatcagctcagtcaacaagttagctcctgccccagatgctggagtaccagctagtctgtactttccttagattagaaagctatatgcaagcaagaggctactaaaccatgcacagagccctcagactataggaagatacacatgtattttgggaattcatcattttggtcaccaagcagtatatgtatgtcctcaaagttctttttaaccactttatttcatgctctagttatgtgtatagaactcatcgtgcttcttcacactattctaggtgatgggcatttaaagatgaacaagaagtctttttcctcttcgaagagagatagatataaatgcatgtagtacaagatatagcacctaaggaatattgctaatattgtgtgtggtaggcacccttataaaagtacatagtaaatattatggcatcttagaatgaggagtgattaattctgcctggaggattctggaaggcttcaaagaatgggtgatattggaaggaagcttaccaattgaagaaaggtgcttagaaactgggaaaaacttccaaaggggaggagacaaaataaacagaggtgaggaggaaggaaatttcatacttcttaggtatagccatacacacagacagtggatcttgtttagattcaggaacataaagcccatgccaatttggaaaggatcttgaatgacatgctaagtaacatggactttattcctgatgcaataaagtgctggctatttggaaactgtcattagggaaagacaaggataaatccatatgatggaaaatgatctctggtagcaatgtgggaagaagtctggggttggattattggtgaggtggagactgcaggcagggagcccattataaaaatcataaaataatctgagaaaggaacacaaaagggtgggcatcgttcacaatccagtggcataatggagtgacttttgcttcatagaatacaattttattgactgtaggtcataaagaatcatgatgaggcaagaaaatctacatcaacaatagaaatatttttagatacattacttggagggggctgaaatttctgtgagaatattttttgaaaattatgtttttaaaagctattcccccttccttcttgttccagctacatgttgtttggtggataaaagtctgcttattcaatcatttacgtggtcttcattcaattaatctatatggattatctgcatgtgttagatattatgctaagtgctgggtgttgaattagacacaacgtttgtctatgggcatctcactgttaagtggatgaaaatgatactatgtatcagaaaatgtaatgattctgtgtttggaaattggcatttctggaaaaaaatcccattaaatatctaaa

SEQ ID NO: 687938 - DNA, 2227 bp, Homo sapiens
aaaagtgactttagaacaagtgagattcatgttcacattctggcagagctagaataagtgactcattctaaagtcactgttatttccagtacactgtgcataactataggggagtgcaaaataattgctgtttttgccgttacaatggcaaaaacgcaattacttgtgcaccgacctaataggtgtgacttcacttttatttccattacgccgtacataactataagttgggacacaagaattggggggtttgtgccattacttccaatggcaaaacccaccatttttcaccaacctaataggtgtgacctaaggcaagtcaattatattatctgaacccaagtcctcatcttaccttgcaaggaaattagaggattagaaaacacatgtgtaaaacagtgtttacaagctcagtgcaatgatagattatccaggaaaaatatttaatttcaaaatatataaattgatcttataaaatgatttttactgctacagtttcagaaataaactgggactgaacagattttttttcaaaataaatactatatcataatctattcgagacttctaaaatcaacgcttctttaaaaatgcaacatatagaaagaacttccttcttttcctttcctcccactagttttagwgccattgatttatgaagattcactcaatttatgtactaacatgttaccttctgaacagagaagactgaagctgaaaaactccttctgaaagtggctatccatttcttaattggttaatgatgccatgtgggcagtccctggtttcctttgcaagacaagctatcttgggaaacacccacttcatatttcacaggcacagatcaccacaatcagctcagtcaacaagttagctcctgccccagatgctggagtaccagctagtctgtactttccttagattagaaagctatatgcaagcaagaggctactaaaccatgcacagagccctcagactataggaagatacacatgtattttgggaattcatcattttggtcaccaagcagtatatgtatgtcctcaaagttctttttaaccactttatttcatgctctagttatgtgtatagaactcatcgtgcttcttcacactattctaggtgatgggcatttaaagatgaacaagaagtctttttcctcttcgaagagagatagatataaatgcatgtagtacaagatatagcacctaaggaatattgctaatattgtgtgtggtaggcacccttataaaagtacatagtaaatattatggcatcttagaatgaggagtgattaattctgcctggaggattctggaaggcttcaaagaatgggtgatattggaaggaagcttaccaattgaagaaaggtgcttagaaactgggaaaaacttccaaaggggaggagacaaaataaacagaggtgaggaggaaggaaatttcatacttcttaggtatagccatacacacagacagtggatcttgtttagattcaggaacataaagcccatgccaatttggaaaggatcttgaatgacatgctaagtaacatggactttattcctgatgcaataaagtgctggctatttggaaactgtcattagggaaagacaaggataaatccatatgatggaaaatgatctctggtagcaatgtgggaagaagtctggggttggattattggtgaggtggagactgcaggcagggagcccattataaaaatcataaaataatctgagaaaggaacacaaaagggtgggcatcgttcacaatccagtggcataatggagtgacttttgcttcatagaatacaattttattgactgtaggtcataaagaatcatgatgaggcaagaaaatctacatcaacaatagaaatatttttagatacattacttggagggggctgaaatttctgtgagaatattttttgaaaattatgtttttaaaagctattcccccttccttcttgttccagctacatgttgtttggtggataaaagtctgcttattcaatcatttacgtggtcttcattcaattaatctatatggattatctgcatgtgttagatattatgctaagtgctgggtgttgaattagacacaacgtttgtctatgggcatctcactgttaagtggatgaaaatgatactatgtatcagaaaatgtaatgattctgtgtttggaaattggcatttctggaaaaaaatcccattaaatatctaaa

SEQ ID NO: 687939 - DNA, 2227 bp, Homo sapiens
aaaagtgactttagaacaagtgagattcatgttcacattctggcagagctagaataagtgactcattctaaagtcactgttatttccagtacactgtgcataactataggggagtgcaaaataattgctgtttttgccgttacaatggcaaaaacgcaattacttgtgcaccgacctaataggtgtgacttcacttttatttccattacgccgtacataactataagttgggacacaagaattggggggtttgtgccattacttccaatggcaaaacccaccatttttcaccaacctaataggtgtgacctaaggcaagtcaattatattatctgaacccaagtcctcatcttaccttgcaaggaaattagaggattagaaaacacatgtgtaaaacagtgtttacaagctcagtgcaatgatagattatccaggaaaaatatttaatttcaaaatatataaattgatcttataaaatgatttttactgctacagtttcagaaataaactgggactgaacagattttttttcaaaataaatactatatcataatctattcgagacttctaaaatcaacgcttctttaaaaatgcaacatatagaaagaacttccttcttttcctttcctcccactagttttagagccattgatttatgaagattcactcaatttatgtactaacatgttaccttctgaacagagaagactgaagctgaaaaactccttctgaaagtggctatccatttcttaattggttaatratgccatgtgggcagtccctggtttcctttgcaagacaagctatcttgggaaacacccacttcatatttcacaggcacagatcaccacaatcagctcagtcaacaagttagctcctgccccagatgctggagtaccagctagtctgtactttccttagattagaaagctatatgcaagcaagaggctactaaaccatgcacagagccctcagactataggaagatacacatgtattttgggaattcatcattttggtcaccaagcagtatatgtatgtcctcaaagttctttttaaccactttatttcatgctctagttatgtgtatagaactcatcgtgcttcttcacactattctaggtgatgggcatttaaagatgaacaagaagtctttttcctcttcgaagagagatagatataaatgcatgtagtacaagatatagcacctaaggaatattgctaatattgtgtgtggtaggcacccttataaaagtacatagtaaatattatggcatcttagaatgaggagtgattaattctgcctggaggattctggaaggcttcaaagaatgggtgatattggaaggaagcttaccaattgaagaaaggtgcttagaaactgggaaaaacttccaaaggggaggagacaaaataaacagaggtgaggaggaaggaaatttcatacttcttaggtatagccatacacacagacagtggatcttgtttagattcaggaacataaagcccatgccaatttggaaaggatcttgaatgacatgctaagtaacatggactttattcctgatgcaataaagtgctggctatttggaaactgtcattagggaaagacaaggataaatccatatgatggaaaatgatctctggtagcaatgtgggaagaagtctggggttggattattggtgaggtggagactgcaggcagggagcccattataaaaatcataaaataatctgagaaaggaacacaaaagggtgggcatcgttcacaatccagtggcataatggagtgacttttgcttcatagaatacaattttattgactgtaggtcataaagaatcatgatgaggcaagaaaatctacatcaacaatagaaatatttttagatacattacttggagggggctgaaatttctgtgagaatattttttgaaaattatgtttttaaaagctattcccccttccttcttgttccagctacatgttgtttggtggataaaagtctgcttattcaatcatttacgtggtcttcattcaattaatctatatggattatctgcatgtgttagatattatgctaagtgctgggtgttgaattagacacaacgtttgtctatgggcatctcactgttaagtggatgaaaatgatactatgtatcagaaaatgtaatgattctgtgtttggaaattggcatttctggaaaaaaatcccattaaatatctaaa

SEQ ID NO: 687940 - DNA, 2227 bp, Homo sapiens
aaaagtgactttagaacaagtgagattcatgttcacattctggcagagctagaataagtgactcattctaaagtcactgttatttccagtacactgtgcataactataggggagtgcaaaataattgctgtttttgccgttacaatggcaaaaacgcaattacttgtgcaccgacctaataggtgtgacttcacttttatttccattacgccgtacataactataagttgggacacaagaattggggggtttgtgccattacttccaatggcaaaacccaccatttttcaccaacctaataggtgtgacctaaggcaagtcaattatattatctgaacccaagtcctcatcttaccttgcaaggaaattagaggattagaaaacacatgtgtaaaacagtgtttacaagctcagtgcaatgatagattatccaggaaaaatatttaatttcaaaatatataaattgatcttataaaatgatttttactgctacagtttcagaaataaactgggactgaacagattttttttcaaaataaatactatatcataatctattcgagacttctaaaatcaacgcttctttaaaaatgcaacatatagaaagaacttccttcttttcctttcctcccactagttttagagccattgatttatgaagattcactcaatttatgtactaacatgttaccttctgaacagagaagactgaagctgaaaaactccttctgaaagtggctatccatttcttaattggttaatgatgccatgtgggcagtccctggtttcctttgcaagacaagctatcttgggaaacacccacttcatatttcacaggcacagatcaccacaatcagctcagtcaacaagttagctcctgccccagatgctggagtaccagctagtctgtactttccttagattagaaagctatatgcaagcaagaggctactaaaccatgcacagagccctcagactataggaagatacacatgtattttgggaattcatcattttggtcaccaagcagtatatgtatgtcctcaaagttctttttaaccactttatttcatgctctagttatgtgtatagaactcatcgtgcttcttcacactattctaggtgatgggcatttaaagatgaacaagaagtctttttcctcttcgaagagagatagatataaatgcatgtagtacaagatatagcacctaaggaatattgctaatattgtgtgtggtaggcacccttataaaagtacatagtaaatattatggcatcttagaatgaggagtgattaattctgcctggaggattctggaaggcttcaaagaatgggtgatattggaaggaagcttaccaattgaagaaaggtgcttagaaactgggaaaaacttccaaaggggaggagacaaaataaacagaggtgaggaggaaggaaatttcatacttcttaggtatagccatacacacagacagtggatcttgtttagattcaggaacataaagcccatgccaatttggaaaggatcttgaatgacatgctaagtaacatggactttattcctgatgcaataaagtgctggctatttggaaactgtcattagggaaagacaaggataaatccatatgatggaaaatgatctctggtagcaatgtgggaagaagtctggggttggattattggtgaggtggagactgcaggcagggagcccattataaaaatcataaaataatctgagaaaggaacacaaaagggtgggcatcgttcacaatccagtggcataatggagtgacttttgcttcatagaatacaattttattgactgtaggtcataaagaatcatgatgaggcaagaaaatctacatcaacaatagaaatatttttagatacattacttggagggggctgaaatttctgtgagaatatyttttgaaaattatgtttttaaaagctattcccccttccttcttgttccagctacatgttgtttggtggataaaagtctgcttattcaatcatttacgtggtcttcattcaattaatctatatggattatctgcatgtgttagatattatgctaagtgctgggtgttgaattagacacaacgtttgtctatgggcatctcactgttaagtggatgaaaatgatactatgtatcagaaaatgtaatgattctgtgtttggaaattggcatttctggaaaaaaatcccattaaatatctaaa

SEQ ID NO: 687941 - DNA, 1399 bp, Homo sapiens
gtcaccaaatccattgagaatctaatggaatcaagggaggtccctgcactggacaaatgcaaatataaacagaaatgaaaaattgttcataaagtctatgtaataaattagcatgcattttattcatatgctgagttaaacttttataaaatgtttcactatttttatgcaaaagttaatagctcaattcaaaaaacaagtaaaaagagcaagaatcaaatttgtacaaattaaagtaagtgaaactttgactttgttcaaaattaatttatttgataagacacctgcttgaatatgaatttaaatttgtgcatttttgtgaaatgtggttatgtatacatcacctgtgacatcaattgaagttgtcctgtttttgattggaaatatgcaaatcttgacaataatacgaagtggaattagggcttcttttgtcagctctgtccatgagaggttaactattttctaaaacaccagaattctccaagattcttcatttaaattcatgtgagcaatttttgcagtcagatttggccaggactgcttcactagtgttttctatgtcaatatcagaattatgcagcctgtgttcaattttaaagccaaatcagcaaaagcaataatcaagagttctgttggattccagggcccaaaggcattttcctggaataatttgacaaggctttgtcactatcaaccctgacgaagcactttctatagcatttgaaagttcatatagttgtccacctgctaatttctctccccaattattaatagcaacttggataaaatagttcttagtttatcatcattctcaagaacagtgtcacagggttctatctgaaatagagaaatacccaccaagttagtcaagccaccaggaaactctgtcagcttgttttgaggatgagttttctatctcttgaacttttttactraaagttcaatcaagatctttggaactagtgctctggaaagttgacaaacttctacataggacaaacaaacttcatattctctttctattctcttggcatacttcttaaaaaggcagtgattcaagaccctggctctgataaagttgacaactttcgggacagtagacaaaaattctctcaggattactggcagtgtctttattgccattatatgacagcttagaaaatagtgagtcacagtcttgtggggagctcctttcttcaccaaagcagcaaaactatgctgccaatcctcacaggtgctccgtctgtggacaaatttaccaacccttcccttccaagctaagtttttcttggcaaataaacttttcacactttcaaggatgtcactgtccattgtagttttcaaactggtcccaggaaataagaaatttttttcgatgcaacaaaataatatcgcataa

SEQ ID NO: 687942 - DNA, 723 bp, Homo sapiens
cacttcctttcataaaaaagtggagtacatattaacactgcagcaatttgttttttcaaaaaaaggaggtgtcatttaaatacctgggttcttcccagaagcaaacatgctaagcattcacttgcactagtaaatgtccttggccatattaataagcttgaccatttcatttttaattttcttctatctttctcctagtttgaagttcttttttgaaattaacatccaagaggaaatttaggcttaaattcttttaaaactttcttctctttttaagcacaagttctgaaaaatacatatatgaaagaattaaaaaaaaaaaaaaggaagacattttctcctttcttttttaacctgaccaattttctgggtcaagctcagtgtgagctcacttgrttggcagcaggggaagccagggtgcccctgaagaaggtcatttctgacttttctccgccactgctatgccacattactcactgtcttatggccactagttaaaaaacacatgtaagcaatcaagtactggaaagagtacgaagaaaagagaaagccagaattaaaaataaatcctaaatttaaaagtgaactagttaaaaaaaatcatttactataatttcttctgctcaaatactacagaagtatgaagttgttagcctagagtaaacccaatttaatttttcacaatttactctaaagatataggccattttctgtcatttgcaa

SEQ ID NO: 687943 - DNA, 2101 bp, Homo sapiens
aagataagtcaaaatataagggcattatgtcacttttagaccactttcattagaatgacccatagcatgttaattgcatactcctagattacaccactgatatttttgaaaactccttcagaaattactttagtgggaagagtgaagtcaaaaagcttccattaaaatctggttctagtccataccagttaatttaccattaaacttacctaaccaccacctctcatcagtcaaaaaaaaaaaagaaagaaaagaaagaaagaagggggagtgatcatatctcatattacacattatgatctaatatgtaatggctactaatatgtaatggtgcatattaccattacagaatggtaatatggatgaaataatatatttgtcaaaatattttatatgatatcatcatgtagtagatgatgaacaaatttaatattttgttgctaaattcttctctttagcttccataacagaaataatcagagctcaaacgtgtggttcctttattgtcaactatagcaagtaggattcaccaagccatcccttttccctccacgcttcagggacagttcctcttctaagttatccctgtctttgtgagggttaacatatggaaacttacgcaatattctaattttgatttcatttaaatccaaaattagcacagtttcccccaacttgtgtttttcttcttttttaaatcattctacttttaaatgcagagggttttttttatatttataaaaagtacgatcttaagataaaaaaaaatactctttggacaaagcagtcttcaaagaccctacctactatcatctagaaatgtacaaggaacatcctaaggattagggcaggacatatgtgacagtttacgtgtaacctaaaggattatccattcaggatttacagttttgtctcttggcatctctccataggcaactgttttgtgtctagctgggtattatacactgatctattcaataacaggagccacgtgttaytcatatctttggccccaacatctggcagcattggcatattatggatatttatgttcttagagaatgaatgaaatccaatgtagatatttgtaactgtggggaaatagctaaatgcaggggtcagacatagccattctactgctagttaaatctgggaggtagaaaaaaaaaatgtagctattcaaaagcagagactggaatgtgcaataaaaataatcccagctgtcaaaaacatacatggaagaaatgacaggaagaggaaccactggcaaaaaggagatttaaaaataatttgactgaaaactaagtcccctctgccactgtccagccagcttgtcagtttaatttgctattggagaaaaggaagggacaagagtcaaaacaggtgtttggttttctttttttctgtttttaatggggcggggcgggggaatcaagtgaaagcatggctttaccagctgtgaagagctgctgacacctgtggttgccacatctcatgactgtgagataggtcagaggcagctcgagacagctgataaaatgaggtgaggtaggggaagaaaccagaggaaaagtagtgctggataaaaacagaaaggaaagagagaacaaatggtgcccataaaatgtccaatttcaaaatgtctatttttatctttatttttctaattagtacaaagtcatactctctctttttcctccttctgttcactaaagaaaatgtgacaaaaatggataaaaatgaaatctctgccttatgtgcagtatacaactcttcatacctgccagtctcaactaaagcattgcaatattctctcctgggtatttatattcctctccctccccccaacccctttctccactctcccaccccctccaggactgtagaaagaaaaaaaaatattcctgaatgcagaattgtgtgctactcaagggaaacttgactttggctacaaatctgagggggcacattgtataagcgtaggaagatgtgagcatttgtttgctggtagaagcctggaatatgactgggtggatggaagtgacttctttaagcacaagacgtcatcattcccatagttagatatttaaagataattaca

SEQ ID NO: 687944 - DNA, 2101 bp, Homo sapiens
aagataagtcaaaatataagggcattatgtcacttttagaccactttcattagaatgacccatagcatgttaattgcatactcctagattacaccactgatatttttgaaaactccttcagaaattactttagtgggaagagtgaagtcaaaaagcttccattaaaatctggttctagtccataccagttaatttaccattaaacttacctaaccaccacctctcatcagtcaaaaaaaaaaaagaaagaaaagaaagaaagaagggggagtgatcatatctcatattacacattatgatctaatatgtaatggctactaatatgtaatggtgcatattaccattacagaatggtaatatggatgaaataatatatttgtcaaaatattttatatgatatcatcatgtagtagatgatgaacaaatttaatattttgttgctaaattcttctctttagcttccataacagaaataatcagagctcaaacgtgtggttcctttattgtcaactatagcaagtaggattcaccaagccatcccttttccctccacgcttcagggacagttcctcttctaagttatccctgtctttgtgagggttaacatatggaaacttacgcaatattctaattttgatttcatttaaatccaaaattagcacagtttcccccaacttgtgtttttcttcttttttaaatcattctacttttaaatgcagagggttttttttatatttataaaaagtacgatcttaagataaaaaaaaatactctttggacaaagcagtcttcaaagaccctacctactatcatctagaaatgtacaaggaacatcctaaggattagggcaggacatatgtgacagtttacgtgtaacctaaaggattatccattcaggatttacagttttgtctcttggcatctctccataggcaactgttttgtgtctagctgggtattatacactgatctattcaataacaggagccacgtgttactcatatctttggccccaacatctggcagcattggcatattatggatatttatgttcttagagaatgaatgaaatccaatgtagatatttgtaactgtggggaaatagctaaatrcaggggtcagacatagccattctactgctagttaaatctgggaggtagaaaaaaaaaatgtagctattcaaaagcagagactggaatgtgcaataaaaataatcccagctgtcaaaaacatacatggaagaaatgacaggaagaggaaccactggcaaaaaggagatttaaaaataatttgactgaaaactaagtcccctctgccactgtccagccagcttgtcagtttaatttgctattggagaaaaggaagggacaagagtcaaaacaggtgtttggttttctttttttctgtttttaatggggcggggcgggggaatcaagtgaaagcatggctttaccagctgtgaagagctgctgacacctgtggttgccacatctcatgactgtgagataggtcagaggcagctcgagacagctgataaaatgaggtgaggtaggggaagaaaccagaggaaaagtagtgctggataaaaacagaaaggaaagagagaacaaatggtgcccataaaatgtccaatttcaaaatgtctatttttatctttatttttctaattagtacaaagtcatactctctctttttcctccttctgttcactaaagaaaatgtgacaaaaatggataaaaatgaaatctctgccttatgtgcagtatacaactcttcatacctgccagtctcaactaaagcattgcaatattctctcctgggtatttatattcctctccctccccccaacccctttctccactctcccaccccctccaggactgtagaaagaaaaaaaaatattcctgaatgcagaattgtgtgctactcaagggaaacttgactttggctacaaatctgagggggcacattgtataagcgtaggaagatgtgagcatttgtttgctggtagaagcctggaatatgactgggtggatggaagtgacttctttaagcacaagacgtcatcattcccatagttagatatttaaagataattaca

SEQ ID NO: 687945 - DNA, 1860 bp, Homo sapiens
gtcaatgctgtgaatctgttatgacatcagctttgtagaggaaccccgccttgcagaaattaaaattctcttaacaagtaaattgctgtgtaagtatacccctttttgccactgtaatttgagtagctctgaaacataaagaataaataaaaaaacaaaaaacaaaaacaaaaaaaaacctcttggccgggcacagtggcttacgcctgtaatcccagcactttgtgaggctgggccaggcagatcatgaggtcaggagttcaagaccagcgtggtcaacatagtgaaaccctgtctctactaaaaatacaaaaaattagccagtcatggtagcgggtgcctgtaatcccagctacttgggaggtgaggcaggagaatcgcttgaacctgggaggtggaggttgcagtgagccgarattgcaccattgcactctatcctgggcaacagtgcaagactcagcttcaaaacaaacaacaaaaaacctcgtaatgcctttactggcaatatgttaactggacataccaaaatacacctagcagtctgaggatttaaaatttaaagtacattaccaaagagaatcaggggaagagtctctataacattttctggtttggctttaaacttactcttctctcagggttctccttctttcaaaacctccaccccttctatttgagaagagaaaaaaaaatgtgatggcctacttgctgctgaggctgaatactatagtcatataaaaaaaaacaatgaaaaagtaaaacacaggaacctcaccaatatccaggggattactgaagactgcagttacaaatgtttaaaaagaaatttgtctacagggatcctgaaattacacacccagaaaacaagtcattgtactatgaagtgattagtatatacaaatgtatgatagttccccaaagaggctacataggtgctgaatgataagtaactgaaagtttgtctttcactaaaaaatttaagagtagtttatactaaagctatgttaaaaaaaatctctttgaacactttgcacaagtttttaaacctcaaggattataaattggaaccgctcgagactcttagttttaattagaatagtacccagatcaaaataaagcaattatttgatgactcagtcaagacctgtaaaccaagatatgtttcataaacactttgctatttctccttttaataagtagagcttagctttctttcctttgagtgtgggtactgtctcatttttaattaagagtataaggcggaagtgatgatatgtggctttggggacaaagtcataaaaagcatgagcttctttgccctctcttggatcactgtccttaggcaaagccagctgacatgttatgaggacactcaagcagcccagtgaagaagtacacgtgggaagaaaggcagtcaagattttagcacaagccaacagctataaagtaacctcaagggatactccaaaccagaaccacccacatggctgctcccagattctagacccacagaaaccatgtgagacaataaatgttttatggtgctaagttttgtagtcactttttgcactgctatagatattaattcatatgtttacccacagggcagtcatttatttatgaatagacttagaagttcaaatcttaatagagttaagcaggttatgaatgagtaaagtatgtcaggggtgataaaaccaaatagctctaacataaatgttaagtaggatctgagtctaggctgcaatatctgaactagcttgggagtggcaggaattatgatggagtgggaaaaatgaaagtcccacttatggtagaacacctctcagctccacttatttttgccataaggaatattaa

SEQ ID NO: 687946 - DNA, 1860 bp, Homo sapiens
gtcaatgctgtgaatctgttatgacatcagctttgtagaggaaccccgccttgcagaaattaaaattctcttaacaagtaaattgctgtgtaagtatacccctttttgccactgtaatttgagtagctctgaaacataaagaataaataaaaaaacaaaaaacaaaaacaaaaaaaaacctcttggccgggcacagtggcttacgcctgtaatcccagcactttgtgaggctgggccaggcagatcatgaggtcaggagttcaagaccagcgtggtcaacatagtgaaaccctgtctctactaaaaatacaaaaaattagccagtcatggtagcgggtgcctgtaatcccagctacttgggaggtgaggcaggagaatcgcttgaacctgggaggtggaggttgcagtgagccgagattgcaccattgcactctatcctgggcaacagtgcaagactcagcttcaaaacaaacaacaaaaaacctcgtaatgcctttactggcaatatgttaactggacataccaaaatacacctagcagtctgaggatttaaaatttaaagtacattaccaaagagaatcaggggaagagtctctataacattttctggtttggctttaaacttactcttctctcagggttctccttctttcaaaacctccaccccttctatttgagaagagaaaaaaaaatgtgatggcctacttgctgctgaggctgaatactatagtcatataaaaaaaaacaatgaaaaagtaaaacacaggaacctcaccaatatccaggggattactgaagactgcagttacaaatgtttaaaaagaaatttgtctacagggatcctgaaattacacacccagaaaacaagtcattgtactatgaagtgattagtatatacaaatgtatgatagttccccaaagaggctacataggtgctgaatgataagtaactgaaagtttgtctttcactaaaaaatttaagagtagtttatactaaagctatgttaaaaaaaatctctttgaacactttgcacaagtttttaaacctcaaggattataaattggaaccgctcgagactcttagttttaattagaatagtacccagatcaaaataaagcaattatttgatgactyagtcaagacctgtaaaccaagatatgtttcataaacactttgctatttctccttttaataagtagagcttagctttctttcctttgagtgtgggtactgtctcatttttaattaagagtataaggcggaagtgatgatatgtggctttggggacaaagtcataaaaagcatgagcttctttgccctctcttggatcactgtccttaggcaaagccagctgacatgttatgaggacactcaagcagcccagtgaagaagtacacgtgggaagaaaggcagtcaagattttagcacaagccaacagctataaagtaacctcaagggatactccaaaccagaaccacccacatggctgctcccagattctagacccacagaaaccatgtgagacaataaatgttttatggtgctaagttttgtagtcactttttgcactgctatagatattaattcatatgtttacccacagggcagtcatttatttatgaatagacttagaagttcaaatcttaatagagttaagcaggttatgaatgagtaaagtatgtcaggggtgataaaaccaaatagctctaacataaatgttaagtaggatctgagtctaggctgcaatatctgaactagcttgggagtggcaggaattatgatggagtgggaaaaatgaaagtcccacttatggtagaacacctctcagctccacttatttttgccataaggaatattaa

SEQ ID NO: 687947 - DNA, 693 bp, Homo sapiens
ccccaaccaacctcatacatgtctaagatatgaatatttagaaatgtggatgagccaagtatagaagctcgtgactaattgcctacatcaaataactcgaagtggtcagaaaataattgtgctttatttagtctataattggatcttttgtaatagcaccagcacctcttagaaaagataaagtaaatagaaacagcaatacggggtcwctgatgttgcatcacatcagtgaggtgtagctaagtcacgtctgtgtccagtggagcatgtgcagcatggtctgccacattccccattaagcttccctgcttccataactactttattcatatgtgagacatctctaagtcccatagtataatcatttgagtttgttacactggcttagtaatctcaataaactaagcttcaaaggtatcttttgagaaagagatagagacatgtcagccaccatatgggtgaggatggagaaagaacattgtagcctttgcagagatttggggatttgcaaagcaggaatgtcagaagaacaacaactgtgaagatttagagttaattactgaaataactggctgaagaatatgaaccctgcaaagagtcaaaaaaaaaaaaaatgacagaataggtacaataaaacagaaatagatggaatcagagcaccaaaagctgaaacaaagataaagagtaggttct

SEQ ID NO: 687948 - DNA, 693 bp, Homo sapiens
ccccaaccaacctcatacatgtctaagatatgaatatttagaaatgtggatgagccaagtatagaagctcgtgactaattgcctacatcaaataactcgaagtggtcagaaaataattgtgctttatttagtctataattggatcttttgtaatagcaccagcacctcttagaaaagataaagtaaatagaaacagcaatacggggtctctgatgttgcatcacatcagtgaggtgtagctaagtcacgtctgtgtccagtggagcatgtgcagyatggtctgccacattccccattaagcttccctgcttccataactactttattcatatgtgagacatctctaagtcccatagtataatcatttgagtttgttacactggcttagtaatctcaataaactaagcttcaaaggtatcttttgagaaagagatagagacatgtcagccaccatatgggtgaggatggagaaagaacattgtagcctttgcagagatttggggatttgcaaagcaggaatgtcagaagaacaacaactgtgaagatttagagttaattactgaaataactggctgaagaatatgaaccctgcaaagagtcaaaaaaaaaaaaaatgacagaataggtacaataaaacagaaatagatggaatcagagcaccaaaagctgaaacaaagataaagagtaggttct

SEQ ID NO: 687949 - DNA, 953 bp, Homo sapiens
tgagctctgccattatctcccagccactattgtagggactgacagacaaagaaaataaaatatgtgttgaatgaaagcacacagtatagaggcaaaaccagagggttttttgagctagatggggaaactgaggccagagtagttctcaatggctcattccccaaaatgacagaactatttggatgtcaaaccaacctgtcctcactgctctctccctacaaagggctgcttctgtgtaacaaaatgaatttccccagggtctctggtctgctgcaggtggagcatgagtttccagatacaagatcttctgagtccttgatcattggagtagaatgctgcacagctctgcagattgagggagtaaaaccatgtggtggccgaaagaggttgctacatatacagactatctcagatcctcagcctcaattttccttcatctttccttccttcctttctttctctctttttctttcctttctttctttctctttctttctcttttccctccttgcgtccctccctccctcccttctctctctcgccctttttttctttgacagagtgtcactcctgttgcccagactggagtgcaatggcgtgatctcagctcactgcaacctcccgctttcgggctcaagcgattctcctgcctcagcckctcaagtagctgggattacagggatgcaccacctcgcctggctaattttctatttttagtagagacggggtttctccacgttggtcaggttggtctgaactcccgacctcaggtgatcagcctgcctcagcctcccaaagtgctgggattacaggtgtgagccaccgctcccagctctttcttttctttccttccttccctccgtccttccttcctctctccttccttgtttcttttctttctttccttccttcatttctctttcttttctttttctttctttccttttttcctt

SEQ ID NO: 687950 - DNA, 644 bp, Homo sapiens
ttttttgtagagacggggtttcactatgttggccaggttggtctcgaactactgatctcaggtgatccacccacactggcatcccaaagtgctgggattataggcgtgagccatggagccsggctaggatatgtacatattttttaattaagacggagtctcggtctgtcatccaggctggagtgcagtggtgtgatctcagctcatggcaacctccgcctcctgggttcaagcaattctcctgcctcagcctcctgagagctgggactacaggcgtgcgctaccacgcctggctaatttttgtatttttagtagagatggagtttcaccatgttggctaggctggtctcgaacttctgaccatgagtgatctgcccgccttggcctaccaaagtgcttgggattacatgcgtgagccaccgtgtccagcccagtagagggtttcacaaatcacaaggtggctatcatcagacaggacccaggacagggggaggggcaaccagattgccccttcctctacccctgcctaggccctggcggcatcctgtctcgggagtcactgtgttttgttcccttctccctgtcttgtcttcctgcctccccacccctaccctcatgtcccagacaaaagggctgtcagaaaa

SEQ ID NO: 687951 - DNA, 611 bp, Homo sapiens
ggtcaaagaagaaaagaaaacaatatctaaagaattaaagaaaagtttgagaatgatgtttcaccaaataaagaataccagtaaagagatagaaattagattttaaagaaacaactacattttaaagaaacaactacaactaaaataaatattaggatatcaaattcagaaatatgtttttaaaataatgaagtatcacataagtaaagttggtttaacattcggaaatcaatcagtgtaattcaccatattaagagattataggagagaaatcatattatgaacgcaaaagacaggagaaaggctttgacaagattaacakacatttgtgataaaaactcttttcaaactagaataaaaagctttccatatttaataaaggacatctgtaaaatatccactgcatattgtagttaatggttaaaaattaaccaattggacactttcttgcttaagaatggaaacaaggtaagaatgtatgttctcatcgcttctattcaatattgtactaaatagagtaatatttagagaactaaatatcgtactatgtttagcagtatctcttgtccctatcaactatacatcaatagcaacctctaagtcattataac

SEQ ID NO: 687952 - DNA, 611 bp, Homo sapiens
ggtcaaagaagaaaagaaaacaatatctaaagaattaaagaaaagtttgagaatgatgtttcaccaaataaagaataccagtaaagagatagaaattagattttaaagaaacaactacattttaaagaaacaactacaactaaaataaatattaggatatcaaattcagaaatatgtttttaaaataatgaagtatcacataagtaaagttggtttaacattcggaaatcaatcagtgtaattcaccatattaagagattataggagagaaatcatattatgaacgcaaaagacaggagaaaggctttgacaagattaacagacatttgtgataaaaactcttttcaaactagaataaaaagctttccatatttaataaaggacatctgtaaaatatccactgcatattgtasttaatggttaaaaattaaccaattggacactttcttgcttaagaatggaaacaaggtaagaatgtatgttctcatcgcttctattcaatattgtactaaatagagtaatatttagagaactaaatatcgtactatgtttagcagtatctcttgtccctatcaactatacatcaatagcaacctctaagtcattataac

SEQ ID NO: 687953 - DNA, 611 bp, Homo sapiens
ggtcaaagaagaaaagaaaacaatatctaaagaattaaagaaaagtttgagaatgatgtttcaccaaataaagaataccagtaaagagatagaaattagattttaaagaaacaactacattttaaagaaacaactacaactaaaataaatattaggatatcaaattcagaaatatgtttttaaaataatgaagtatcacataagtaaagttggtttaacattcggaaatcaatcagtgtaattcaccatattaagagattataggagagaaatcatattatgaacgcaaaagacaggagaaaggctttgacaagattaacagacatttgtgataaaaactcttttcaaactagaataaaaagctttccatatttaataaaggacatctgtaaaatatccactgcatattgtagttaatggtwaaaaattaaccaattggacactttcttgcttaagaatggaaacaaggtaagaatgtatgttctcatcgcttctattcaatattgtactaaatagagtaatatttagagaactaaatatcgtactatgtttagcagtatctcttgtccctatcaactatacatcaatagcaacctctaagtcattataac

SEQ ID NO: 687954 - DNA, 611 bp, Homo sapiens
ggtcaaagaagaaaagaaaacaatatctaaagaattaaagaaaagtttgagaatgatgtttcaccaaataaagaataccagtaaagagatagaaattagattttaaagaaacaactacattttaaagaaacaactacaactaaaataaatattaggatatcaaattcagaaatatgtttttaaaataatgaagtatcacataagtaaagttggtttaacattcggaaatcaatcagtgtaattcaccatattaagagattataggagagaaatcatattatgaacgcaaaagacaggagaaaggctttgacaagattaacagacatttgtgataaaaactcttttcaaactagaataaaaagctttccatatttaataaaggacatctgtaaaatatccactgcatattgtagttaatggttaaaaattaascaattggacactttcttgcttaagaatggaaacaaggtaagaatgtatgttctcatcgcttctattcaatattgtactaaatagagtaatatttagagaactaaatatcgtactatgtttagcagtatctcttgtccctatcaactatacatcaatagcaacctctaagtcattataac

SEQ ID NO: 687955 - DNA, 614 bp, Homo sapiens
tttttggaaccagtaagtatgggagtccacgattctcaggtattgattgaaaaaagagaaaggggcaagamattcattaaagaaaaaccacagatactgaaacatttgacacataaaagtaattaattgctggagactacaattcctggcaaacaccattattccagatgcaccatgctacccagcatgctacctgaatggcggtttttatccatcctgtcaccctgagcatctgtctcaacctgctgaggcacagacttccaccatgtgcatcaggaaacacctcactcatactgtcatataatgcaacagggaggcatagtctctctacaggtctctctctttacgttgtaccattctgttgggcaacaattgtcccaacaaccacacttaaatccagtggggaaaaaaaggttaacagtaaaaatttcttccacgtaattcaatttctcacaatagacagaaacagggggaaaatgtttgccctgttcaaagtactaaaactagataacttaaataatttaagccaataaataatattatattgtatttaacccattattcctcacctaccctcaaagtaggtatacaaaagactagtttgttattaatcc

SEQ ID NO: 687956 - DNA, 629 bp, Homo sapiens
cccactgctttccaaacccgctsccctacagatccaccccagcagaaaccgtggctccatcctgcttccaagaatgaccagaaaggccacccagacacgggtgtgtgctggcattagtccaggtaaaatgaccaatgtttactctgggaagatcagacgtgccccccgaagcaatgcaaggcccaaactgtcagtggcggttcactgaacgagcctcaaacctttagtccaagaggcagctcatgataaaagatgggagatggagagggaaagaaagatgagggctgggtacagcacaggcactgatttcagaaactggaaaaacagctgaacatcacagacactggggtgatgccaggagacagccttttggttagcaaatacaaagaaacagaattcaccagattcctttgccgctcctctggaagttcctgagtatgctgagacaggagctgaggaatccatgaagggagaagcttcctctgtactccccctaccttctccccaaagtaatctgcaaaggaatccacttcacaatcttaagagtcagcgattagctatcaggtcttataaattctatctcctggccgggcgtggtggctcacgcctgtaatcccagcactttggga

SEQ ID NO: 687957 - DNA, 607 bp, Homo sapiens
ccaaggtaaggaagttaaggaactggttaaaatctcttttagtgggtatctttattggaacatgagcctgacacttgaaatcagtgctaaagcagattacccaggcactctacacaggagccatttaggacaaataaatcatattttgtgcctctctctaccttaaaagcttgtgttttatagaaagagtcagcctaacaccaactttatgggtggttttcaargggatgaatatattacaaagaggattgagtggaagatggaggtttattccacctgctgtgacctgagaattgtccccctaattgttcacctgccagcacaggtccacgaaagatgttgatgagactaccagtttgagctgaccaactgagtgaagacatctggctattattacaaagcctagaaagtggttgctgttggtgacttatgtgatttatcgtaggcaatctgagtacagattggaggcatagatgtagaaaaatgttaatctgcaatttgctaggttagaactagaagccaaattgtgaataacaacattgataaagttagtatagagggcaatctgaatacagattggaggcatagatgtagaaaaatgttaatc

SEQ ID NO: 687958 - DNA, 607 bp, Homo sapiens
ccaaggtaaggaagttaaggaactggttaaaatctcttttagtgggtatctttattggaacatgagcctgacacttgaaatcagtgctaaagcagattacccaggcactctacacaggagccatttaggacaaataaatcatattttgtgcctctctctaccttaaaagcttgtgttttatagaaagagtcagcctaacaccaactttatgggtggttttcaaggggatgaatatattacaaagaggattgagtggaagatggaggtttattccacctgctgtgacctgagaattgtccccctaattgttcacctgccagcacaggtccacraaagatgttgatgagactaccagtttgagctgaccaactgagtgaagacatctggctattattacaaagcctagaaagtggttgctgttggtgacttatgtgatttatcgtaggcaatctgagtacagattggaggcatagatgtagaaaaatgttaatctgcaatttgctaggttagaactagaagccaaattgtgaataacaacattgataaagttagtatagagggcaatctgaatacagattggaggcatagatgtagaaaaatgttaatc

SEQ ID NO: 687959 - DNA, 607 bp, Homo sapiens
ccaaggtaaggaagttaaggaactggttaaaatctcttttagtgggtatctttattggaacatgagcctgacacttgaaatcagtgctaaagcagattacccaggcactctacacaggagccatttaggacaaataaatcatattttgtgcctctctctaccttaaaagcttgtgttttatagaaagagtcagcctaacaccaactttatgggtggttttcaaggggatgaatatattacaaagaggattgagtggaagatggaggtttattccacctgctgtgacctgagaattgtccccctaattgttcacctgccagcacaggtccacgaaagatgttgatgagactaccagtttgagctgaccaactgagtgaagacatctggctrttattacaaagcctagaaagtggttgctgttggtgacttatgtgatttatcgtaggcaatctgagtacagattggaggcatagatgtagaaaaatgttaatctgcaatttgctaggttagaactagaagccaaattgtgaataacaacattgataaagttagtatagagggcaatctgaatacagattggaggcatagatgtagaaaaatgttaatc

SEQ ID NO: 687960 - DNA, 1227 bp, Homo sapiens
ccaggaccaccaaatcagcgtcctgtggccccaaaggactcagagattgtctaatgggccaatccccttatcttcagctggggagaccgagcccagggagggcaacgtgcttgttcaggcttgcacggtgagctcatggccgagctttcagacggttactgcaccattcttactggtgtgcatctctgagttgatgagaagtgggtgtgtctgctgtaccacacagaaacccaggtctcagaacaagtgcctgcttccccccacctccactgctggggctaactcctggaagaggccttgtcctccccttctctggcttccctgtctctgcaccagcctcttcctcatggcccaactgaccagctgaatgaaggatattcactaccytccctagaatccaggtgtctggagattggggctcttgtaatgatagtgaaagctgctgtgattactattgtggccaacctttgtagaccacatgtagtcgttgtcacgcatcagatcatttaatcacttaatcccgcatcgatctttcaagggaggcactctagctattctcattgtacccatgaggaaattgaggcacagaaaggtggaggaccttgtccaagactgcacagccagcaggcaaccaggccatcccaacccagtgacgagtactaagcaggatggatcccatgtgatggtgctagccatacccccagtaaccacctctggctgcttgtggaatgctcagcatgtgcccagcacttctcatttgatcttggctgctcacaataaccctgtggcatatgttttatctccactttgcagatgaatgaacagaagctcagctagtaagcagaaggaccaggcctctatcagagctctggggggctctatgttaaacccatgcacttaatcatccactggtctggtgctctgaaactttacatcaccttaggatttgtcaaaatgtagattctgactcagtaggtctggcggcagggcctgagatgctgcatttcctttttcctttccctcttttttttcttttttcttttttctttctttcttttttttttttttttttgagacagagtctcgctctgtcgcccaggctggagtgcagtggcgtgacctcagctcactgcaacctccgcctcccgggttcaagtgattctactgcctcagcctcccgagtagctgggactacaggggtgcgccaccaccattgaggcacctggg

SEQ ID NO: 687961 - DNA, 1227 bp, Homo sapiens
ccaggaccaccaaatcagcgtcctgtggccccaaaggactcagagattgtctaatgggccaatccccttatcttcagctggggagaccgagcccagggagggcaacgtgcttgttcaggcttgcacggtgagctcatggccgagctttcagacggttactgcaccattcttactggtgtgcatctctgagttgatgagaagtgggtgtgtctgctgtaccacacagaaacccaggtctcagaacaagtgcctgcttccccccacctccactgctggggctaactcctggaagaggccttgtcctccccttctctggcttccctgtctctgcaccagcctcttcctcatggcccaactgaccagctgaatgaaggatattcactaccttccctagaatccaggtgtctggagattggggctcttgtaatgatagtgaaagctgctgtgattactattgtggccaacctttgtagaccacatgtagtcgttgtcaygcatcagatcatttaatcacttaatcccgcatcgatctttcaagggaggcactctagctattctcattgtacccatgaggaaattgaggcacagaaaggtggaggaccttgtccaagactgcacagccagcaggcaaccaggccatcccaacccagtgacgagtactaagcaggatggatcccatgtgatggtgctagccatacccccagtaaccacctctggctgcttgtggaatgctcagcatgtgcccagcacttctcatttgatcttggctgctcacaataaccctgtggcatatgttttatctccactttgcagatgaatgaacagaagctcagctagtaagcagaaggaccaggcctctatcagagctctggggggctctatgttaaacccatgcacttaatcatccactggtctggtgctctgaaactttacatcaccttaggatttgtcaaaatgtagattctgactcagtaggtctggcggcagggcctgagatgctgcatttcctttttcctttccctcttttttttcttttttcttttttctttctttcttttttttttttttttttgagacagagtctcgctctgtcgcccaggctggagtgcagtggcgtgacctcagctcactgcaacctccgcctcccgggttcaagtgattctactgcctcagcctcccgagtagctgggactacaggggtgcgccaccaccattgaggcacctggg

SEQ ID NO: 687962 - DNA, 657 bp, Homo sapiens
gcttgagcccacctcaggtctgggtgactgaaagaggagggctctgtccatgggccagagtgggagggaggtcccagcagcaccagacagagaggaaaggccagacagaccttttctggagtcaggagctgaggaggcatggaggaggagtgagatgcctccctgccctctctaactaaccccctcctgcacatgggggttctggtctgtagatggtgagctgggcaggttgctctctctgcctctcctggcctyatttctgtactttgaaatatgacagcatgaggctaagccaggagttctcaggagatgacttagaagcacctgggagcattacaattctgattcctcgacccctctgatctaactgctctgaggtcctggggtcaggacctagcatttggtcccctgagccctgcctgattctaatgggcagccaggtgatgggtagtggaggcagaaggctggcggacctcctacaacccctccagaaggctaagggggcacccagggcccttcctgctctgtcaggctgcagtttgggggaagccactgtgcttgagtttttatagtgctaggcactgagtggcgttcatttagaccccagacaggcgcttactatccccactgtgggaaggaagctgaagcccagaaagg

SEQ ID NO: 687963 - DNA, 666 bp, Homo sapiens
atactcaaatactgaataaatgagtgaggccttgactatttcaggcacacatagatacccagggctctggtggtcccaagcagcctttacatgacatcccatggaagagcccctcctcttggtactttttgggtccttacgcatcttggcccaagattgtgaggggtgagaaaccagggggattatgagtggagagctgatgccgtgaaaaagcactggactccgagccaagaagctgaggttcaaactctggcaccgcatgatcttggagaagtaactgcctccttcgaaggctgtttcctcaccttaaaatgggaataatagtgactacttaatagggactttgtaatgatggagcgagaatagtacataaaatgcttactacatgtcttaagagtccagacaggtgacatgaggttccatctcactcccttgcccccgagaaggagagcacctccactaacaatccaggccaagaggcttaaggaattttaccagtatgcattctgcaagaaagtatgagacarcggccgggtgcggtggctcacgcctgtaatcccagcactttgagaggccgaggcggcggatcatgtggtcaggagatcgagaccatcctggctaacatggtgaaaccccgtctctactaaaaatacaaaaaaaaaaaaa

SEQ ID NO: 687964 - DNA, 666 bp, Homo sapiens
atactcaaatactgaataaatgagtgaggccttgactatttcaggcacacatagatacccagggctctggtggtcccaagcagcctttacatgacatcccatggaagagcccctcctcttggtactttttgggtccttacgcatcttggcccaagattgtgaggggtgagaaaccagggggattatgagtggagagctgatgccgtgaaaaagcactggactccgagccaagaagctgaggttcaaactctggcaccgcatgatcttggagaagtaactgcctccttcgaaggctgtttcctcaccttaaaatgggaataatagtgactacttaatagggactttgtaatgatggagcgagaatagtacataaaatgcttactacatgtcttaagagtccagacaggtgacatgaggttccatctcactcccttgcccccgagaaggagagcacctccactaacaatccaggccaagaggcttaaggaattttaccagtatgcattctgcaagaaagtatgagacagcggccgggtgcggtggctcacgcctgtaatcccagcactttgagaggccgaggcggcggatcatgwggtcaggagatcgagaccatcctggctaacatggtgaaaccccgtctctactaaaaatacaaaaaaaaaaaaa

SEQ ID NO: 687965 - DNA, 647 bp, Homo sapiens
ttagcccagcaggttggtgtgttcctgtacttccagcttctcaggaggctgaggcaagagaatctcttaaacccggatggcagaggttgcagtgagctgagatcgtgcccctgcactccagcctgggtgacagaacaagactccatatcaaaaaaaaaataaaaagaaggagaagaagaagctttttgtcgcttcctgtacagaccctggtatttcccaacttttgctggtgtgattccctctaccaggatttcctgccccagcctttgcctctaggactcagcttagcggtcatcttctccaagaagctatccctcccctgtactctatctttgtcattgaaacaaccaatgccatgacatcattcgaactctgaaacgtaagtaataagactaaggagaaaaggaaggagagggcttattggmctgtatgcctccaatgcctagtacagagcccagcctaaggaagttctcaaaaggatggttattgaccaaaaatatgtgaatccatcctgagggtgtttgcaaatagtgaaaatgaggagaccagagtatgcctgccaatgttggttttctgttgtccgatgtccttcaaaaatgaccaccatcatttttttttattattacagccttggaaagaaggcctgc

SEQ ID NO: 687966 - DNA, 600 bp, Homo sapiens
tatatattcattttgagtaataacaattacagctaataacaattacagctaaamtgtattgagtatctgctctctgcctggcattgttttaagtcccttttatgtagtatctcatttaatatctcatgtattaagtaatactcctgtctttattttacagatgagagaggctaaatgacttcggggtggcagagcattcctgctgcagagccaattcctggaactgccaccaccatgccacacattgctcattatttcagagcacctgatggtacatgacacagccttgtggagctagactgtatcctcaggggaatgagactggtaacacaattctaaaatagctataaaattcaatgtcttttatagggtatttttagtgtggtgaaattattctgcatgatactgtaatgatggagataggacattatgcatttctcaaaacccatacaaccatacagcaaaaaaagtgaaccctctcctggttaacacgtgaaaccccatctctactaaaaatacaaaaaattagctgggcttgctggcgggcgcctgtagtcccagctactcgggaggctgaggcaggagaatggcgtgaaccca

SEQ ID NO: 687967 - DNA, 600 bp, Homo sapiens
tatatattcattttgagtaataacaattacagctaataacaattacagctaaactgtattgagtatctgctctctgcctggcattgttytaagtcccttttatgtagtatctcatttaatatctcatgtattaagtaatactcctgtctttattttacagatgagagaggctaaatgacttcggggtggcagagcattcctgctgcagagccaattcctggaactgccaccaccatgccacacattgctcattatttcagagcacctgatggtacatgacacagccttgtggagctagactgtatcctcaggggaatgagactggtaacacaattctaaaatagctataaaattcaatgtcttttatagggtatttttagtgtggtgaaattattctgcatgatactgtaatgatggagataggacattatgcatttctcaaaacccatacaaccatacagcaaaaaaagtgaaccctctcctggttaacacgtgaaaccccatctctactaaaaatacaaaaaattagctgggcttgctggcgggcgcctgtagtcccagctactcgggaggctgaggcaggagaatggcgtgaaccca

SEQ ID NO: 687968 - DNA, 600 bp, Homo sapiens
tatatattcattttgagtaataacaattacagctaataacaattacagctaaactgtattgagtatctgctctctgcctggcattgttttaagtcccttttatgtagtatctcatttaatatctcatgtattaagtaatactcctgtctttattttacagatgagagaggctaaatgacttcggggtggcagagcattcctgctgcagagccaattcctggaactgccaccaccatgccacacattgctcattatttcagagcacctgatggtacatgacacagccttgtggagctagactgtatcctcaggggaatgagactggtaacacaattctaaaatagctataaaattcaatgtcttttatagggtatttttagtgtggtgaaattattctgcatgatactgtaatgatggagataggacattaygcatttctcaaaacccatacaaccatacagcaaaaaaagtgaaccctctcctggttaacacgtgaaaccccatctctactaaaaatacaaaaaattagctgggcttgctggcgggcgcctgtagtcccagctactcgggaggctgaggcaggagaatggcgtgaaccca

SEQ ID NO: 687969 - DNA, 1193 bp, Homo sapiens
ccctctgaagagtcggtgtatttccacatctaaattaattataatccattgactttgcagagaaccaagttataaactttgaattagccccaagtgttaacatatttttttactttttcaccttgatttctcctttataattaattttaaaattaattacattaattttatgcattatatttgtcctttttataagtgacctcaagccctttagtgaaagaggtggagagtgataaagaattagaactgaaaaaaaaaaaaccctcactttattaaagacaataattttcctggttgtgaggtgctatagtaatgcaagatagtaccactgggggaaactgagggaaggatacatagaatccttatgaattatttcttacaatgcgtgtgaatctaattatctcaaggtaaaaaggtatatgtgtgttttttaatctacaataaccctccaaagagagttgactactactacaggagctagaagtctcttctaaagacttgaaaaattccaagattctctttcaaaccaattacctcatgaagaaaatttcaatttaccaggcaatagaaatcattggggaaaaaaygcttggaaccatagtcagtagacattttttatggataagcaaaaaaaaaaaaaaaaggcaaaggattaatacctaaagaaagctaggttggcatggtggtggcttatgcctgtaatgtcagcattttgggaaaccaaggctggtggatcacttgagctcaggagttcaagaccagcctgggcaacatggccaaaccccatctctaaataaatataaatttttttaaaaaagaaagctagcttgcttccctttttctttctttttttccttccttttttttttttgaaaaacatattcactaaacatctcctattgctaaagactatggtaggcaattgataaataaaacagaaagggtgtctgtctgcatagtgcttatattttaatggaggagagggtaaacaagcaaatcaataaaacaattgcaattgtactatgtgccatgatgaaaactaagagagtgctaagatgagaatgatgtaggtgaggagccactctagccaaggtggccaagaagcaagaagagctctttgaggaaatggagtaggagaaatgactagtgtcctaaaaatcaggttgggatcattccaagcagaaggaatagaa

SEQ ID NO: 687970 - DNA, 696 bp, Homo sapiens
gatcaattagtgtgacaataactaagtcttgaagaatggataattgcctagttataatgtggcactcttgctgtattaatccactgcaattaaacaaatagtgcacaaggaaaaaagatgtgcagatgttcctgttaaatctatttaacaagaaagcgtcaaggtcaatttcctgtcttattacttaaatgacaatggtggattgtgttctccttatcaggagacctccagtttttaaacatctatccttagttttcactgggtctgatgaaaagggcttaaaaatgctcttgaggttttatgaaagaaatgatacaaacataatgttctctaactttcacaatggacaagtctcgccacaataaatttggagatgcaaagtataaaatgtgttgatggcaaataaataattctcatttctcataggaatagaaatttagttactatgtaccactagacagtttaaattacctgcaactttttcctagactactatatgaagaatgaggtcaaaggagttagccaaggcgaaagcacacccttagaatgttgctcggggtacacagtgcgcaggcgacagtcaagagcacctcaggcctgaaaagaacagcttctcccaagatttcagatcaccaattaaaagccccctaaaagatatttttaycattccttttcatcttatatttctcaattttc

SEQ ID NO: 687971 - DNA, 971 bp, Homo sapiens
ctgccttttaaactctcttttaaacttttatttttattttatttccctttttttagaggaaggttctcactatgttgcctaggctagtcttgaacacctggcctcaagcgatcctcctgtcttggcctcccatagtgttgggattataggtgtgagccactgcacccagccagaaatgccatttttatcactacccaaggacctccattgctctctggaggcctgttgcattctcagccacctttaagtttcacttagtttcatgacttaatgccatccgacatcactcaaatgatcaaactttattttacttttcaatgtaagtctcaggccctcttggatatttttactaattgacaaggatagtaactggcttcaacaaagtcttctaacttgtgaaatgcttgcaaattacaggataatctcttttctgagtagcccagtgttatctgrtatttagcatgcctgcttaactgcctgatgaggcattactgtagattattgctcagaaaaaaaataggcaaaacaaagttagcagtatgaaaaaatagacgtgtatactctttgatcccagatttatccttaggaagtaatcgaggatgtactgtccatactagtgaaaaaaaaattgccaacaacataaatgttcaataatataattttttaaaaaaattatggtacatcaatataatggaattcaattaaactttataaatggtgttggagaaaactacttattgatataaaaaagcaaagcatttattcagtgaaaaaacatgtaacaaaattatgtacaatatgatcccattttgttaggaaaaaataactatctaaaagtatactggctgggcatggtggctcacggctgtaatcccagcactttgggaagccaaggcgggtggatcacctgaggtcaagagttcaagaccagcctggccaacagggcaaaacctcatctctactaaaaatac

SEQ ID NO: 687972 - DNA, 971 bp, Homo sapiens
ctgccttttaaactctcttttaaacttttatttttattttatttccctttttttagaggaaggttctcactatgttgcctaggctagtcttgaacacctggcctcaagcgatcctcctgtcttggcctcccatagtgttgggattataggtgtgagccactgcacccagccagaaatgccatttttatcactacccaaggacctccattgctctctggaggcctgttgcattctcagccacctttaagtttcacttagtttcatgacttaatgccatccgacatcactcaaatgatcaaactttattttacttttcaatgtaagtctcaggccctcttggatatttttactaattgacaaggatagtaactggcttcaacaaagtcttctaacttgtgaaatgcttgcaaattacaggataatctcttttctgagtagcccagtgttatctggtatttagcatgcctgcttaactgcctgatgaggcattactgtagattattgctcagaaaaaaaataggcaaaacaaagttagcagtatgaaaaaatagacgtgtatactctttgatcccagatttatccttaggaagtaatcgaggatgtactgtccatactagtgaaaaaaaaattgccaacaacataaatgttcaataatataattttttaaaaaaattatggtacatcaayataatggaattcaattaaactttataaatggtgttggagaaaactacttattgatataaaaaagcaaagcatttattcagtgaaaaaacatgtaacaaaattatgtacaatatgatcccattttgttaggaaaaaataactatctaaaagtatactggctgggcatggtggctcacggctgtaatcccagcactttgggaagccaaggcgggtggatcacctgaggtcaagagttcaagaccagcctggccaacagggcaaaacctcatctctactaaaaatac

SEQ ID NO: 687973 - DNA, 619 bp, Homo sapiens
aaaaaaaaaaaaattaaaaaattaaattaaaagcgggctgggcgcattggttcagggccgggcacggtggctcaagcctgtaatcccagcactttgggaggccgaggcaggcggatcacgaggtcaggagatcaagaccatcctggctaatgtggtgaaaccccgtctctactaacaatacaaaaattagctggatgtggtggcaggtgcctgtaatcccagctattccagaggctgaggcaggagaatcacttgaacctgggaggcagaggtttcagtgagtccagatcatgccactgcactccagcctgggtgacagagcgagattctatctcaaaraaaaaaaaaaaaagcaacagaagcaaatgagagtgcctgggagtggtcattgtggggccttcccgtttgtgtgacccaggtcatgtccctccctaagccctggtctctcttgcctcctgcagggctggtgaattaccagatctccgtcaagtgcagtaaccagttcaagttggaagtgtgtcttttgaatgcagaaaacaaagtcgtggacaaccaggctgggacccagggccagctgaaggtgctgggtgccaacctctggtggccgtacctgatgcac

SEQ ID NO: 687974 - DNA, 680 bp, Homo sapiens
agtggaaacaatccaacactaacaaactatagtgatcaaaagtattaacttttaaagaaaaacaaggacaattcataaaagtagaactaccatttgatccagcaatcttactggttatctacccagaggaaaagaagtcattacacaaaaaagatacttgcacatgcacgtttataacagcacaattagcaattgcaaaaatgtggaaccagcctaaatgcccgtgaatcaatgagtgaataaactgtggtatatatttatgtgtgtgtgtgtgtgtgtgtgtgtgtgtgtgtgtgtgtgtgtgtatgtatatgtatatatatatgcatatgtatatatatatatatatgcataaatacatatatgtratggaatactactcagccataaaaaggaatgaattaatggcattcataataacctggatggaattggagactattattctaagtgaagtatctcaggaatggaaaaccaaacattgcatgttctcactcttaagtgggagctaagctatgaagatgcaaaggcataagaatgatacagtggactttggggactcaagggaaagagtgggaaaggcatgaggggtaaaagactacaaattgagttcagtgtatactgctcgggtgatgtgtgcaccaaaatctcacaaatcaccactaaagaacttactcatg

SEQ ID NO: 687975 - DNA, 680 bp, Homo sapiens
agtggaaacaatccaacactaacaaactatagtgatcaaaagtattaacttttaaagaaaaacaaggacaattcataaaagtagaactaccatttgatccagcaatcttactggttatctacccagaggaaaagaagtcattacacaaaaaagatacttgcacatgcacgtttataacagcacaattagcaattgcaaaaatgtggaaccagcctaaatgcccgtgaatcaatgagtgaataaactgtggtatatatttatgtgtgtgtgtgtgtgtgtgtgtgtgtgtgtgtgtgtgtgtgtgtatgtatatgtatatatatatgcatatgtatatatatatatatatgcataaatacatatatgtgatggaatactaytcagccataaaaaggaatgaattaatggcattcataataacctggatggaattggagactattattctaagtgaagtatctcaggaatggaaaaccaaacattgcatgttctcactcttaagtgggagctaagctatgaagatgcaaaggcataagaatgatacagtggactttggggactcaagggaaagagtgggaaaggcatgaggggtaaaagactacaaattgagttcagtgtatactgctcgggtgatgtgtgcaccaaaatctcacaaatcaccactaaagaacttactcatg

SEQ ID NO: 687976 - DNA, 680 bp, Homo sapiens
agtggaaacaatccaacactaacaaactatagtgatcaaaagtattaacttttaaagaaaaacaaggacaattcataaaagtagaactaccatttgatccagcaatcttactggttatctacccagaggaaaagaagtcattacacaaaaaagatacttgcacatgcacgtttataacagcacaattagcaattgcaaaaatgtggaaccagcctaaatgcccgtgaatcaatgagtgaataaactgtggtatatatttatgtgtgtgtgtgtgtgtgtgtgtgtgtgtgtgtgtgtgtgtgtgtatgtatatgtatatatatatgcatatgtatatatatatatatatgcataaatacatatatgtgatggaatactactcagccataaaaaggaatgaattaatggcattcataataacctggatggrattggagactattattctaagtgaagtatctcaggaatggaaaaccaaacattgcatgttctcactcttaagtgggagctaagctatgaagatgcaaaggcataagaatgatacagtggactttggggactcaagggaaagagtgggaaaggcatgaggggtaaaagactacaaattgagttcagtgtatactgctcgggtgatgtgtgcaccaaaatctcacaaatcaccactaaagaacttactcatg

SEQ ID NO: 687977 - DNA, 680 bp, Homo sapiens
agtggaaacaatccaacactaacaaactatagtgatcaaaagtattaacttttaaagaaaaacaaggacaattcataaaagtagaactaccatttgatccagcaatcttactggttatctacccagaggaaaagaagtcattacacaaaaaagatacttgcacatgcacgtttataacagcacaattagcaattgcaaaaatgtggaaccagcctaaatgcccgtgaatcaatgagtgaataaactgtggtatatatttatgtgtgtgtgtgtgtgtgtgtgtgtgtgtgtgtgtgtgtgtgtgtatgtatatgtatatatatatgcatatgtatatatatatatatatgcataaatacatatatgtgatggaatactactcagccataaaaaggaatgaattaatggcattcataataacctggatggaattggagactattattctaagtgaagtatctcaggaatggaaaaccaaacattgcatgttctcactcttaagtgggagctaagctatgaagatgcaaaggcataagaatgatacagtggactttggggactcaagggaaagagtgggaaaggcatgmggggtaaaagactacaaattgagttcagtgtatactgctcgggtgatgtgtgcaccaaaatctcacaaatcaccactaaagaacttactcatg

SEQ ID NO: 687978 - DNA, 658 bp, Homo sapiens
caagtctccttctccctggggtcccccatgccttcttctgcactttgacctcttcagcttttagttgattaaccctattttcaaaatagcatggctatcttgcacttcctgattttttttttttttagtttttgtcattttctatagatgccccccaacaggaggtgaagattttaccttttttcttccgttgtccccactgtatcatttttataccttagatctcgcaataagaatttttttcttgtttttttgttgtttttttcttgtgaatactaatacatccatattagtatttacattattatgattatgtaaatgcttttcacagcaggagccacatggtaaactgtgatcacttttcctkttcctatttttgtttttctctactttttaagaatattttcagagttagctgtcttgtttcttttgtttactttttcaccaatcgtctaattctgtcaagaccttcagacactttaggtgttctatccattttatcttcttaagcgtccggtctgaactggttgtttttgacatccggttttatggcttccttcctaggttctcccttcacctctcaccatgttggatttcctgtctcctgtattccatttcttgctctttcttggtccattccctcatttttgtggtgtta

SEQ ID NO: 687979 - DNA, 658 bp, Homo sapiens
caagtctccttctccctggggtcccccatgccttcttctgcactttgacctcttcagcttttagttgattaaccctattttcaaaatagcatggctatcttgcacttcctgattttttttttttttagtttttgtcattttctatagatgccccccaacaggaggtgaagattttaccttttttcttccgttgtccccactgtatcatttttataccttagatctcgcaataagaatttttttcttgtttttttgttgtttttttcttgtgaatactaatacatccatattagtatttacattattatgattatgtaaatgcttttcacagcaggagccacatggtaaactgtgatcacttttcctgttcctatttttgtttttctctactttttaagaatattttcagagttagctgtcttgtttcttttgtttactttttcaccaatcgtctaattctgtcaagaccttcagacactttaggtgttctatccattttatcttcttaagygtccggtctgaactggttgtttttgacatccggttttatggcttccttcctaggttctcccttcacctctcaccatgttggatttcctgtctcctgtattccatttcttgctctttcttggtccattccctcatttttgtggtgtta

SEQ ID NO: 687980 - DNA, 658 bp, Homo sapiens
caagtctccttctccctggggtcccccatgccttcttctgcactttgacctcttcagcttttagttgattaaccctattttcaaaatagcatggctatcttgcacttcctgattttttttttttttagtttttgtcattttctatagatgccccccaacaggaggtgaagattttaccttttttcttccgttgtccccactgtatcatttttataccttagatctcgcaataagaatttttttcttgtttttttgttgtttttttcttgtgaatactaatacatccatattagtatttacattattatgattatgtaaatgcttttcacagcaggagccacatggtaaactgtgatcacttttcctgttcctatttttgtttttctctactttttaagaatattttcagagttagctgtcttgtttcttttgtttactttttcaccaatcgtctaattctgtcaagaccttcagacactttaggtgttctatccattttatcttcttaagcgtccggtctgaactggttgtttttgacatccggttttatggctkccttcctaggttctcccttcacctctcaccatgttggatttcctgtctcctgtattccatttcttgctctttcttggtccattccctcatttttgtggtgtta

SEQ ID NO: 687981 - DNA, 1304 bp, Homo sapiens
cactcactcccatccctccaagtccccactgctcatcattccacactcaacttccatgtgtacatgttacttagcccccacttaggagtgagaacacgcggtatttgtgtgtccgagttgtttcacttaagataatagtctccaggccaaggcaggcaaatcacctgacgttgggagttcgagaccatcctgaccaacatggcaaaaccccgtctctactaaaartacaaaaattagccgggtgtggtgggtgggcacctgttatcccagctacttgggaggctgaggcaggagaatcacttgaacctgggaggcggaagttgcagtgagccaagattgcaccactacactccagcctgggtgacagaatgagactccatctcaaaaaaaagaaaaagataatggcctccagttccatctttgttgcttcaaaagatgttatttcagaatacatttatttttgaaaagagacttagaagttatcctttgtgggcagaggattaagataaaggccactcataaaatgagaccttcctttttcaattagaatgatgccatccaggagtcacagaagagaagtggcagcatttaaagacctgaagcaagttgggcacagtttctgtaattggcagcagagcacaagtggtaattagaaatatgtgaaataacatttgatggaagttatttaatcattggggtctctaagatcaaaacaatgagtaactctatggtcctacctgctctgtgtgattgatcatgctgtgggtctagcaaataggactcatttgagtcattattttaaaaaaatcacagtcccttactcaattccaaggcctgagccaactcatagacccagagcccctggaacaaagggaaaaccaggtaaacactgagtaagaatagtaagataacacaaatgtataccgagaatcttcttccttgccatggccaagaggactagagaccagagtaaatgatgattaagaaaatgaaaataccagaaccattcagaaataattagactctggctgtgagtaagcactagttcctgggaaattctagagtgcactatgatccatttgtcaaagtgtgcacttagaaaatttccttcccatctctgtaacttcggacttcgttaatttagaggttttagaattcaagaggaaaatacttctaacagggggttgcagcaacacttccattaagctgaaaatagaaaattccagctgatcattttgacctcttcatgctgctggaaaacaaccaaaaagttattgcgttggttgaggtaattgattctaacg

SEQ ID NO: 687982 - DNA, 1827 bp, Homo sapiens
aaggcagggctccctcagggggagcagtggaggcaggcagatgccgggcacattgtccacccacgtttttctcccacaggagcagcagcaatatccttcattggggtgtgtggcagtgcctggtcacccattgcctgcctggcccagcagtggccgtggcagtggcagcagtggtgatgacagtgggggccccaggacagaatgcagacctacgcaaggctgtaatctcagaagaacastgggcagcagccaaaattccagggtgcaggcagagcagctgtgctccagggctgtcactggtgagccttgccccactcccttggtgggtgcagtgaagagtgacagctgtgggcatgtggcccactcgaacatctcccctgcagagccagccatggatttcactgctaggtgcacagaggtgcccaggctccatgcttccttgcaagcctggtggcagcagtggtagataatatctataattcagatagttttgtggtagaaaaaaaaaaactgacctgtttattagcaattactctaatacaattaaacacaatgttccttatggccatctgctaaaatatcattattgtaaaatattttaaaattttgttttatcacgtaattgttcaaacagttcttaagtattagagatatattaaaatatcttcaaatttaaaaaaataaaaatatggcccgggcgcagtggctcacgcctgtaacgccagcactttaggagaccaaggcgggcggatcatgaggttaggagttcaagaccatctggccaacatagtgaaaccccgtctctactaaaaatacaaaaaattagccgggtatggtggctaatatccccatatccgctacagtggaccaagctaaaattatcattcaattcttacccttatcatgtcatatgtattacatgtagagatgtttgtatattactacatataatattttatcaagaatttattatgtttttctgtgagtgtattagttccaccagttattccacccttacttgaagacagaaactgaatgttgttcgctttttgaagttttaataaatgggattagatagtatgcatatttttaatctggttgaatttatgcaacattatatttgtgatgtttatccatctcattacatgtacatataatttgttcattattcagcaataatacatttggtaatatgatataaaaataaaaatgtctgaagctatagttattctttaaccttttttttttttttttttttttttgatgagtactgagaccagacaatgcacctgagcaatgttactgaagaaaatgagctcactcattaccaagtttaggacccagctgctgctactctacttttccaggaattaggtaagttcagattttgctttggtgactctcatttctaccaatcccagagcctagtgtcttacttctacaggtgacatgacagtaataaatccagagggaaatgaaatgatagcatttattctttatacccatgtctcagggacaaaaattcatatacacagaatgactccaagacaaaccttggtatctgtttcttagcttcattactgatgagtactcaagtctcaggtggaaagttggaggaggcagaattttatcaatgaggtctataatttttgcatgattttgctcttgtgtctcactgaattataactaactggtaggtgtttctacataccatatattatgaacacataaacatatttgtaagaaaatgtgtgattttttaaatgttatactctaattgcagttttactcgactatttctcattttacaacaaattgttcacttat

SEQ ID NO: 687983 - DNA, 616 bp, Homo sapiens
atcctcattagcatctggtttaagttcattttcctctgcacagcctttggggctattttccaaaaggctttcaggcaaatatttgattaactcatcagcttcttatttaaaagaagtttgacctgggcttggtagcacacctgtagtgccagctatttgggaggttgaggtggaagaatcacttgagcttaggagtttgagaccagcctgggcaacacagcaagatctctgtctctaaaaaaaaaatgataataataaagataataaataaaagacgtttggcttatcataatcctgcttttaatcacagtacatgagttcttcataccttgcatttgcatgcttttgacaaacctttctgctttcacatactctttctttcttctatataatccagtcatatatgcatgaytattaagtaaaagtgaaaactgagaccaagatcactaactatttggtggaaaaaccaagactggaacccaggaacctcagctcgtcacccttgggtctctacactttaccctgaggcctcttaacagccccctgggattctgtcatctaagaatccattttggcctccaggactttattttcttaacacagaagcatggcataa

SEQ ID NO: 687984 - DNA, 630 bp, Homo sapiens
cagcagcttcttgtttcaaatgaagttttaagcagaatgcctatgtgtgagaaataaaagcagtagcttgttagtgcaaatgtgttttatcttttacgttaaaagttcttaacatttggctgggcacagtggctcacgtctgtagtcctagcacttcaggaggccaaggcaggtggatcacctaaggtcaggagttcgagaccagcctggccaacatggggaaaccctgtcgctactgaaaatacaagaattagctgggtgtggtggygcatgcctgtaaacccagctactcgggaggctgaggcaggagactcacttgaacctgggaggcggaggttgcagtgagccaagatcatgccactgtactccagcctaggagacagagtgagactccatcttaaaaaaaaaaaaaagaaaaaaaaagttcttaacatttactttttacaatcaatgaagacccaaatgtcaatgtgttattcatttccaatgtataaaattttattatatatttgcatgtgtgggaggttttcaatcactttttaaaaattatttataattgatacataataattatacatatttatggggtacagagtgatattttgatacatatatgcaatgtgtaatgat

SEQ ID NO: 687985 - DNA, 658 bp, Homo sapiens
aaatgcatatattaccacccagtgactctttctccttgacataatcaacaaaattgacagagatgtgaaaagaaagctttctcatcgggtgattgaatggtccatgrgggcaacccctaaaatcatctcaaatgtctccacggtccccggtctgcccttggggaaacacaccaaaatgctgctgaggcccggcctgcctcccacccttgacctgacggagttctcattaaggagacaggagaggcggggagtctaggaaaccagtgcggcacaaaggcaaggaccagaagagatgaacaaagagaagaacaagtatctgcaaggccccagggaaggatggagaagagaaagggaaaaagcacagctggagaggacctgtggactggatgggcgcagaacactgctggcactggcaacatgacccaggcagctagctgatgggttgcacctgggtgccagtgccaaccaatagtggctgacgcgagtgttctgcgatggatgctcagtgggagggagggccacgagtgattagcaatgacatttcagccacagtgggatcccgaagcgggctgtaaatgacatgtatgttattctgttcagcccaagtgaagaacggacatcaagtgagctcaggtcccaggtgacaggaagtgccact

SEQ ID NO: 687986 - DNA, 586 bp, Homo sapiens
ttgtgtgtgtgctactgttcatcacattgatgaatagccttgtgctatctctggatatatccattggttacattcacaaacatggaagccttggattgaaggataggtacatttaccctaacccagcctcctgtgaggcctgttacagtctcaccagtgagggtgttactgtgttgtgagggaacttgccatggcccaggcagccttggacattgtcatttaaaaacatctctgtggctacactttgggaggctgaggccgaggatctcttgaggacaagagttccagaccagcctggtctatgagtatagtgagaccccgtatctacaaaaattaaaaaatagctgggtggggtggtatgcacctgtagtcccagctactcaggaggctgaggtgggaggattgcttgagcctaggaaattgaggttgcaatgagctatgatcacgccactgcacttcagcttgggtgacagagcaagatcttgtttcatgtatttataaataaaaaaataaaaaatgaaaayaagtgggagtctctgtcattttctcattacttgtaggtactcttcatgtattccagatctta

SEQ ID NO: 687987 - DNA, 480 bp, Homo sapiens
gtctaaagggctaaaaagaaggtacctctccatcctgtctcctcgaggccaggcagcacatgtgcagttaagaggcctcctggatccattgtcctcctgttgcttttcgttctaagtgatccaaactctattgctgatagggaataaaagcagggcaggctagtagtgggcaagtgctttgatggagcgtatctccaagcagggcccaagtttaggaggaggaagacctgayacaatgaatgaacagtgcgtcctcccaacccaaccaagaagtgtaattgtgttccgtctttaaccctggcatggaatggggagggaagaggcatggacatttattacatagtgcacattatctacattctctgcatgtgacccagatgtcagcccttccgcttcctgcgaaggttacctctaatgcacgttgccccaggccctgctgagctagttcctcaccgcagctacttaactcaccatgaattc

SEQ ID NO: 687988 - DNA, 681 bp, Homo sapiens
tgttgataaacacaatgaagctaatacggtaaggttatgtgatacacaatagtcagtgggaccagctgttgtagcaggtttctctaaaatgcagcaacattttagctgaatcccaaataatgaaaagtaggtaaacatattgaaatttgtggaatgagtttcaggaagaattaaaagcaagtccaaaggsactgaggtttcaagtcttggtgtgttttaggaatgtctttgtgactgaagagtagtggacaaaaagggaataggaaacaaatgaattcagaaaaaaaaaaaaaaaagacagatttgggccatagaagaccttggaggccatagaaataaattttgacttatattgagtgtaatacaaaatatttaagaattgtaagcaggcctgtattataatcagatttacattaacaaaatgattctattcatttgtgaagaatggattatggaggggcagtaggggaagcaataggtccaagttggtgacttcagcaatattccaggtgagaaagactgtgccttaggctatgccagcaatagtgaagatgaagaaaactgacaatattattgagatcgaatccatagttataatgcagatattgaagggatatataaaataaattaatgattttcactaagtttgtaggcttagaaaatgagtggtacggccaggca

SEQ ID NO: 687989 - DNA, 646 bp, Homo sapiens
tacaccattgcactccagcctgagcaaaaagagcaaaaccccatttcaaaaaaaaaaaaaaaaaaaaaaaaaaatgagtggtaccatttactgtgataggaaaaccttggaggtatttctgttagggaaaacatgtaatatttgagaaggaaccgtcaagacaactagaaagatattagttatggtttttattctatcttaataaacagtgagctaagaagtaagtcacaaaattacattgatcttagtttcattatgtgaacttgttcacatggttgtaraatttgcttccaaatctaaagtcttataatattaaaaaattgaataaattacaaattcccccaataaagccctacacatatttattttatatgatcacacatatttattttatataatcatctgtttcttagaaattaaaaatatgctttttctgatattttaatgtgtgagttatgtgctttcaaaaatctcattttgtgttcatgcgtggtaccatgttattgaataataaatcactatcaattattaactaaaattttgacaaaataaattacaatccatgttacatttttatgccaaataaaatttttgcttactatatattatccatttgttaatgaaactataggctctatatttcacg

SEQ ID NO: 687990 - DNA, 646 bp, Homo sapiens
tacaccattgcactccagcctgagcaaaaagagcaaaaccccatttcaaaaaaaaaaaaaaaaaaaaaaaaaaatgagtggtaccatttactgtgataggaaaaccttggaggtatttctgttagggaaaacatgtaatatttgagaaggaaccgtcaagacaactagaaagatattagttatggtttttattctatcttaataaacagtgagctaagaagtaagtcacaaaattacattgatcttagtttcattatgtgaacttgttcacatggttgtagaatttgcttccaaatctaaagtcttataatattaaaaaattgaataaattacaaattcccccaataaagccctacacatatttattttatatgatcacacatatttattttatataatcatctgtttcttaraaattaaaaatatgctttttctgatattttaatgtgtgagttatgtgctttcaaaaatctcattttgtgttcatgcgtggtaccatgttattgaataataaatcactatcaattattaactaaaattttgacaaaataaattacaatccatgttacatttttatgccaaataaaatttttgcttactatatattatccatttgttaatgaaactataggctctatatttcacg

SEQ ID NO: 687991 - DNA, 693 bp, Homo sapiens
ggacgtggatagagctggaggccatgatcgttggcaaactaacacaggaacagaaaaccaaatactgcatgttctcactcataagtggaggttaaatggttagaacacatggacacatagaggggaacaacacacactgcaccttaaccgagtgtgcagggtggaaggagggaagaggatcagaaacaataactaatgggtattaagcttaacacctaggtgatkaaataatctgtacaacaaactcccatgacataaatttacctatgtaacaaacctgcacgtgtatccctgaacttaaaataaaagttaagaaaataaagagtgtggttcaaaatatgtaatatttttaaaactttcaaatcattttttggttgtattatttaagcgggtgatttagggttcctggtacaatcttaacttatcacacagtcaaatcatattatactactcagattgtatacaagtcttagagccgtacatttccatttctatctctttccaccacctgccttctcagacaaaacaaagcaaaacaaacacaaaaatcaaacaaatccttacttttttggtagagtacttgactttcattcattgatggtggttttgaacttctcagctcaagaactataaaagaataaatttgtgttgttttaagctataacttttggagtaatttattaaagcagaaat

SEQ ID NO: 687992 - DNA, 584 bp, Homo sapiens
caaaggcaattcagaaacatctaggaagatggataatagcttattcattttataattagttctgaggcagctatgagtctttagtcattaaatatctgaaatctatttagcataattgatacatgtgcatatgtaayacttctgattgtaattgattctataaataatgcatgccatttacagcacacatcatttgatttgttttcaatacttattttaaaatatatatatgttttttatttctgtatctgatttctgaaagtcatagattaaattttcacaaaatttatttgctattttatcactatttgattcctgtttaaatattgctcctcaaagcactcaaattagaggtatcattaatcatcaaaagcctgctgaaaaacaagaaagtttaaagttagtttgaacattactttactcaagaaacagatgaatacatcttgcagaaatgcagcaattgactattcattctatataactccatacagcttagattctcattttgcatttttattttattttagagatcttctttctttccttttattaatccaaatcccttgccattagctctaaaacac

SEQ ID NO: 687993 - DNA, 1169 bp, Homo sapiens
gctgtatttattacacaaacaatattacagtaatggggatttataaaggacatggctgaaattcctgggggtgggagaacgagggagggattttagaagttcactacagccaccccagtttggagggtgctctaccccagtagcgttctgtacttgcaatgttgctattttccattttctaaagctttatttaaccattgtaatttgtggctttctccaagactaagtatagagcaaaacataataatgcaaactggctcatgctgagctgaaatgagtagtgttctctcaccaaatcctcttgtgagctttaataacttctttaatttctctgttattttccaatattgtatacctattccagaagtactcattttgtctttcctaaaccaactttcctctgctgggaaaatgaccaaattattccactcctgtcctcctgccacacctctagtttttggtttttcagctcccattctggggtttacaaccaatttagcagttgttgatcatggcgagagtgtataattgagtcagtactggagatgaaatgactcatcagaacagttcatgagagggaaatgattttcaggacaaggggagagagaatgagtgagattatacatacacattgtacttgcttgtgggtaatagagtggactccaatgtagagtaaactcgggtcattttctttgatcttctgacacactattcctttttwaaaaaattaaagattagcctctaacagaaggcaaggaagtttcttgtctagattgagttgtggagactgtatttagaatataagctcttagaaatagcaaaatactaacgcagagtatgtcatgggaactcagaaaatgtgaattaaaatctagagacagaaagaaagaaccatgcttaaaaaagatagtgggttggtcagtgatttcttacggctgctctcacagattacatgcagtagccgtgtccttttctgtatttagattttcctaccaaaaggggactatgtggacatttcagagtcccagtataagaagggtgagtaacttgagctgaagtttaggatgaaaggagcaggagaaatctggctccttgctgggatgcacggggctctggagtaccttccaggagagtctgagatgcccccctacccacattccttccagacc

SEQ ID NO: 687994 - DNA, 1169 bp, Homo sapiens
gctgtatttattacacaaacaatattacagtaatggggatttataaaggacatggctgaaattcctgggggtgggagaacgagggagggattttagaagttcactacagccaccccagtttggagggtgctctaccccagtagcgttctgtacttgcaatgttgctattttccattttctaaagctttatttaaccattgtaatttgtggctttctccaagactaagtatagagcaaaacataataatgcaaactggctcatgctgagctgaaatgagtagtgttctctcaccaaatcctcttgtgagctttaataacttctttaatttctctgttattttccaatattgtatacctattccagaagtactcattttgtctttcctaaaccaactttcctctgctgggaaaatgaccaaattattccactcctgtcctcctgccacacctctagtttttggtttttcagctcccattctggggtttacaaccaatttagcagttgttgatcatggcgagagtgtataattgagtcagtactggagatgaaatgactcatcagaacagttcatgagagggaaatgattttcaggacaaggggagagagaatgagtgagattatacatacacattgtacttgcttgtgggtaatagagtggactccaatgtagagtaaactcgggtcattttctttgatcttctgacacactattcctttttaaaaaaattaaagattagcctctaacagaaggcaaggaagtttcttgtctagattgagttgtggagactgtatttagaatataagctcttagaaatagcaaaatactaacgcagagtatgtcatgggaactcagaaaatgtgaattaaaatctagagacagaaagaaagaaccatgcttaaaaaagatagtgggttggtcagtgrtttcttacggctgctctcacagattacatgcagtagccgtgtccttttctgtatttagattttcctaccaaaaggggactatgtggacatttcagagtcccagtataagaagggtgagtaacttgagctgaagtttaggatgaaaggagcaggagaaatctggctccttgctgggatgcacggggctctggagtaccttccaggagagtctgagatgcccccctacccacattccttccagacc

SEQ ID NO: 687995 - DNA, 1169 bp, Homo sapiens
gctgtatttattacacaaacaatattacagtaatggggatttataaaggacatggctgaaattcctgggggtgggagaacgagggagggattttagaagttcactacagccaccccagtttggagggtgctctaccccagtagcgttctgtacttgcaatgttgctattttccattttctaaagctttatttaaccattgtaatttgtggctttctccaagactaagtatagagcaaaacataataatgcaaactggctcatgctgagctgaaatgagtagtgttctctcaccaaatcctcttgtgagctttaataacttctttaatttctctgttattttccaatattgtatacctattccagaagtactcattttgtctttcctaaaccaactttcctctgctgggaaaatgaccaaattattccactcctgtcctcctgccacacctctagtttttggtttttcagctcccattctggggtttacaaccaatttagcagttgttgatcatggcgagagtgtataattgagtcagtactggagatgaaatgactcatcagaacagttcatgagagggaaatgattttcaggacaaggggagagagaatgagtgagattatacatacacattgtacttgcttgtgggtaatagagtggactccaatgtagagtaaactcgggtcattttctttgatcttctgacacactattcctttttaaaaaaattaaagattagcctctaacagaaggcaaggaagtttcttgtctagattgagttgtggagactgtatttagaatataagctcttagaaatagcaaaatactaacgcagagtatgtcatgggaactcagaaaatgtgaattaaaatctagagacagaaagaaagaaccatgcttaaaaaagatagtgggttggtcagtgatttcttacggctgctctcacagattacatgcagtagccgtgtccttttctgtatttagattttcctaccaaaaggrgactatgtggacatttcagagtcccagtataagaagggtgagtaacttgagctgaagtttaggatgaaaggagcaggagaaatctggctccttgctgggatgcacggggctctggagtaccttccaggagagtctgagatgcccccctacccacattccttccagacc

SEQ ID NO: 687996 - DNA, 1169 bp, Homo sapiens
gctgtatttattacacaaacaatattacagtaatggggatttataaaggacatggctgaaattcctgggggtgggagaacgagggagggattttagaagttcactacagccaccccagtttggagggtgctctaccccagtagcgttctgtacttgcaatgttgctattttccattttctaaagctttatttaaccattgtaatttgtggctttctccaagactaagtatagagcaaaacataataatgcaaactggctcatgctgagctgaaatgagtagtgttctctcaccaaatcctcttgtgagctttaataacttctttaatttctctgttattttccaatattgtatacctattccagaagtactcattttgtctttcctaaaccaactttcctctgctgggaaaatgaccaaattattccactcctgtcctcctgccacacctctagtttttggtttttcagctcccattctggggtttacaaccaatttagcagttgttgatcatggcgagagtgtataattgagtcagtactggagatgaaatgactcatcagaacagttcatgagagggaaatgattttcaggacaaggggagagagaatgagtgagattatacatacacattgtacttgcttgtgggtaatagagtggactccaatgtagagtaaactcgggtcattttctttgatcttctgacacactattcctttttaaaaaaattaaagattagcctctaacagaaggcaaggaagtttcttgtctagattgagttgtggagactgtatttagaatataagctcttagaaatagcaaaatactaacgcagagtatgtcatgggaactcagaaaatgtgaattaaaatctagagacagaaagaaagaaccatgcttaaaaaagatagtgggttggtcagtgatttcttacggctgctctcacagattacatgcagtagccgtgtccttttctgtatttagattttcctaccaaaaggggactatgtggacatttcagagtcccagtataagaagggtgagtaacttgagctgaagtttaggatgaaaggagcaggagaaayctggctccttgctgggatgcacggggctctggagtaccttccaggagagtctgagatgcccccctacccacattccttccagacc

SEQ ID NO: 687997 - DNA, 628 bp, Homo sapiens
ggccattaaaactccaaagctccctgtagggtgggccaagactcctgctgtgccctctcacagctcaactcctccctctacccactcctgcctcatctcccttccttccacaggtatggatcggagaacactccttaataaatctcctgcccactgaactctgctcagagtcggcttctggggagcccaggcagcatcatggagattctctctggctgcctcatctctccccaccaaaactccaacttccttttggttagggagtgcctccttcctcctgcaccatgcacttcctccacaaaccgtttacatcatgggggatgatctttcctgtggagacagcctctgctcttcagctgaggcagaggcttagtggcctcccttgctgaaaccttcaaacaggcttggggcaggttggtttatctccccgttgacagcaggtgtatacggaacatggaatcccttracatttttttgattagaagcatgtttttttttttttttttaatttctgtgagaccccctgggtcaggcttcaggatctgctgatagaccttcatcagcaggggtgtgtgtgtttctgtgtgtgtgtgtgtctaaatgtaagtaaccaccagagcctgcttca

SEQ ID NO: 687998 - DNA, 628 bp, Homo sapiens
ggccattaaaactccaaagctccctgtagggtgggccaagactcctgctgtgccctctcacagctcaactcctccctctacccactcctgcctcatctcccttccttccacaggtatggatcggagaacactccttaataaatctcctgcccactgaactctgctcagagtcggcttctggggagcccaggcagcatcatggagattctctctggctgcctcatctctccccaccaaaactccaacttccttttggttagggagtgcctccttcctcctgcaccatgcacttcctccacaaaccgtttacatcatgggggatgatctttcctgtggagacagcctctgctcttcagctgaggcagaggcttagtggcctcccttgctgaaaccttcaaacaggcttggggcaggttggtttatctccccgttgacagcaggtgtatacggaacatggaatcccttaacatttttttgattagaagcatgtytttttttttttttttaatttctgtgagaccccctgggtcaggcttcaggatctgctgatagaccttcatcagcaggggtgtgtgtgtttctgtgtgtgtgtgtgtctaaatgtaagtaaccaccagagcctgcttca

SEQ ID NO: 687999 - DNA, 612 bp, Homo sapiens
aggagagggatccagataggtattcatggacccagtcttgaagggcagatatgttatgcaagggagttagctagattctgtagtcatgcaaaaattttaagcatagaagataattgtgtaccatattagaaaggttactctcgcagcattggtttggacgggttggaacagaggtgtgaattgtgttggaaataggtgattttactatagtattttagatgaaagatgaatagtatttgtgggtcagtgagaatgaggaaggaggtgagagaaaaatagaatcaacataatcagtaattgcttagatatgaggggagtaagaatatgaggaatctgtgataattcacaggtttgtaacttgggcaacccagtgtgccatccactgaaatttgtaatactgaaggggaggagtaggtgaaatagacaaagatgagtttattatrtgcatcttttaaaaggttcaaaaacaaacacttgggtgttgtaaagtcatcaccctttgtggggcacaaaggaagaggttggctgagaaggggctgtggagtagaaaggtgaagaatagggccttcgtgaacacagacacgtggacaggctgagtaagtagagcctgca

SEQ ID NO: 688000 - DNA, 803 bp, Homo sapiens
tgcatttcagcatcagcacttcatatccaactgattgaattataaacgactgaaggaagtacaagcattgagaacatcaatttgaaatgtaaatatctttctttgaaatgccttcttctcctgacagacacaaacttcaaacaaagctttatgcatgtactgcagtgggaggatattttaaatactaccaagtcatgactgttactagtttaattgcagtttccaaatcacacaattctgaaggtgaccaagggaaaacaactgatacatgtgaggagaaaaactacagggtaatggtttccatacaatggccaaaaaataaaagaacttgttctggtctaatagttttctgcaaatatagaatattgtgaggttctaggttctattaagaacttttcattgcttcttattatgtatttaacacttgaatcctttagcagaaaacctaaataaataaattcttctagttcccgtgatataagaacaaaagctgtgtcaaaatagtgaattaaagtgartaggactatcccaaatattaccttaattttttactaacttagaaattcttgaaacagaggcaaattttgttttgatgttgtccctcattgtaggtttacctcacacatttcctctctgttaatcctgggtacccaacatactgataatgatgtttctattaacaaggcaaaatgaatgacattagactactgtcattgattgacagcctagcagatcttgctataactcttttcccccttcatttttgggacaatcaattgaattctacattattctacccattt

SEQ ID NO: 688001 - DNA, 1702 bp, Homo sapiens
tgacttagtctttttatgtttcagaagcaccctaatataacaccagctggaaatctttacatgtttacctatttttcaaccactcacgcggaattctaatctcccagtatctaccctatacccttgaagcagaattggcaatatttcttaaggtaccatgtggagaaatgtaatcctaaagtgaacatgaaaaatgatgcatgcactacaaatttaaatgctgcacttcatgagttcagtttgaaggaaaaaaatatatattgttgcataaactctgaatctttttggaagaagaaaagatattgtacagaaattaataagttatttcaaagagcataaaaggcagtgaatttattggcacttatgattaaatgtgatataaaaatggactatgttagggaattgtactttaattttattgtgaatttaggtgttgcattttagcatacataatttcaagtaattcataatacacaatttgtttttgctataagattctgaaaagagaagaagcagtactgcatatactcatcaaaaaagtactgaatttatttattcactcatgaatttatctagtatttgctaagcctctcctgtctctctcaggaactctgcaaggttactgtgattacagaatgctataaatgggcttagttgctctgtacctgcttttaaaggggctttcatgaaattgttatttgtttgaaaatcaacaattcccatttttctcagcatggaaaaatgatctaaataataataaaggaaactctggtaactttaccttggtaccacttatatcattctctattctgatgattgggcaaattagctaagcttccttaaccagggctcctcttttgtttatgcttcttgaaaccattttaaatatctgaaatatgccaggcacaaggttaagcacaagtttatatgaattatctcatgtcatattcttattgacaataagaataaatatttatttctcatttgcaagcgaggaaattacaaaacagaagttaaattcattgtccagaattacttaggctagtagaaattagaaccagtatttaaaacaggcttacatggctaaagtagagctctaactcttactatgaagctacctgcttcctctggtgatgttgggccttccacatagaggtgttttgaggattcatcagtaattaagaaaatatctataagttctaatgaacattacaaatgcaaggcatgtatttacaatttacttgaactgattgtttctctaaaaagcattattaatttgtatgtaaatcaacatctattataagaaattccctctttattttatattttgatttattcttaaataattttatgtacataactatgtatttacagttacacaaaataaagcagagatacataaatataaattgagccaatcaaaaataaataaaaatgaattaaagaaaaaaaatttaactttccattcttaaaataatatgaaaagaaaggaaaagtttgcagatatttaaaaacataatcaackatgatatttatttatttatttgagttataaattataaacttattgtcaaaatccatgtggcaggaatccagattgtcttttcttaagctgacaaaatgttattccccttcatttctgaaggatagctttacaagctgtagatttcattactaacatttgttttctagctatatttcc

SEQ ID NO: 688002 - DNA, 1506 bp, Homo sapiens
gtcctaacccctaatacctataaattttatcttatttggaaatagggttattgcagctgtagttaagacatgagttatgatgaggtcatttgggagtagggtggactcttataaaaaatataatacatagagacagacacacatgggagcaccgtgtgatgatggaggcagygatggaaatgcaatgagtacaggccaaggaactctgaattttgccaggacaccaaaagctaagagaagggcattaaactgattatcccataacacttttagaaagagcgtggccctgccaacaccttcattttggacatgtggcctccagaactgtgagagagtaaatttctgttgccttaagccatccactttgtgctaatttgttaaagcatccctacaaagtaaatacagtatcttacacatattttataatttcggataaatgtatcaaaaagaacgaagtaattttggcaaactgcacagattttacttgtcagagtagaaaattgcctcaggtatattcaatccagatttcacttttcattcatgatgccctgaaacagtttttgattgagagaagttttaggtggtatcagtattttagttttcattaaataataatattttttatttgtaaatcttttccaaacagctgataattatatttcgttataaaaaaccacattactagtttttcctttcttttattgtataacataagaaaatccccacttaaattgggctatattttgttttcgatataattttgaataattagaaaacatccaaaatgaaaaaaaaaaattaagtccaggaattatgattgggcctaactcatatttatttacttttgcttctttttataatgtgataacaatttatctgataagccaaaataattatacattactactgagaaaattagacataaatgtagttataaagtttaaatgatttttagtattttagggatttgctacggtaagacgttttcaatgtcacatctgtgagctttggttttatagttcaaataggtaactgaacagaaatataaatttttgtttcaggcttgtgaaaactagccataaaaatgatcacaaatgaaacagtaaaatattaaaaccatacatagtttcaccaaccagacatattttggcatatttggcatattttggaacataaagttttgctatattttctaatatgcttgaaatcactacacatatacatatacacaaactttttcttttcaagacatcatacaatttaaattctatgattagaaaatacgtacatttttttgaaagcacaatatttcagtttggggtttatatgatttaacgggagagtacattttattttaagtatagatcttataataatctgtactatatatctatatcacagcatatttatttcttaggagttataatattttaaaagttttctaagagtcatgaaaataaaagttatttaaatatattcatttttaaaaattttcttaatgacaat

SEQ ID NO: 688003 - DNA, 1506 bp, Homo sapiens
gtcctaacccctaatacctataaattttatcttatttggaaatagggttattgcagctgtagttaagacatgagttatgatgaggtcatttgggagtagggtggactcttataaaaaatataatacatagagacagacacacatgggagcaccgtgtgatgatggaggcagcgatggaaatgcaatgagtacaggccaaggaactctgaattttgccaggacaccaaaagctaagagaagggcattaaactgattatcccataacacttttagaaagagcgtggccctgccaacaccttcattttggacatgtggcctccagaactgtgagagagtaaatttctgttgccttaagccatccactttgtgctaatttgttaaagcatccctacaaagtaaatacagtatcttacacatattttataatttcggataaatgtatcaaaaagaacgaagtaattttggcaaactgcacagattttacttgtcagagtagaaaattgcctcaggtatattcaatccagatttcacttttcattcatgatgccctgaaacagtttttgattgagagaagttttaggtggtatcagtattttagttttcattaaataataatattttttatttgtaaatcttttccaaacagctgataattatatttcgttataaaaaaccacattactagtttttcctttcttttattgtataacataagaaaatccccacttaaattgggctatattttgttttcgatataattttgaataattagaaaacatccaaaatgaaaaaaaaaaattaagtccaggaattatgattgggcctaactcatatttatttacttttgcttctttttataatgtgataacaatttatctgataagccaaaataattatacattactactgagaaaattagacataaatgtagttataaagtttaaatgatttttagtattttagggatttgctacggtaagacgttttcaatgtcacatctgtgagctttggttttatagttcaaataggtaactgaacagaaatataaatttttgtttcaggcttgtgaaaactagccataaaaatgatcacaaatgaaacagtaaaatattaaaaccatacatagtttcaccaaccagacatattttggcatatttggcatattttggaacataaagttttgctatattttctaatatgcttgaaatcactacacatatacatatacacaaactttttcttttcaagacatcatacaatttaaattctatgattagaaaatacgtacatttttttgaaagcacaatatttcagtttggkgtttatatgatttaacgggagagtacattttattttaagtatagatcttataataatctgtactatatatctatatcacagcatatttatttcttaggagttataatattttaaaagttttctaagagtcatgaaaataaaagttatttaaatatattcatttttaaaaattttcttaatgacaat

SEQ ID NO: 688004 - DNA, 1506 bp, Homo sapiens
gtcctaacccctaatacctataaattttatcttatttggaaatagggttattgcagctgtagttaagacatgagttatgatgaggtcatttgggagtagggtggactcttataaaaaatataatacatagagacagacacacatgggagcaccgtgtgatgatggaggcagcgatggaaatgcaatgagtacaggccaaggaactctgaattttgccaggacaccaaaagctaagagaagggcattaaactgattatcccataacacttttagaaagagcgtggccctgccaacaccttcattttggacatgtggcctccagaactgtgagagagtaaatttctgttgccttaagccatccactttgtgctaatttgttaaagcatccctacaaagtaaatacagtatcttacacatattttataatttcggataaatgtatcaaaaagaacgaagtaattttggcaaactgcacagattttacttgtcagagtagaaaattgcctcaggtatattcaatccagatttcacttttcattcatgatgccctgaaacagtttttgattgagagaagttttaggtggtatcagtattttagttttcattaaataataatattttttatttgtaaatcttttccaaacagctgataattatatttcgttataaaaaaccacattactagtttttcctttcttttattgtataacataagaaaatccccacttaaattgggctatattttgttttcgatataattttgaataattagaaaacatccaaaatgaaaaaaaaaaattaagtccaggaattatgattgggcctaactcatatttatttacttttgcttctttttataatgtgataacaatttatctgataagccaaaataattatacattactactgagaaaattagacataaatgtagttataaagtttaaatgatttttagtattttagggatttgctacggtaagacgttttcaatgtcacatctgtgagctttggttttatagttcaaataggtaactgaacagaaatataaatttttgtttcaggcttgtgaaaactagccataaaaatgatcacaaatgaaacagtaaaatattaaaaccatacatagtttcaccaaccagacatattttggcatatttggcatattttggaacataaagttttgctatattttctaatatgcttgaaatcactacacatatacatatacacaaactttttcttttcaagacatcatacaatttaaattctatgattagaaaatacgtacatttttttgaaagcacaatatttcagtttggggtttatatgatttaacgggasagtacattttattttaagtatagatcttataataatctgtactatatatctatatcacagcatatttatttcttaggagttataatattttaaaagttttctaagagtcatgaaaataaaagttatttaaatatattcatttttaaaaattttcttaatgacaat

SEQ ID NO: 688005 - DNA, 611 bp, Homo sapiens
gttttagtttagctaaaaatatgtttgaattatttgacttaaaatttgaaagcttagctgttccataatgttgtatttatacgtctagcaaatgtagcaatcacttttatgaggcctttgattaatgtttagttccatttacaaactagttaattaaactcctttaaatattttacaccaaatttataaattaaatgtatttgatttctatttagatacttcaaatgtgtgatttaaaagtaaaattttccagaacatttaaaatacctctaatgcttctaataattaaacctggaaatattatgaaccttaagttctcttaaatgttttaatactatatragctactgcaatgactatataaactaaataaaatttcaacttcaattcacaggcctaaatcaattacctatttacacattttaaattgaatcacacgatttacctgttctctaatagactaaaatatcttaaacattataaataccccaaagtcaagcatgcttccttaatatatactcatattaatactgtgtttgattttcttaactagttctataattaaaacttccaagctaagaaaataattatctactagggaaacaattataa

SEQ ID NO: 688006 - DNA, 1409 bp, Homo sapiens
taattcttgatgccctgaaaggtcaataaaacattacaaaggatgggtacaaaaaaaaatggaaagaatgaataagasctactatttgatagcacaatagagtgactatactcaacctaatctgtacattttaaaataacttaaagagtgtaactggattgtttgtaaactcaaaagatacatacttgaagggatggatactccattccccatgatgtgcttatttcatattgcatgcctgtaccaaaacatctcacgtaccctaaaaatatatacatctccaatgtaccacaacaacttaaaaaaaatagaaaacaataaatgcataaaacacttctagaaggagaaagaaaacaccaccacaaagggaacttactctgttctgccctgtccaatacaataaaattagataattaaaaatccgattcctcagtcacatgtcacatgctcaatagacgtaggtggccacaggctactacactggatagaacagctataaaatgtgtccatcagcacagagggtgccactggaacagcacttgtgtcactgatgaggccacatccacaccacacaattctgaataatacaagtcagcaaagacttacatatctatttatcagcatttatcatgtgtttatcccacaccatttatcagcatttcctcagagactgggcagaataaagcacttataaaataacaaaagaggccagatgtggtgcctcatgactgtaatcccagcactttaggaggccgaggctggcagatcacttgaggtcaggagtttgaaggcgaaaccccgactctactaaaaatacaaaaattacctgggcatggtgatgggtgcctgtaatcccagctactcggcaggctgaggcaggggaattgcttgaacccaggaggcagaagttgcagtgagccaagatggcgccactgcatgccagcctggctaacagagcaaaactccatctcaaaaaataaaaaataacagataacaaataacaaaagagtgttgaagtggcctccagggagagcccatttcctattccagactgtgtctgaccatctgactattgctcacagcttgctgtccccttctctctcaggttctttgaaaatctgttataatttcctttgcaaaaactcaggggactttattaattcaaaaagtttaaatgaaccaaaaagaaaatgctagcacaacaaacactcatcatggtccttttcataaatcactggactaaagttgtgctcatttatctttctcaaatccttcacagacttaatgatgttactgacaaaacactcagacgaggtcagactactacaatttccgtagcacatgcttcttgctcacaagtttacaagtttgaaactagagtgagtttttaaaacctgaaattaagatcg

SEQ ID NO: 688007 - DNA, 623 bp, Homo sapiens
gacctaatatcggaattaaagaatggttaggtcactgtggattttgaggtcaagaagccccttttgtacttcccagcaggaacacaactaaactattgcaaataaaagaaaattaattattggttacccaactctactcccaactcccctgttacagaagactatataaaaaacgacagtttccacattgattaaaaacttacaaatgcacaatttatcatatatccttcatacttctacaacacgacactttaacttttttttytttttgagatggagttttgctctcgttgcctaggctggagtgcaatggcgtgatcttggctcactgcaacctcaggctcccaggttcaagtgattcacctgcctcagcctcctgagtagctggaattacaggcgcccaccaccaggcccagctgattttcatatttttagtagagatggggttttgccatgttggccaggctggtctggaactcctgacctctggtgattcacccacctcggcctcccaaagtgctgggattaaaaacgtgagccaccacgcccagccgatacttcaactttttaagctgaggttgataagacctgagatataacagtgtaaacataaaaatgctttt

SEQ ID NO: 688008 - DNA, 623 bp, Homo sapiens
gacctaatatcggaattaaagaatggttaggtcactgtggattttgaggtcaagaagccccttttgtacttcccagcaggaacacaactaaactattgcaaataaaagaaaattaattattggttacccaactctactcccaactcccctgttacagaagactatataaaaaacgacagtttccacattgattaaaaacttacaaatgcacaatttatcatatatccttcatacttctacaacacgacactttaacttttttttctttttgagatggagttttgctctcgttgcctaggctggagtgcaatggcgtgatcttggctcactgcaacctcaggctcccaggttcaagtgattcacctgcctcagcctcctgagtagctggaattacaggcgcccaccaccaggcccagctgattttcatatttttagtagagatggggttttgccatgttggccaggctggtctggaactcctracctctggtgattcacccacctcggcctcccaaagtgctgggattaaaaacgtgagccaccacgcccagccgatacttcaactttttaagctgaggttgataagacctgagatataacagtgtaaacataaaaatgctttt

SEQ ID NO: 688009 - DNA, 623 bp, Homo sapiens
gacctaatatcggaattaaagaatggttaggtcactgtggattttgaggtcaagaagccccttttgtacttcccagcaggaacacaactaaactattgcaaataaaagaaaattaattattggttacccaactctactcccaactcccctgttacagaagactatataaaaaacgacagtttccacattgattaaaaacttacaaatgcacaatttatcatatatccttcatacttctacaacacgacactttaacttttttttctttttgagatggagttttgctctcgttgcctaggctggagtgcaatggcgtgatcttggctcactgcaacctcaggctcccaggttcaagtgattcacctgcctcagcctcctgagtagctggaattacaggcgcccaccaccaggcccagctgattttcatatttttagtagagatggggttttgccatgttggccaggctggtctggaactcctgacctctggtgattcacccacctcggcctcccaaagtgctgggattaaaaacgtgagccaccrcgcccagccgatacttcaactttttaagctgaggttgataagacctgagatataacagtgtaaacataaaaatgctttt

SEQ ID NO: 688010 - DNA, 623 bp, Homo sapiens
gacctaatatcggaattaaagaatggttaggtcactgtggattttgaggtcaagaagccccttttgtacttcccagcaggaacacaactaaactattgcaaataaaagaaaattaattattggttacccaactctactcccaactcccctgttacagaagactatataaaaaacgacagtttccacattgattaaaaacttacaaatgcacaatttatcatatatccttcatacttctacaacacgacactttaacttttttttctttttgagatggagttttgctctcgttgcctaggctggagtgcaatggcgtgatcttggctcactgcaacctcaggctcccaggttcaagtgattcacctgcctcagcctcctgagtagctggaattacaggcgcccaccaccaggcccagctgattttcatatttttagtagagatggggttttgccatgttggccaggctggtctggaactcctgacctctggtgattcacccacctcggcctcccaaagtgctgggattaaaaacgtgagccaccacgcccagccgatacttcaactttttaagctgaggttgataagacctgagatrtaacagtgtaaacataaaaatgctttt

SEQ ID NO: 688011 - DNA, 779 bp, Homo sapiens
gaaggtgactcctgagactatctcaagctcttgtctaatgtagttaaacttgtgggagagctgagaataatgctcccttaatgggaaagatttctcaaattgagaatttaaatataaggcatttgttaagcaatcatcatctacagcaagtgaactctgtcaacttgattagccgtaagttactggttgcaaaaatcagaaacccattgaatcacctaggccatctggagggtagctcccaggagtaacagaattgctgaaagactcaggytactccaggaactttagaaaataaaattaatctctcaaataccatcagatcaccttaatttttcctacctgccctcaggtttttgcaaataaagaagttcagagcttctggattcatatgctcatagttttgccactaaagagaaaaggcttcctaccctcaacctcagttagagaaatcttgaggaaggactctgatgactttagtttcaggcacatgttcatactcaagactagaacaattccaagtcccagagacagtggtaccacaagtggactcacttggatcatgtggacactattggccagttacagtgacttgagagacacagtatgtaggagtggcaacttctactgggacaacttgcagcaggagaggaagaggaatggttgggaggaggagctcaaacctggcatggctcaatgattttgaatctggaaaccctcagttgtatttactatatcactatatggacagttgtatatctataccaatgtagatgtatgca

SEQ ID NO: 688012 - DNA, 653 bp, Homo sapiens
cagaaaaagactgttttggaatttattcagagcaaaagtattatcactgaagagacggactagcactacaagtttagcagactgtggacacagagaatggagatataaacacaataaactaacttcattttctgccataataaggatttcagactgagcaatcaggagactgctttgaacatctgatctttagtataatgcccctcttaatgtccctgctgacaaggtgactatgggttggttccaaagtaaaatggctagatttgtatgggctcaaactgtgcctgaagactattaattatttaattacaytaaataagaatagtttctcaggtggtagtataggactcaaacccctgtccagaagtagcctcatttttatcagaagattggatgaagtcataaaaggcatacttatcaaatttttgttagacccaaaggcagaagcgaaactgacatgagggatgaaattagaattttagaatgttctcagaatgatgactacttcagttcattgttggtaagtataaattagttcatcatttttgaaaatatgtgataagaacataaaaatgtccattccctttgatctagtaaatctaagagtaagccttaataaaataatcttaaacatataaaataatttatgtaca

SEQ ID NO: 688013 - DNA, 1749 bp, Homo sapiens
ttgtacgggcttttcgatgggaagttgggagaggacatgtcaggcaaggctttgataagtttagaaactcctgcctcatttaaggcagaaataaccttaaagtgaacccaactctgcaaaggcactgcagactgctttgttttataatcaccaaagtttcaagggatctttgctgacgtatttgacttgaaatttaaatgtatgctttgtaacagaaggttagataacaagtttacttggttgtcaaaactttgtcttaaaaatactcctaactccttggtggttcattgcatggcagacattggtagggattttgctaccagaggacttattgaggtactgtttgtatatgctgcctgaggttattgcagctgaaacatgatctccaaatatttccagtgttcttggaaatgcacagtggttccaaggatagaatatatcctgggtctcatcaccctagctaaacattttgggatagatacgttttctgcgtagagttttgtccaaaatacacaactctatctccaatgaaataagaatatttcaataatgtaaagataatataaacaataatataaatgtaaatatgctgctctgcctcaatctatgtgatatagttactaaggataaaataacaaagtataaatatgaaaacatgggtcaggatgcacagatctcattagaggcagtggagcctagtggttaggtgtaggggccatgcactaaaatatatctggatttgactggcatggccaccagtaagtgtgggcttgaatatatcatctgaacattctggtccttaattttcctctctaaaaactagacataaaacattccactccaaggatatttttaacattaggtttttcctctcaatttctcatcgaggtatagtttaccaacagcgaaatacccatattttatgtataaagtttgataagtttttcaaatgcttacaaacccctgtcatgatttagcacattttcattacttcagaaagttccctgaggccctcttccagctaatccctgttggttccactctagtgatgtctttcattataaattagttttccttttaaaaaagaccgagttttcaaatgaaataaggtgcctaaagtgtttagaatatttcttggtatttaataagtactaaaaatgactttggttattattagtatttgtgcacagagttacaggctcagatgacagatgcactgcagccactagagaagaatatgagggaaaattcaaactgacaggaaatgagttgcatataaaacattaagaaggtaaagaggaagattagaatatttaagttaaagcaagatattttttaaagctcattgaatgccttctagatgttagcattacacaacaagtttaygttattttatcttcataatactctaagatatttttatcccctctgcacccatttagcaaatgaaaaaaaaaaaaaaagaccagagaagttaggtagctttccaatgtcacatagcaccattaagtaataaagctgagattcaagtatctttccaactctgaagctccatccattctaatagaccatcatgagctctatattaaaaagcacataagggaaaggaaaataacattgattgggtcttaaaatggaaagacattaagcttggtgctttttgcacattatttcattcaattatcagtgatgttattttttccccattttactcttgtggaatatgcaatatagagaagttgagcatca

SEQ ID NO: 688014 - DNA, 793 bp, Homo sapiens
ggcatggtgcgggcgcctgtagtcccagctactcaggtggctgaggcaggagaatggcgtgaacccaggaggcagagcttgcagtgggccgagatcgcgccactgcactccagcctgggtgacagagcaagactctgcctcggaaaacaacaacaacaacaacaaaacccacatcagacaccatagggtttgtttttgttttgttaaatgtatccatgtcttttggcttttctcatttaaggttgttttgtgtgttttcctgttgttgttktttggtttggtttggtttttattctctccttatctgtgttatcaaggttttttcttgaacctccctaatttctaaccccctgggcttttaaaaagaaatctaaaatccagcgaatctttgagatagtctctaggaagttgggaatcgtttgcctgttcatcctttctctgagtcacaagtgtattttctgtgatacgcccaaaatagttctgggaaagaagaaggaaacaagacttactcagaaacccaatacacaagataagaaatatcaatggatattcttacaacaggcaactgcagggctcagattttaaacattctgtccagttgctaatctgtgcattccacttggggtttagaaatctgtccttatgcctattgtttacagcactgaagccaggggaattacgtggtccctcccctggtgtttggagtttgagttgttgtttctgcacagatggatctgtgaggagagaagttgagtggcaggagaggataggtctgtctcccaagcatgcaccc

SEQ ID NO: 688015 - DNA, 1914 bp, Homo sapiens
  misc_feature 1108, 1109, 1110, 1111, 1112, 1113, 1114, 1115, 1116, 1117,1118, 1119, 1120, 1121, 1122, 1123, 1124, 1125, 1126, 1127,1128, 1129, 1130, 1131, 1132, 1133, 1134, 1135, 1136, 1137,1138, 1139, 1140, 1141, 1142, 1143, 1144, 1145, 1146: n = A,T,C or G
  misc_feature 1147, 1148, 1149, 1150, 1151, 1152, 1153, 1154, 1155, 1156,1157, 1158, 1159, 1160, 1161, 1162, 1163, 1164, 1165, 1166,1167, 1168, 1169, 1170, 1171, 1172, 1173, 1174, 1175, 1176,1177, 1178, 1179, 1180, 1181, 1182, 1183, 1184, 1185: n = A,T,C or G
  misc_feature 1186, 1187, 1188, 1189, 1190, 1191, 1192, 1193, 1194, 1195,1196, 1197, 1198, 1199, 1200, 1201, 1202, 1203, 1204, 1205,1206, 1207: n = A,T,C or G
tgacaggagccacatctcattctggccttcggcttaacacactggggcagagggggttgttagacagtgtgtgttgcatgaacaaaagtagacatcatttttgttttaagtgtttgtcctttttaaaccacaaacaaaaagttggaaaagtgatatttcaattacgttgattcagccagttacaagggaacaccagttcctgtggtacagagccaggagagagatttttagatcagaaatgggggatgggggtgcattggtgagtcgtccaacagtggtaacagcggatcctacttattttagggaatatctcaaaaaatcaaaataaaaaagaactgaaatatttttacatttgctgaataagttgaagtgaatagaaaatactattgacttttaagtgaggaataacctttctcagaaaaataattatggtccttggattataccattgtaaatggctttttttccccagaacattctttccatttcgttgatattttaccgtatgtttccatttctatagttagtacacagaccccccccacacacagacacacactctacaatacttcctatttgaattaatatttcctataaagtctgttatgactttgatttaaaattgcttggcttgttcccagctggctatacaagaactagggagtttgttagaaattcctattcctagactctgtccctggagactgggatccagcaggtcagaagacgggcccagacatgggcaattaaaaagtactctgacgattctgatagactgccagatttgggaaccactgggatattttcctaatttctagagtatttgtgtgtgtgtgtccattttataagtcaattaaattaggacgggctgcctggaagcgtaaacaaagcaaattgctgtacaataactgctgtgagatgcaaagtaaataatttgggatatattattttgtctaagaccttcactttcttttaacttgggttttagtgccggagaagaaacaatatkttctcatcccaaacaggccagcataattatggttgcatatactgtaggtttcaagtcattctgtaacattccatgtattgtaccatatgtttgaccaannnnnnnnnnnnnnnnnnnnnnnnnnnnnnnnnnnnnnnnnnnnnnnnnnnnnnnnnnnnnnnnnnnnnnnnnnnnnnnnnnnnnnnnnnnnnnnnnnnntgaactctttaaagctgtaaagggcaaaaaacatggcaaacacagagaacaagatagaaaagtcagagaggtacacagagaagcaggaagatgcatgtggcttcatgggggccaacggagttgggattaaccatgtcaatgtgtcagggagataaacaagacagtggaaattcccactggacttatttaattagaccctgcttttttttttttttttcaaatatagagagatatagtattgaacacaactcttatttcaaaaggtataacccaaggattaaaaatatagtgatagtttttaaaaaccaatttttgtaattctagagttataaaagatgaacgcagttgttcatctattaaaacatagtctagacgatgagaaataacatcaattccaaaggaggcttgaaaggaacacactgaaatattgtggctatgataattggaggtacgatgtgttcattgtgtgtatcatgcatgtcagagactgttataagtgctttacatgtgtcaatcacttggtccacataagagtcctgtgtggtaggtgcttttataatctccattatttgaagtgagaaaaggtaagaaacttgctgaaggacacttagctagtgagtggaagagctagaaaaggaggtgagagagtctgtgtcaggggcaagagctctactgctcagaggacggtaaacctttaagaccctcat

SEQ ID NO: 688016 - DNA, 1321 bp, Homo sapiens
gctctgtctcccaggctggagtgcagtggcgtgatctcggctcaccgcaagctccgcctcccgagttcacgccattctcctgcatcagcctcctgagtagctgggactacaggcgcccgccaccgcaccctgctaattttttagagatgggatttcaccgtcttagccatgatggtctcaatctcttgaccttgtgatccrcctgcctcggcctcccaaagtgctgggattacaggcgtgagccaccgtgcccggccgtggagtggtgattttatgattgtttggctctaaaactaattcggactgagcctttaggtttatgtctttagtatttcaacttaaatggagcaaagatctagttaaattttaaaatggaagttaaaccaactaaaaattctacttctgccaaaaaacggcataagcaaagtgaaaacagcaaaatgggagaaaatatgtttgcataaatgggtaatatttcttttccttttttactttaatttttttttcaaaagggaagacagggagaattttagccttcctttccctttccctttgactttgcctttccattccctttcctttcctttgacagagtcttcctctgaggctggagtgcagtggcacgatcataactcactaccgcctcaatctcccaggctcaagtgatcctcctacctcagactgctgagtagctgggactacaggcgcacaccactatgcctggctcatttttaaaatttttattagagttgaggtctcgctgtgttccccaggcagactggtctcgaactcctgagctcaagtgatcctccaaccacaggtcacaaagtgctgggattatgtggtataggcatgagccactacacctggctgataatatttctaacatactgaagactcatattagtaagataaacagtgagaattcacagaagttctcagttggtaatttttaaaagaaagacttttttttttttttttgagatgaagccttgctctgtcgcccaggctggagtgcagtggtgtgatcttggctcattgcaacctccacctcttgggttcaagcgattctcctgcctcagcctcccaggcagctgggactacaggcatacgccaccatgcccggctaatttttgtattttaagcagagatggggttttgccatgttggccaggctggtctcgaactcctgacctgaagtgatctgcccgccttggcctcccaaagtgctgggattacaagtgtgaactactgcgcctggctatgttttgacttttaaacacatgaaaatatatttaacatatcaataataggtgtatgt

SEQ ID NO: 688017 - DNA, 620 bp, Homo sapiens
atggtgaaaccttgtttctactgaaaaatacaaaaaatagtcaggtgtggtggcatacacctgtaatcatagctactcgggaggctgaggcatgagaattgcttgaacccaggaggtggaggttgtagtgagccaagatctcactgcacttcatcctgggcaagagagtaagactcttgtctcaaaaaagaaagaaagaaagagtttgccttccatcaccatttcttctccttttgtttccagatagtaaattattctctgaataatcttgtgctttcctattaaagtctatctcctggtactagctggaccacaccattcgaggtaaattgagtgactggcagcatctttcaacacacaatttgattcaaatcagaaaaaagcaaagttcctactccctcttagtccatagcactgaagtrtacactctttacaggtaaagcttttcatagatcctgacagaggtgaacatttctttgtggacagatgttaggcaacttaaagtatagatgtcaaactggtcatcgttattcaacaaagcaaattagagtgctcaacactcagacagagtcttcaatatagaatgtgataaatttaagtgagccagaggattagatcat

SEQ ID NO: 688018 - DNA, 792 bp, Homo sapiens
agtgatggcagggaccttgtctgtcttcttaagtgatgtgcatccccaatccatgcacacacaataggccctcaggaaagatttcaatgaaagatatgatggagttgggatctgaaaacaaatctatgttgatctgaaaacaaatctatgttgctccaaggtttttagccactagcctatttcaccttcctcgactctagttagctaatctgcaacatggagataaaggcacccagcttccatgggagtgggaatgttcataaatgccctcacactttgcctggcacatggaagtgactctaaatggtctatttagtaatattgttattgtcccttctttcttgaaaacatcctgtttagcattaaagactttcctatgcaaagcagaactagcaccractgagttcatcttaaacaggctgttctgaaaggaattttcataagaaatgaaaacatttggcttctatcaaactctgggaacacccagaattctatgaacctgggcctgggcctgggtcttggcttagggacctgcctgttctcagtcgtcacacagtgtgaatgccctaatgggccccaggggacagctgcagccaagaggcctcatttctcacacaccaatcttctcaatgaccagatacaatggctttgcctggcccttccccagcctgcccttccctagcccaggagcaccttcgtccccaatacccagactctgcaatcacattccaaagttttcaggattaagagtcctgttgtctaagtctgtgtcttcaagttaccaactcaacc

SEQ ID NO: 688019 - DNA, 635 bp, Homo sapiens
catgtgctcttccattgactggattgagccagttctgagccaatcgcatccttgatccagtcccatctccacggtcttctctttggtcccatgggctcaatcatgccgcctctcccagccctccctcaacccatcctcagccaccaccatccctgcagcccctgcctccaggaccacctcttcaatctgctcccttccccagctctaaagggggtctttctaaagggcaakaccaaccctgctgctcccagctccagcacccgccatgacaccccatgactgtgggagaaggatcagggagggccccgtgggcctggtcacctctctgccctcctctcagccacactcccctctgcaaagccccttccccactgctaaccctctgtgacatcggtggcctcatcaatgtctgttgaatgaatgagtagtcataagaggagctcttaggtgccaggccatgccggcctttgggatccaggaatgtacaaagcaaatgaggtcgtctccccacaggctgccatgctgttaataaaccagcaaacacatcagaggatgaggtcattatgggcacagggtgtgggctccagaggaaataaagaggctgataaggggaatggggcagaaggccttttaac

SEQ ID NO: 688020 - DNA, 663 bp, Homo sapiens
tgaggcactgagtggcaaagtcacttgcccaaggtcacacagaggaaggggaaccacgttcattagggtgaacttgggtcctttacaaaggaggatgggaaactgaggcatggagatggcaggtaactgcctgaggtcaccagcacctgagctttggtatctgtcatgytcccccctcaccagacccctccccaagctggggacctgcccaggacctctgagctgtctcctgtggtctaagagcctcatacttcctcttccctgcctggattctgccttcgtttcctgaggccccactgtgtgctgggcctggggctggtactgacagtaggtgatgtcatttaacacatgtgtcagggaggaatcagggaaggcctcatagggtaggtgtcatttgcactttggagccaggtgggagggcattattcctggaggggaacagccttggcagaggcattgtgagcagtcaggcctgtgcgggctgagggggagcagtccgggtgcatgtggtgggtggcatgtgcttctgcctcggccgagtgcttttctgcagcccagatgctggcctgtgacgtcagcaggtggcccagctgggccttgctgcccgctggtgccctcgggaggagtggggcgggtggtgggcgaaggggcccgggagggtgc

SEQ ID NO: 688021 - DNA, 659 bp, Homo sapiens
tgcatgccagaaccttgaaaatttattcaagaataaatgggagtggtgaggaaaaaaattaagatgatatagrttataaaggaaaaaaaatgacctaacctaagaattgtaggtgtttgtgtatatttaaggaaaatttggacagaagtaatgaagagcatcttaaggaaaatagatctcagctgaaagtatattctggtgggtagacaaaattaataaaaaaagatttgtgcatttttgtcaaaatattttaattataactagttgttttgttttaagcctgaggaaaaatgatacaaaaaaataaagatacacttggcctcagacttatccctgacaacattgaatgtctgaaagcagtgggccaagttcaacctaattttggaggaaaaggttatagctttagaaatgtgcatccaactgagctgacatttctatttgaaggccttagagaaatatttgtatatatgtgaaaacttagcaaatatactgcaggtaaagtcttttgataagtactctttatgaaatctactcataaaataagaatttagtcaaaataaaaaaaatcaagaatggagaaatcatgcagtaaagagctataagttgtaaaaaataaatactaaatgtaaaaataatttaaaatttttcccaaataagga

SEQ ID NO: 688022 - DNA, 659 bp, Homo sapiens
tgcatgccagaaccttgaaaatttattcaagaataaatgggagtggtgaggaaaaaaattaagatgatatagattataaaggaaaaaaaatgacctaacctaagaattgtaggtgtttgtgtatatttaaggaaaatttggacagaagtaatgaagagmatcttaaggaaaatagatctcagctgaaagtatattctggtgggtagacaaaattaataaaaaaagatttgtgcatttttgtcaaaatattttaattataactagttgttttgttttaagcctgaggaaaaatgatacaaaaaaataaagatacacttggcctcagacttatccctgacaacattgaatgtctgaaagcagtgggccaagttcaacctaattttggaggaaaaggttatagctttagaaatgtgcatccaactgagctgacatttctatttgaaggccttagagaaatatttgtatatatgtgaaaacttagcaaatatactgcaggtaaagtcttttgataagtactctttatgaaatctactcataaaataagaatttagtcaaaataaaaaaaatcaagaatggagaaatcatgcagtaaagagctataagttgtaaaaaataaatactaaatgtaaaaataatttaaaatttttcccaaataagga

SEQ ID NO: 688023 - DNA, 659 bp, Homo sapiens
tgcatgccagaaccttgaaaatttattcaagaataaatgggagtggtgaggaaaaaaattaagatgatatagattataaaggaaaaaaaatgacctaacctaagaattgtaggtgtttgtgtatatttaaggaaaatttggacagaagtaatgaagagcatcttaaggaaaatagatctcagctgaaagtatattctggtgggtagacaaaattaataaaaaaagatttgtgcatttttgtcaaaatattttaattataactagttgttttgttttaagcctgaggaaaaatgatacaaaaaaataaagatacacttggcctcagacttatccctgacaacattgaatgtctgaaagcagtgggccaagttcaacctaattttggaggaaaargttatagctttagaaatgtgcatccaactgagctgacatttctatttgaaggccttagagaaatatttgtatatatgtgaaaacttagcaaatatactgcaggtaaagtcttttgataagtactctttatgaaatctactcataaaataagaatttagtcaaaataaaaaaaatcaagaatggagaaatcatgcagtaaagagctataagttgtaaaaaataaatactaaatgtaaaaataatttaaaatttttcccaaataagga

SEQ ID NO: 688024 - DNA, 1291 bp, Homo sapiens
tctactttttatgaatgtggcaatattcaactatgaatataaaaaagaactggaggatgagagaaactgtcctcatattaaccttggaaccttatatgccaaattattggtaaagagcagcaagactttggataaaatttcaggatgttttaggaaactctatttggttttatctgttgtgagaagtgatttgaataaacaccaactgttatctttccagataaatgcaccaaacaagataaaatccatttcatttgccataaatagtaattacaaataacccttcaacagcatcttgaagagcgaactgatcattagaatttcagccatattattatttttcactttgttgttcamtgtttttgatagctgtgttagaaatatattttcaagagaattaccttaattacctcaatgacttacccactcctttctaggagggagactaacaataagtcatatacaataaatcagagaaaatatacaactcttgggaagagttctttttgtatatatttaagaatgatagttacttgttgattagtggtaagagtcaaaatggctaacaataaatttccttccttggatagttcgtctatgcactcacaaggttctattaacacctaatgctaaatgatgagttactgggtgcagcacaccaacatggcacatgtatacatatgtaacaaacctgcacattgtgcacatgtaccctaaaacttaaagtataataataataaaataaaagaattttagaaacagaataacagattattgtaagaaagacagttttaatttcaagaaaacatggccaaatgctgaacattttcccaattacagcagaaatagaattatctatagtttggtaagttgaaaaagtctagtgacatcaaaattaaagttacttaagttactgaggttaagacatttacatagttaagatatttaaaaatatattattttgagagatacaagaaaataatttaccaatatagacaacttcataatatattatacttacaatctagttgtttataacgatgagatatcaaaacaccttttgttttatcaatatttaaagctaagtactctactgaaccatggccaaatttttgaactcgaaatacaccatttttaggtcctgctccatatatataatcttcaaagatatcgatcctatgtggatgtaataaacctggaattttaaaaaggcagttatgaaagttttaatgtatatactcagactttaaaaactatgtttatccaagacgatattgaaaaccttattact

SEQ ID NO: 688025 - DNA, 1353 bp, Homo sapiens
cataatgagttgctgagacttgaggcagaggcttgagctgaaggagttttgttgtgaaggtgatacttgttggcatgtaaaggaaagtcttgcagatcacctacagggactctacatcaaaaggtttgaccacacttcaagtaacaagtgatgagggcttgaacttgggcattgcaaccagagaaaagaatgaagagaacaatagattcattaacatttcagagttagtatacctaaggttctccttgaccaaaaatggattcaggtacctattttatttctattttagaacaccagtaaggcttctcctgaatcccagtcttcatttgtcctgcccctgtctcactaattctgggcaaaatatatccatttcaggcccacctttcccacccataaataggtctcaggaggactccctgtgcagagaatgtacctgtattaccagaataaaaatctctcatgggtgtagcagcccacgttgatttttttttccactttttgctcttaccaagtatcatcaaaatcatacaatttaaaaatgataattggcctatctgataaacacaaccaggaaaaaatatgttaattgtggtagtttagagcaacctctcctacttttgtgtacttatgtctctatctctgtttgtatgtggctctttagaaatgtgtgtaccttggtcttctatgccttaaaatctattttgatagtgggcataatgtgtatacaatcagccctctatatccccacactccacattcgtgggttcaaccaagtgcaaatcagaagtatttggaaataaaaattgtgtctgtgctgaccccgtacagacttttctcaagtttgtacaggctcagcacggacacaatttttctgtacagacttttcccaagtcgttattctctaaacaatacagtaaaacaactatttacatagcatttacattgtgttaggtattataaataatctggagatgatttaaaaatataggggagggtgtgcatagcttatatgcaaacacaatgccatattttttatctgggacttgagcatctaaggattttggtatcctaggaaagtcttggaaccagttccccacagatactgaagatgactatactgcattcctcacccagttaaaccatataagaagcaaggaagaattaygctgttattgtttattcatcaattcctttactaaatatttagtaataatctgagtctctataaatttttgaagacaattaattaatagcagctaaaactgacctaataaatactctgtaccacttactgtgttaaacccttcacatattttatgtgtgaagttagactgttacacataagtagtatta

SEQ ID NO: 688026 - DNA, 2727 bp, Homo sapiens
  misc_feature 706, 707, 708, 709, 710, 711, 712, 713, 714, 715, 716, 717,718, 719, 720, 721, 722, 723, 724, 725, 726, 727, 728, 729,730, 731, 732, 733, 734, 735, 736, 737, 738, 739, 740, 741,742, 743, 744, 745, 746, 747, 748, 749, 750, 751, 752: n = A,T,C or G
  misc_feature 753, 754, 755, 756, 757, 758, 759, 760, 761, 762, 763, 764,765, 766, 767, 768, 769, 770, 771, 772, 773, 774, 775, 776,777, 778, 779, 780, 781, 782, 783, 784, 785, 786, 787, 788,789, 790, 791, 792, 793, 794, 795, 796, 797, 798, 799: n = A,T,C or G
  misc_feature 800, 801, 802, 803, 804, 805: n = A,T,C or G
atgtgataaagactcacaaagaaaagaggggtctgtaattagacactgaggttagcaaatgccctactgaacaggtaatagttaagctgaagccagaaagattagagggagctacaagacagcctatgggaaagaaaagtccaggcagaccaaacagcttgcccgtggtcctaaaataagtttagcttgtttaaagacaaaaagagggtcagaattctgagaacattgagaatttgaaggagacctaaaataagctctgaaaaggaccggctctgctcctgctattagtcagctagtcttctgttgctgtgtaacaaaaggcctcaaaatctcaatggcataaaataatgggcatttagttatcactaataaatattagtcagctgaagtgtccctccttctttctttttctccttcttctccccttctcctcatcctccttttatttatttagtatcctattagaaatattaaaggtttatgtcctgagttcagaacagactgtatgctataatttaattacatattaggtctctgctataagagatgagatgagtaaatatgtataaagtgctttgattagtgtgaggcacatttagccttcaaagattaagacttattatgtgagaactacaaaaataaacaaatgagaatcctgaataattttgagtaggatggaactactgactaagaattactgaattcnnnnnnnnnnnnnnnnnnnnnnnnnnnnnnnnnnnnnnnnnnnnnnnnnnnnnnnnnnnnnnnnnnnnnnnnnnnnnnnnnnnnnnnnnnnnnnnnnnnnctcttcactgacaacagaggatttgctccttaagcctcagagacaaactagtctccttccaccccagatctagttggaggcacctcctttatattcccagaacaatgcaaactttcctaatacagcattcatgctactatagtgaatgaacccatttatttgttattctgttatacatcaagcaatataagagaagggtcattttatcctcagtgcaaaatagagtatattttcagggtctggagcacagcaagcacttaagatatatttgctaaataagaattgaatttatagaccctatgacatcctaaggactgcactatttgcagaacaaggagaaacagattgtgccctcaaatatctcaaaaacaaactgatgcattatattgtgaaaagtgcagaatagaagcttgtacagagtgctatgagaacatgtgttttgttcattaagcatgtatgtagtattttctgattggcataatcctatctataatactgtatgataactattaatgatgatacccatattatagatgagtaaattgagacaaatataattaatgtgcctgagcatatgttggtaatgaatagtaaaacagatttgaatagaggtagcctggctccattatctcaactgctatgctgtactagctctcctatggaaaggggctcttcaacacagcacttatagttctttcttctaatggaaaaatgttgcatgatgaggtttcagaaccatgttgcaaaaaaagacttgctctattttttttatgagaaacttgttgagatatcccctccacccttaataagtacagagtctatgtttttcagtttctaatactctattaacaatgtactgttaaaacatgacctgcaatagggattgatcattgtatttacagtatgaaatttactgtcatatataatactagggaaaaagtacttatttttataatatctgttaattttaaaaatacctgtgtttccagcaataaaaactattttataaaattttaaaaaaacttgctaatcttctaccctgcattatttatcagtgacactaggttttatagtagttactttgattggttacataaacatatcagaagtctaggctcttaaacacaaaatgctgtaatatatgggattgcaactgccatctatgaagggaaaaaaagaaaccttttattttctagcatacttaattaacagcttcctacctcataggaatgtcaaactgtagaacaagtaaaatctatttttaaaaaatgatttataattgcattgagagaaaataaattttatataccctaaaactatattgataggtattttacacccacmaattttatacaaattttagaggaaaatgaagtagatatatttgtaaaatcatgatcaagcagttgaagtcatagtttttgaagaaaccaagctgttctctggtatttaaaacttgtgaacaagtgttaattaccatccaagctgccagattctctttcattaattgctaataaattacagctgctaataaattacagatgcatataaagttcactttcccaaaacaaaggaggtaatatagtaatatcaaacaccataagttctcataactacatgaaaaaacaaaatgacttttacattttagaaagtgtctgaagaagtggatagaagagatggttggttattttacacgagttatttctcgaagttctaaattagagatttatcttatacatgaaattttcttaatgaagcctttttggtatttggcaagtggtccagtatggattatctcacccagatatcctctggctataaagcccttaaaacatatctatatatttataatacagttctaagtggctggttattgtgcatatcaccattaatttctaccttgatactttcacatgcacatg

SEQ ID NO: 688027 - DNA, 2727 bp, Homo sapiens
  misc_feature 706, 707, 708, 709, 710, 711, 712, 713, 714, 715, 716, 717,718, 719, 720, 721, 722, 723, 724, 725, 726, 727, 728, 729,730, 731, 732, 733, 734, 735, 736, 737, 738, 739, 740, 741,742, 743, 744, 745, 746, 747, 748, 749, 750, 751, 752: n = A,T,C or G
  misc_feature 753, 754, 755, 756, 757, 758, 759, 760, 761, 762, 763, 764,765, 766, 767, 768, 769, 770, 771, 772, 773, 774, 775, 776,777, 778, 779, 780, 781, 782, 783, 784, 785, 786, 787, 788,789, 790, 791, 792, 793, 794, 795, 796, 797, 798, 799: n = A,T,C or G
  misc_feature 800, 801, 802, 803, 804, 805: n = A,T,C or G
atgtgataaagactcacaaagaaaagaggggtctgtaattagacactgaggttagcaaatgccctactgaacaggtaatagttaagctgaagccagaaagattagagggagctacaagacagcctatgggaaagaaaagtccaggcagaccaaacagcttgcccgtggtcctaaaataagtttagcttgtttaaagacaaaaagagggtcagaattctgagaacattgagaatttgaaggagacctaaaataagctctgaaaaggaccggctctgctcctgctattagtcagctagtcttctgttgctgtgtaacaaaaggcctcaaaatctcaatggcataaaataatgggcatttagttatcactaataaatattagtcagctgaagtgtccctccttctttctttttctccttcttctccccttctcctcatcctccttttatttatttagtatcctattagaaatattaaaggtttatgtcctgagttcagaacagactgtatgctataatttaattacatattaggtctctgctataagagatgagatgagtaaatatgtataaagtgctttgattagtgtgaggcacatttagccttcaaagattaagacttattatgtgagaactacaaaaataaacaaatgagaatcctgaataattttgagtaggatggaactactgactaagaattactgaattcnnnnnnnnnnnnnnnnnnnnnnnnnnnnnnnnnnnnnnnnnnnnnnnnnnnnnnnnnnnnnnnnnnnnnnnnnnnnnnnnnnnnnnnnnnnnnnnnnnnnctcttcactgacaacagaggatttgctccttaagcctcagagacaaactagtctccttccaccccagatctagttggaggcacctcctttatattcccagaacaatgcaaactttcctaatacagcattcatgctactatagtgaatgaacccatttatttgttattctgttatacatcaagcaatataagagaagggtcattttatcctcagtgcaaaatagagtatattttcagggtctggagcacagcaagcacttaagatatatttgctaaataagaattgaatttatagaccctatgacatcctaaggactgcactatttgcagaacaaggagaaacagattgtgccctcaaatatctcaaaaacaaactgatgcattatattgtgaaaagtgcagaatagaagcttgtacagagtgctatgagaacatgtgttttgttcattaagcatgtatgtagtattttctgattggcataatcctatctataatactgtatgataactattaatgatgatacccatattatagatgagtaaattgagacaaatataattaatgtgcctgagcatatgttggtaatgaatagtaaaacagatttgaatagaggtagcctggctccattatctcaactgctatgctgtactagctctcctatggaaaggggctcttcaacacagcacttatagttctttcttctaatggaaaaatgttgcatgatgaggtttcagaaccatgttgcaaaaaaagacttgctctattttttttatgagaaacttgttgagatatcccctccacccttaataagtacagagtctatgtttttcagtttctaatactctattaacaatgtactgttaaaacatgacctgcaatagggattgatcattgtatttacagtatgaaatttactgtcatatataatactagggaaaaagtacttatttttataatatctgttaattttaaaaatacctgtgtttccagcaataaaaactattttataaaattttaaaaaaacttgctaatcttctaccctgcattatttatcagtgacactaggttttatagtagttactttgattggttacataaacatatcagaagtctaggctcttaaacacaaaatgctgtaatatatgggattgcaactgccatctatgaagggaaaaaaagaaaccttttattttctagcatacttaattaacagcttcctacctcataggaatgtcaaactgtagaacaagtaaaatctatttttaaaaaatgatttataattgcattgagagaaaataaattttatataccctaaaactatattgataggtattttacacccaccaattttatacaaattttagaggaaaatgaagtagatatatttgtaaaatcatgatcaagcagttgaagtcatagtttttgaagaaaccaagctgttctctggtatttaaaacttgtgaacaagtgttaattaccatccaagctgccagattctctttcattaattgctaataaattacagmtgctaataaattacagatgcatataaagttcactttcccaaaacaaaggaggtaatatagtaatatcaaacaccataagttctcataactacatgaaaaaacaaaatgacttttacattttagaaagtgtctgaagaagtggatagaagagatggttggttattttacacgagttatttctcgaagttctaaattagagatttatcttatacatgaaattttcttaatgaagcctttttggtatttggcaagtggtccagtatggattatctcacccagatatcctctggctataaagcccttaaaacatatctatatatttataatacagttctaagtggctggttattgtgcatatcaccattaatttctaccttgatactttcacatgcacatg

SEQ ID NO: 688028 - DNA, 613 bp, Homo sapiens
tgagctatggtgttacaagggttccaacaccactgagtgatataaatttatccatttcattataatctgctgggaccactgtcatatatgtggtccaccactgactgaaatattatgtggtatataactgcatatacaatttttatttgtcaacagtaaacatataaggagaaaaaagaacatctcttgctactggaagggaatgtcttactctgtgtaagtgggtacgcataagacatatataggcttttagataaattcttgttattagaaataatgttaactggtaatttgaggctttgcttagtatcttaattcttttttttaattattatgtttcaagttctgggatacatatgcmgaacgtgaaggttcgttacataggtatatacatgccacggtagttgctgcacctatcaacccgtcatctacattaagtatttctcctaatgctatccctcccctagccccccaccccctgacagaccctggtgtgtgatgttcccctccctgtgtccatgtgttctcaatgttcaactcccacttataagtgacagcatgtggtgtttggttttctgttcctgtgttagtttgctgagaatgatggttttca

SEQ ID NO: 688029 - DNA, 613 bp, Homo sapiens
tgagctatggtgttacaagggttccaacaccactgagtgatataaatttatccatttcattataatctgctgggaccactgtcatatatgtggtccaccactgactgaaatattatgtggtatataactgcatatacaatttttatttgtcaacagtaaacatataaggagaaaaaagaacatctcttgctactggaagggaatgtcttactctgtgtaagtgggtacgcataagacatatataggcttttagataaattcttgttattagaaataatgttaactggtaatttgaggctttgcttagtatcttaattcttttttttaattattatgtttcaagttctgggatacatatgccgaacgtgaaggttcgttacataggtatatacatgccayggtagttgctgcacctatcaacccgtcatctacattaagtatttctcctaatgctatccctcccctagccccccaccccctgacagaccctggtgtgtgatgttcccctccctgtgtccatgtgttctcaatgttcaactcccacttataagtgacagcatgtggtgtttggttttctgttcctgtgttagtttgctgagaatgatggttttca

SEQ ID NO: 688030 - DNA, 1951 bp, Homo sapiens
caccagacctaggagtaatgacattttgacccagctgagcagttaagtgggcccagactagaactgctcagctgactcagaattatcaaaaataacatattttgttgtttaagtcaaaatgttttggggcgatcacgacacagcaagaattaactgacacagttcccacttgtgatttccctataatattctcttttgctttataccactggatacatgttctgtgctatggttgtggcagagaaggaggtggtagtagtgaagataagacaagcaattgggatcaagttgcccagcactacgcaatcaacttatttactttgtattgagagggaaggaaatattaaatcaattgtggctaaacacagtctacacttaatagcaaatatttatgttgtagataaaatatttcttggtgacagctttttactgaagagaatgttattgaagatcttttcttctattatttaaatatactgcctagcttattttgtaaaacttcttggaaagaaccttaattacttcccatgctaaacttgtttggcaatgtaagcctcattaaagaatagatattaaagaacatttctattatgcttcctccaaatcatttggtctaatcctcttctaaccataaaacatctaatataaatgcaaatatttgttattactaataactgtggatagaccctatttaataaatggcaggcattgccaagaaaattgtggcgagctcgtaaattcaaacatagctgacttccatcaatcaaaaataaattggctatgtttatcataaagaaaacaaaagcccatttaaaacacacaatacttaatgagttatagactttatatttgtgattgtatgggacaactcattcagaccccaaatgccaggcttctttcttcttagtctactcttagtctacttagtctgcttgtctttgaccaaacagcattaaccctgcatatggaaagaayataaggcttagtcagaagaatgctgtttgattctcagtactagaatgaaccagctatgtactgtagaataattagacaacataatacattgacaaacaaatttttttcttaactctaaatagcaactgttgaacatttgctatgtgctgggcactggtaagtaaactttatataagatatctcattaattctcacagacaaccttagatttagactttatcattagtctcactttacatatcaagaaactaaggtttggagggtttagtttacttgtgtaaaatgctaaaccttgtgatttgtagagctgggattctgaacagatctggctccagagtttgaatttgtaattattctcccattgtccctcactatacatattacctccatttcagttttcttgggaatcgtcttcatttcaatatcaaaggattataaaaaggataaaataaggatgcatatgcaagagtttatgtactttaaatattagtattcatttaacaaataattataagcagatactatgcaagtagcaattgccacactgatttcaaccaacccagcatatggatacaaactgtgtatggatacagaaagtgttctaaaagtcagaactgtcctctctgacacagaaattaaaaagttagcaatgtatccaaaatattttcattactttaatatctccgtcaatcatctgtgaacgtacatgaatattttcgaattagtatgtgtatcttcattttgtacctctggggtaacaagttccatatgtttgttctcaactgagttgtccttttgtttgtagcttgaagtctctctcaaatttcagacaatgtttctggtattctgaaaagttatgaatgagtttatattcaacttatttagacccttcatgattgcataagctccaattatatctttctatgtctttgtcttctcatggtcccaatctgaagagtcatgatatgtttgagac

SEQ ID NO: 688031 - DNA, 1951 bp, Homo sapiens
caccagacctaggagtaatgacattttgacccagctgagcagttaagtgggcccagactagaactgctcagctgactcagaattatcaaaaataacatattttgttgtttaagtcaaaatgttttggggcgatcacgacacagcaagaattaactgacacagttcccacttgtgatttccctataatattctcttttgctttataccactggatacatgttctgtgctatggttgtggcagagaaggaggtggtagtagtgaagataagacaagcaattgggatcaagttgcccagcactacgcaatcaacttatttactttgtattgagagggaaggaaatattaaatcaattgtggctaaacacagtctacacttaatagcaaatatttatgttgtagataaaatatttcttggtgacagctttttactgaagagaatgttattgaagatcttttcttctattatttaaatatactgcctagcttattttgtaaaacttcttggaaagaaccttaattacttcccatgctaaacttgtttggcaatgtaagcctcattaaagaatagatattaaagaacatttctattatgcttcctccaaatcatttggtctaatcctcttctaaccataaaacatctaatataaatgcaaatatttgttattactaataactgtggatagaccctatttaataaatggcaggcattgccaagaaaattgtggcgagctcgtaaattcaaacatagctgacttccatcaatcaaaaataaattggctatgtttatcataaagaaaacaaaagcccatttaaaacacacaatacttaatgagttatagactttatatttgtgattgtatgggacaactcattcagaccccaaatgccaggcttctttcttcttagtctactcttagtctacttagtctgcttgtctttgaccaaacagcattaaccctgcatatggaaagaacataaggcttagtcagaagaatgctgtttgattctcagtactagaatgaaccagctatgtactgtagaataattagacaacataatacattgacaaacaaatttttttcttaactctaaatagcaactgttgaacatttgctatgtgctgggcactggtaagtaaactttatataagatatctcattaattctcacagacaaccttagatttagactttatcattagtctcactttacatatcaagaaactaaggtttggagggtttagtttacttgtgtaaaatgctaaaccttgtgatttgtagagctgggattctgaacagatctggctccagagtttgaatttgtaattattctcccattgtccctcactatacatattacctccatttcagttttcttgggaatcgtcttcatttcaatatcaaaggattataaaaaggataaaataaggatgcatatgcaagagtttatgtactttaaatattagtattcatttaacraataattataagcagatactatgcaagtagcaattgccacactgatttcaaccaacccagcatatggatacaaactgtgtatggatacagaaagtgttctaaaagtcagaactgtcctctctgacacagaaattaaaaagttagcaatgtatccaaaatattttcattactttaatatctccgtcaatcatctgtgaacgtacatgaatattttcgaattagtatgtgtatcttcattttgtacctctggggtaacaagttccatatgtttgttctcaactgagttgtccttttgtttgtagcttgaagtctctctcaaatttcagacaatgtttctggtattctgaaaagttatgaatgagtttatattcaacttatttagacccttcatgattgcataagctccaattatatctttctatgtctttgtcttctcatggtcccaatctgaagagtcatgatatgtttgagac

SEQ ID NO: 688032 - DNA, 2403 bp, Homo sapiens
aaaaggattgagaaaattggaaaaaacagaggatctgtaatccttggtggaaacaaatgttcaataatttcattaggtgtaacttaatgtcaccagaaccataaattacctagtggaaattttagtgtttcacacttagcttcgattcaattatctattgagttatgcaatgactattactgactgtgtgctaaggagagtgaaaagctctgatgtcatagttatgtatgaaacatgccctctctgccctaaaagrgttcaaggagtgggaaggagacctatacaaattgctaaaataataaaaaaatacaatggaggtatgaaacaaggtcactggtagcgcttatgtgtgcttacagattcagagcagtcttcacataggtggtaatgcttatttcctcatgtagaagggtacaactcttctagctgacaggaatgaaaagcattgcgaacagaaagattagactttccaaaggtctaaggaacctgtaagtagttctgtataattacaggggagttatgtaggttttatgtcagaaaaaaaaaaaaagataggccacatgaaaagttcaaaatttttcctaaaagtaatgggtagctaaaatctagttctgagctgggaagtaatataaatatatatttttgcagaaacactcagacaaagtactcaccataatagttctcaaactgtagtatgcatccgaaccaccggaagggctagctaacccagggtttgctgagccttactcccaggatttctgattcgctatgtctggatgagacctgagaaaacaatttgtaacaagttctcaggtgatgctcatgttgcacatctcgggactataccttgagaactcctgggaaagaaaatagaatggaggcaggcaggaccaaaccagaggctataactcaaagccatctctcctttttatagaaaatgtttacttaatcctctcaataacctttaacaaagttagtgtttgccatcagtgagttttttacattattattccttttctaaagaaatacatcatctacttttctttttgagacggaggctcactctgtcacccaggctggagtgcagtggtgctatctctgctcactacaacctctgcctcctgggttcaagcgattctccctgtctcagcctccctagtagcggggattacaggtgccccaggcgcccatcatcatgcccggctaatttttgtatttttagtagagatggggtttcgccatgttgaccaggctgatctcaaactcctgacctcaggcgatctgctcgccttggcctcccaaagtgctgggattacaggcatgagccactgcgcctggcccatcatctacatttttagaggttagagtaagaggggaatttttttcaaaaaacatgcatataaacatatgcgtgtgtgtgtattcaattcgtttttccttttttttttctttttcttttttactgttagaagggagcaccacatgggtgaaagtaaggaccaaggttaaaaatgatgtttcctttatggcccatgaatttgctgggtgcttcaatacaccttttagctttcttgagggttagctgtgcttaaactgtgaagtcagggaatgatgtcacgctaagcccactcccctcaccccaacacacgtacaaaaacccagtgtgcacgtgattcctctcctctcatctgtcaggaacctagagaagcctttgttcttctgagtgggtgggctccttggagatcattaaaccttagtgacctttgcttcccatagaagagtataccctgccaggctgtgagaccagaacacttgcttccttgcttcccatctgcaaggacagtcctggttccatgagcctggagtacatagctgctccttatattacttgaaagggaaagaatgacgaaaaccacttgtaccagatgcagttcagccctgacaatctggcttatggagtctggtccttgcctggaagattctgcatgcaaatgcttactggacttttcaatctccctgttcagggcttacacgtgaaccactttcgatgtctttttgactgcttctggatgttattagctgaatcgtttttaatcagatattggcaggcatattaccatctctgccagttagaaactggttagacactataaagcaaaagtcagttatctaacgcagctgtgatgtggtagaaagagtactggaattgcagttttacaaagctggttgtgagtcctaaacctgcccaataatttagttgagagaatttgggcatgtgactgagccacttcattttcttcctctgttcaaagggcacagtaatacttccatcacagtgtgaaggcacattcagtgggagaatacaagggaatgcatatgatgtaatatacaatgtataatgta

SEQ ID NO: 688033 - DNA, 1171 bp, Homo sapiens
  misc_feature 567, 568, 569, 570, 571, 572, 573, 574, 575, 576, 577, 578,579, 580, 581, 582, 583, 584, 585, 586, 587, 588, 589, 590,591, 592, 593, 594, 595, 596, 597, 598, 599, 600, 601, 602,603, 604, 605, 606, 607, 608, 609, 610, 611, 612, 613: n = A,T,C or G
  misc_feature 614, 615, 616, 617, 618, 619, 620, 621, 622, 623, 624, 625,626, 627, 628, 629, 630, 631, 632, 633, 634, 635, 636, 637,638, 639, 640, 641, 642, 643, 644, 645, 646, 647, 648, 649,650, 651, 652, 653, 654, 655, 656, 657, 658, 659, 660: n = A,T,C or G
  misc_feature 661, 662, 663, 664, 665, 666: n = A,T,C or G
catgtgtttaggaatgaggaataggaaaggtctgctataatgtatattttcattattgtaaacacatccttaacaaataataaaagtgagcacagtatctaactttctctaagaggcattaagtactctcacttgaaggttacatgttacaaagctgtgtaaaagttaaaaataaataaataaaattttagcccgttagaggttcctgaattctaatcatctgatgtatgggttctcatttaaaatttctgaaaagagaatgaggatacataatataaccttttctccctttgcttatatttcatcccaataaagatgcacagtccactttgggaggccgcggcgggcgggcggatcacgaggtcaggagattgagaccatcctggctaacacggtgaaaccccatctctactaaaaatacaaaaaatcagccaggcgtggtggcaggcgcctgtagtcccagctactcgggagcaggggaatggcgtgaacctgcggggcttgcagtgagctgagataatagcgccactgaactccagcctgggagacagagcaagactccgcctnnnnnnnnnnnnnnnnnnnnnnnnnnnnnnnnnnnnnnnnnnnnnnnnnnnnnnnnnnnnnnnnnnnnnnnnnnnnnnnnnnnnnnnnnnnnnnnnnnnnatttttagtaatatatgtactaatatttttgtatagtaataaataccactaaatgtttatattgctgatactagtaaaattggagaagttttatgtatatttatgtacattttacgtatttttttcttagttacatttttaggttttgcaaatccagaatttttatcccatctgattattaatgtatracaataattatgtcaataattatgacaataagattgtctgataacattttcttaaagaatgaatcttttaccttagcatacatgtgattctatcgagacactgcaaggatactagcgactgtcccataggggcacacaggtgtttcatgttgttgctttctacttctgataacagatcatgaagctatgtcatgacatgccctctaggcttttggtagctgatattttcaaatatcagagttttgtattcgccctcagatttcaacagatttcagcaagataccaagtcagctccaacaaatgtggaaaaacaatct

SEQ ID NO: 688034 - DNA, 1282 bp, Homo sapiens
aaccttcaccctccctcaacaactattcccattattttctttgtgcaggataaacatcttgaaacacctctgccccatcgctaagtaggccaatcttccacagcgtctagaaaccagtacagaaaaaatgcagtttgaccttgctgtcattgtttgcagtgtaatgaggaaaacaggcattaaataactaaccatacaaataattgtgtaattaaaactgtggcacatgatacaaagaagatgtacaggatgatggaagggcacataaaggagaaagcccaggaagcctttattgagatattgatgtttaactaggtttagaaggggcaaaaggaggtrggaagaatgtctcatgccgggggaggaatacgatgcaaaggccttggcaggacaaaaggccagtgtggctggaccctggggatcatctaggagaatggctggagatggatgggtctagagcctggaggagattcccctacaaggtctctcagccatgttggagattttggtttttgacttaagagtcctagtgagatattgaaatgttttaaacatgagagatatgtgatcaaatcacattggctgctgtgaggagaacagatcggagaggtacaagaaaggacactgggacacacacacacacacacgcacacacacacacacacacacacacctttcaacaggctgacaatgccctgtgtacagatagcagtaagagcatgaaactgagatctgattcagagaagactgaagtcattgcacgtcatttcttcctaatcttttagaaacaacccactccttcattctgtcttatggtgggcacttgtaagtgggctgctacttcttatttattttttaaccaattttgtgaaacaacagatgtggtgcttctcttgtggttgttattctcaaagagaggatgttggttgcagcagacaatttatcggagcccattttctcccttggcttcagcagggagccaggggctgggggtgctaagttgggcaggagtggaatccacccttctgtcagccgctggcttgaaagcaagcattagcacgtattcaatttggtctgggagctctcctctggacaccgaacctggtccttatctatttttcccattaataatgagctgttaaatcacattgctcatgccatttgcaagatagcaacgtgtggtttaattgtgcctgctctgttcccccatcatctcaatcctcctcctaatggcttggcaggcggggcagggctgcttgggaaccactggctcaggcctgcc

SEQ ID NO: 688035 - DNA, 668 bp, Homo sapiens
taagatttgaattttaactgggtagggactctggtctctcgagccacatccatttgccaagggtaattcagcagaatgtcaagatgtagctaggaaaaagcagaaagtgttaggagactgatacttgcccatttccactagctggatctagctctgtggcttttggcagccctctttattgtctctgggcctctgattttttttttttttttttttaaataagagagaaagggagatggagggaagttacatgtgccaggtaccatattaggctctaaayagagcaaccatatcatttaatctttccaatagtttacaaggtaggtgatgttattatccccatagtacaggtgagaaatactgaggcagaaagcgagattaagtcacttgcccattctctgttgtagactcaacttcttagctatgtcatcctgtcatatgtccttgtgtcaacaatgtctttgtggtgcaaagcccaagtcattttgctttaccatgctgtgcatcttcaagactttttccagatcttagtttgctcagtctcatctatagaatttcttcaggaaacaacacaagaaaaacaacgatttgattatctagctctacattcacctatcctcactttcccagactaaggtaatgaaagtggaaccaagtagcctcgtttg

SEQ ID NO: 688036 - DNA, 668 bp, Homo sapiens
taagatttgaattttaactgggtagggactctggtctctcgagccacatccatttgccaagggtaattcagcagaatgtcaagatgtagctaggaaaaagcagaaagtgttaggagactgatacttgcccatttccactagctggatctagctctgtggcttttggcagccctctttattgtctctgggcctctgattttttttttttttttttttaaataagagagaaagggagatggagggaagttacatgtgccaggtaccatattaggctctaaacagagcaaccatatcatttaatctttccaatagtttacaaggtaggtgaygttattatccccatagtacaggtgagaaatactgaggcagaaagcgagattaagtcacttgcccattctctgttgtagactcaacttcttagctatgtcatcctgtcatatgtccttgtgtcaacaatgtctttgtggtgcaaagcccaagtcattttgctttaccatgctgtgcatcttcaagactttttccagatcttagtttgctcagtctcatctatagaatttcttcaggaaacaacacaagaaaaacaacgatttgattatctagctctacattcacctatcctcactttcccagactaaggtaatgaaagtggaaccaagtagcctcgtttg

SEQ ID NO: 688037 - DNA, 2831 bp, Homo sapiens
gtcagggaccctctgtatttcgactttcataataacaataagatagctaacacttaaatagtggttactatatgtaaaagctttttacatgtattaatccaatccacaacaaacctttgctatatccccatttcacagatgttgaaattgaggctcagagaagttaagtaattccatcaagatcacatgaacccaaaatcacatggctggtaagtgcgagttagggtttgaacccaggcaatctgactccagagactgggatcataactgggattgctacatgacattgctcatattcaactgtccactgctctgagttcccctctcaatttagacagcagacacctcgtgttttttgtgccctgtagatccccagtgctcagcactgtggctggctcatcayaggtgttcaaaataaacaggtggatcccagctgagtacaaatgaggcaaagcaaaatactgggcaagatatggggcccaaggaaggagaaagcctttcaggattggaggcaccaagaaaggatgcgtgtccttaagaagggctattcttgggactctgacaaagtgctaccgggcagcaagatttagatcaattcaggaaaattaatctttaaccttaaactgatgttagaaatgtgtttaagggatccctgactatgctaacagtttttggaatgtgaatttcttccctagacaccttctggagcccccatgggctgcctggatcagcctgaaatgtatgtcatctatgtggccttgcccaaactgccccatctgctcctgaacctgcaggggcttggagagcagtctaacctggccttggagcggaggccatgtctctctgcacaatcctcagggcccccacagctctctcctcctcctgaaatccttccagccatgaatctaaacccttcgctgataaatcctttatccttttaaatgactctgttaggttttgtctcctgctcaaggccagagtcagccctttagaaaaaggaaagaggccatccagagccatccattggccttcctgtcactattgtgccttaattgaatgcctttatgttgggggaggccattacgatcatttttccttattaattgcccatccatttttgcctctgaatagccttcttgggcaattttggacaccatccgctgccaccgccttggacgtagattctgctcacggagatgtgctggctccaatgaaacaatggttaccgggctctgagtctgcaacttaaagtgaacactccccgtccctggaggcattgtgattcagagcactgagaggtgaaggctgggtcagactgcaagtcccaagttggagcacagggaagctggaagaagggctgtgtctctaaatggttaggtttcagcagctcagggttgttttgatgatactggggcctgtggtgtctgcagagggaaagcagtccgcctgacctcatagggttgggggccacagtcagctgcaaatagctgcctcaatgctggctgaaaaagtaggtccccaaggggagctaagaggacacagcctgtctgtggcttctattgaaggagaatggatgttttcttcaggcccatcaccctgagcattggaggttaatgttaattgacatttactgtgtgctgggcctggggctttagacgaagtgtcctggactggaagatccctgaggacagggatcctgtttgtttgcaagtttgttcattctgagcattcttattgactgctcactgtttgccagcactgtgctgagctgggaggcaagacagacccagtccttctgtcatggagcctccaggaaggtgggccaggctgatgatggaacagaccagagactgtaaccgtgaattaatgggacacgtaactgaaagtaaaggaggtcaatggctaaagataatatttctaaggaaagggcaattgatttgagaaggagctagcaaggggagtgttgggaggtgggagcaccttccagaaagagagaacagcatgtacaaaggtcctaagataagacaaaactttgtgtcttcagggagcaaaaagaaggtcctgtggctaaaacagtggttcttactgtgggtctctgggccagcagcagcagcatcacctgcgaacaggttagaaatgcaaattctcaggccccagcccagatttactgaatcacagactctgggggtcaggggtaggcagcaagccttccaggtaattcagatgtacctgagagctggagaaccactggacttaagcaagaggcagagtgactttagaagactcagagaactggtaggtcttggtagggccaggttgggtcaggtaactgccatagcgagattagattctaagtgcaattggaagacaccaaaagagtttcagcacttgggtgatataatgtaatatttatttacaaaaatgtttatggctgctatgtggaaaagtgatgggttggaaggttggagaccagcttggagtctgtttaccatatccctagcacctagaaccacaagtagtatatagtaggtgctcagtagctgtttactgacagaatcatcacattttaggccactatatgctctcatagcaccctgtaaattccattcatagtatttgctacatatgaaattgaatgaattgtacataatctctctcccattctgctgtaatttctacaaggcaagaatagctactagatataatgcctggcacttagggcctcagtgaatatttgttgaatgaataactgaatataaccacagcatctctatgaatgggcactattattatgccattttacatgacaagaggtaagtaaattgtctcag

SEQ ID NO: 688038 - DNA, 2120 bp, Homo sapiens
  misc_feature 633, 634, 635, 636, 637, 638, 639, 640, 641, 642, 643, 644,645, 646, 647, 648, 649, 650, 651, 652, 653, 654, 655, 656,657, 658, 659, 660, 661, 662, 663, 664, 665, 666, 667, 668,669, 670, 671, 672, 673, 674, 675, 676, 677, 678, 679: n = A,T,C or G
  misc_feature 680, 681, 682, 683, 684, 685, 686, 687, 688, 689, 690, 691,692, 693, 694, 695, 696, 697, 698, 699, 700, 701, 702, 703,704, 705, 706, 707, 708, 709, 710, 711, 712, 713, 714, 715,716, 717, 718, 719, 720, 721, 722, 723, 724, 725, 726: n = A,T,C or G
  misc_feature 727, 728, 729, 730, 731, 732: n = A,T,C or G
ttttttcctatttctttccagttggatgttttgggtgagattaaagcaattctagcaaatgtcaggggctcaactgcccagtgcattagaataaaatttcattttctccttagagttttaggggcagtgattctaaggctttaggggggaaacattgatgaaatctaaagaaccagcaaagagaaggtggggcaaacaattatcttctcatcttgcctgctgctgctgattgcattatcatttatcgcagtgcctgctctcacctaggaaaagcatcttgcaatatcgggttgaataaatatcccaaccatcggtgcgggaatacaagcccaaatcagccaaatcttcagtgcatttgcatctaatccctttataatcctttctatggaatgcagtaaaagctgagcaagacattccagccttccctgggtgcacaggacacacacacccttgctcaaactccataatgtaattatccaaggtgcctcctttgagggtttggggccccagcactcatgctaatgacgtagttcctgtccaagatgattttgtgcacttgcatgcgcatgcacacacagacacacacacccacacacacaaacacactaataaacaataggggacgaaacctcnnnnnnnnnnnnnnnnnnnnnnnnnnnnnnnnnnnnnnnnnnnnnnnnnnnnnnnnnnnnnnnnnnnnnnnnnnnnnnnnnnnnnnnnnnnnnnnnnnnntttgcagatgcggcttcaattaaggtgtagacccttgggaaagggacactggggaccttgtatcttcacagtatcagagaccccccctcagctgagacagtctcatcacctcttctgtggggtaaagggaaccttctggatacttctttctctgtccatggagaaacagaccctcagacagtagaagagatgctgagttctgggcccaggccaggattgactgaatggtagactcctgagagcagattcccaatgtcctttgagtcactgtctgtccaagtgactcaaagcatcctgggggagaaaactgtctgctttaccccaaagaaagcaggacagacagggtcaccctctagactggaagacctgtcagtaggcatgtgaaatactgcatgaagagtttggactcatgccttgcccatagtaagtactcaataaatggccacacctggtcattcatttgtacattatttgtatttgtacaggtatttgtatataattatgtcaataataatgcaaaggtggaatttattatttgttattattaggtgtcactattgagcaataactagctgctaattttctatgcattattgaatttaatatttctaacaatgctgtggaatargtattacgatccccaatttagaggtaaagcaactgatgatttatgaaatcactccctgtagggtacacatctgggaaggacaaaagtgagatgctaacccaaggccatctgaccccagctttccctccctcacctttatcttgccatctatacatttgtgccacgtgattaagcataattcataatgcgctgctttagttgttctcaatgagaatactctctatccatagccattcctgtttagcaatgcctgcacattgagtgagtataaaggatgacagtctcaaatgcactgaagtgttattgcgactaataaagctagttataacatcactgtatttagagtagcttcttttcattttgcatcttttcaatcaacggatacaaaaagcaaaattactaaggtggaggagggcagtggtcccagaaaccttgcagttctgattcaccaacccaacccctttattttacacatggagaaattgtgggagaaagaggggcactgccatgtctgggatcacttagtgacagcatgtgatatttatcttgctttcctgaagctggaggaggtggggaacgtacttcctaatttttaggatgtctctggctttttacatccatgactcccctaaactctagaagcatgcattagctatctcttgatgtgcaacaaattatccctaaactttgtggcttggagcaacaacagtttgtgtctgtcagtaaatccaaagacagttcaactgggtcctctactttg

SEQ ID NO: 688039 - DNA, 2120 bp, Homo sapiens
  misc_feature 633, 634, 635, 636, 637, 638, 639, 640, 641, 642, 643, 644,645, 646, 647, 648, 649, 650, 651, 652, 653, 654, 655, 656,657, 658, 659, 660, 661, 662, 663, 664, 665, 666, 667, 668,669, 670, 671, 672, 673, 674, 675, 676, 677, 678, 679: n = A,T,C or G
  misc_feature 680, 681, 682, 683, 684, 685, 686, 687, 688, 689, 690, 691,692, 693, 694, 695, 696, 697, 698, 699, 700, 701, 702, 703,704, 705, 706, 707, 708, 709, 710, 711, 712, 713, 714, 715,716, 717, 718, 719, 720, 721, 722, 723, 724, 725, 726: n = A,T,C or G
  misc_feature 727, 728, 729, 730, 731, 732: n = A,T,C or G
ttttttcctatttctttccagttggatgttttgggtgagattaaagcaattctagcaaatgtcaggggctcaactgcccagtgcattagaataaaatttcattttctccttagagttttaggggcagtgattctaaggctttaggggggaaacattgatgaaatctaaagaaccagcaaagagaaggtggggcaaacaattatcttctcatcttgcctgctgctgctgattgcattatcatttatcgcagtgcctgctctcacctaggaaaagcatcttgcaatatcgggttgaataaatatcccaaccatcggtgcgggaatacaagcccaaatcagccaaatcttcagtgcatttgcatctaatccctttataatcctttctatggaatgcagtaaaagctgagcaagacattccagccttccctgggtgcacaggacacacacacccttgctcaaactccataatgtaattatccaaggtgcctcctttgagggtttggggccccagcactcatgctaatgacgtagttcctgtccaagatgattttgtgcacttgcatgcgcatgcacacacagacacacacacccacacacacaaacacactaataaacaataggggacgaaacctcnnnnnnnnnnnnnnnnnnnnnnnnnnnnnnnnnnnnnnnnnnnnnnnnnnnnnnnnnnnnnnnnnnnnnnnnnnnnnnnnnnnnnnnnnnnnnnnnnnnntttgcagatgcggcttcaattaaggtgtagacccttgggaaagggacactggggaccttgtatcttcacagtatcagagaccccccctcagctgagacagtctcatcacctcttctgtggggtaaagggaaccttctggatacttctttctctgtccatggagaaacagaccctcagacagtagaagagatgctgagttctgggcccaggccaggattgactgaatggtagactcctgagagcagattcccaatgtcctttgagtcactgtctgtccaagtgactcaaagcatcctgggggagaaaactgtctgctttaccccaaagaaagcaggacagacagggtcaccctctagactggaagacctgtcagtaggcatgtgaaatactgcatgaagagtttggactcatgccttgcccatagtaagtactcaataaatggccacacctggtcattcatttgtacattatttgtatttgtacaggtatttgtatataattatgtcaataataatgcaaaggtggaatttattatttgttattattaggtgtcactattgagcaataactagctgctaattttctatgcattattgaatttaatatttctaacaatgctgtggaataagtattacgatccccaatttagaggtaaagcaactgatgatttatgaaatcactccctgtagggtacacatctgggaaggacaaaagtgagatgctaacccaaggccatctgaccccagctttccctccctcacctttatcttgccatctatacatttgtgccacgtgattaagcataattcataatgcgctgctttagttgttctcaatgagaatactctcyatccatagccattcctgtttagcaatgcctgcacattgagtgagtataaaggatgacagtctcaaatgcactgaagtgttattgcgactaataaagctagttataacatcactgtatttagagtagcttcttttcattttgcatcttttcaatcaacggatacaaaaagcaaaattactaaggtggaggagggcagtggtcccagaaaccttgcagttctgattcaccaacccaacccctttattttacacatggagaaattgtgggagaaagaggggcactgccatgtctgggatcacttagtgacagcatgtgatatttatcttgctttcctgaagctggaggaggtggggaacgtacttcctaatttttaggatgtctctggctttttacatccatgactcccctaaactctagaagcatgcattagctatctcttgatgtgcaacaaattatccctaaactttgtggcttggagcaacaacagtttgtgtctgtcagtaaatccaaagacagttcaactgggtcctctactttg

SEQ ID NO: 688040 - DNA, 617 bp, Homo sapiens
tcctgagaacttatcaatatttaaagagaagagaatacaaaaaaaaaaacagagtttacacaagtagatatgtatagaaattatcatatcaccaatagttttatagaagcagaaaggataataccttttgaattaatagactaattataaaaatgattatttttctactctcatgccactaggaaaaacaatgtttactaataagattttaatattttttacttacaaaatttgaaaagataacttcaagttttctacttaataggcattagtcaaatataaatgactcttgctcacaccttccttttggtcatggatatacattttttcaaagttccacacttcaaaagtttttcttctaaatgtatggacagttattaagataatttggcattctcacagcactcaatttgcttckaatgtgttaattctgtaattggctcaaattacatgttaaaaatttatacaaataattttgcataactatggggtataatgtgaagttttgatatgtgtttacaatgtgaaatgattaaatcaagctaattaacaaattcatcaccccacatgagtacctattttttgtactgaaattatttaaaaacttatttttagca

SEQ ID NO: 688041 - DNA, 1295 bp, Homo sapiens
ggaggcagagcttgcacatttccatcaatgacaaattattcggttatatctccaaatttgttcacacataattttcccaatgtagatctcatcatttcaaatgcagtttttatcctacaaatgtgtcaaacttctatacagtatgccaaagtgcaaaataaaaccagtttttaagtgtaagataaaagcctgaggctagcagtattggacagttgggcagacacaaatgttctgtttttgtacatgtaagactttttggcctgggtgtgtaccaagattgatatttttttaagctaccagtctaattagtttgttagctccccttctcgtaaaggctggatgcagaaggttggaaagaggtcactgtgtgccagcatcagaggcagctgtcaagcaaaacaagactccctggggattgttagaactagctaaataaaatttttaaattggaggaaatcagcgccagtcattcaaattaataaggtaatatcacaccttttaacaccaacacatttataacttggtctagttacagtctacctttatttaaaataatgatgaattccagaaacagagaagttgctttttaacaaagagttttcttctaagctaatcattctgccaaataagtaaatatttaaagattattactattttaggctaacatttcaaaggttaactccacttgattatgtgaatgccctgtgatcttacctcaactgttccctgataatatgcttccatctctctatctccatagattgcatatttcttttcccttccccttctcatcccttttggctaccatatggagtctttccttcttttcactcctaaactcacaggatttctctctactttcgcatcattcactttcctattgattcccagcaagatggtttgtaacccatctactcctctgatgaaccagcagtgttgaaagccacaaaaaattttcttaagggttaaattcaatggatatcgactatcaaacctcatgcctactcagtgctttgttaggaccaaagactttttyctcttgtctttcttttctttttcttcttcttcttttccttttattttattttattatttatttagttatttattttttgagacagagtctcactctgtggccaggctggagggcagtggcatgatctcggctcactgcaaactccatctcccaggttgaagcgatccttctgcctcagccccactactagctgggattacaggcatgtgccactatgcctagctaatttttttatttttagtagagacagggtttcacc

SEQ ID NO: 688042 - DNA, 640 bp, Homo sapiens
ctaaagactcaatttctagttgatgtttgaggtgaggcaaaaataaagctaargtagaaaacttaagctttgtgggatttatttatgcgcctggcatgttgacttaaggaactcaaccttatgtacaggcttggcatttaaaaaaaactggtggctgggtgtggtggctcactcctgtaatctcagcactttgggaggctgagaggatcacttgagcccaggagttcaagactagcctgggcaacatggtgaaactccatctctaccaaaaaaaaaaaaaaaaaaaaaaaaaagttagctgggcatgtaatcccagctatctgagaggctgaggtgggaggatcacctgagtctgagaggtccaggattcagtgagccatagtcaggccactctacctccagcctgaagtacagtgacagagtgagaccctgtctcaaaacaaaaaaaacacagaacaaacaaaataataaaattggtatttcatttccgggtgctaatatcagccagtattttgtaaatgtactgtagttaggtttaaactgttagtgattttgatggaaagtgatgtattatgaattacttttagttatattttctttagtggccattcatcttgaaaaacacaggtttttttttttt

SEQ ID NO: 688043 - DNA, 640 bp, Homo sapiens
ctaaagactcaatttctagttgatgtttgaggtgaggcaaaaataaagctaaagtagaaaacttaagctttgtgggatttatttatgcgcctggcatgttgacttaaggaactcaaccttatgtacaggcttggcatttaaaraaaactggtggctgggtgtggtggctcactcctgtaatctcagcactttgggaggctgagaggatcacttgagcccaggagttcaagactagcctgggcaacatggtgaaactccatctctaccaaaaaaaaaaaaaaaaaaaaaaaaaagttagctgggcatgtaatcccagctatctgagaggctgaggtgggaggatcacctgagtctgagaggtccaggattcagtgagccatagtcaggccactctacctccagcctgaagtacagtgacagagtgagaccctgtctcaaaacaaaaaaaacacagaacaaacaaaataataaaattggtatttcatttccgggtgctaatatcagccagtattttgtaaatgtactgtagttaggtttaaactgttagtgattttgatggaaagtgatgtattatgaattacttttagttatattttctttagtggccattcatcttgaaaaacacaggtttttttttttt

SEQ ID NO: 688044 - DNA, 2026 bp, Homo sapiens
gaaagaaagaaaaaaaaaaaaacagtttctttccagcacacacagtacttaccctggggaaaattctgctacttacaaatctctccatcataatactcttttaatgatatttatccccctacagactgatgcccaggtaaaactgctcggtagctctgctttttatatagctctgaacaaaaccacatattttcccacataatctstgctactaacagactttaaacttttttcctaaaataaggtaggagtctgatatcttatttttaacattttgtatactgtatccttatttatcgtgtattctgattaggacatgacagtaccagatatattttaaaagggatatcatatactaactccttttgatgaatttccatcgaatgactctgtttctgaaacccgactaattgattcactggtaaaactgattgacttggataatttttcatctctctccccagagtcatccaagctgcttcttcctggacttctgtaagaaacacatcattatagaaatataaggtcacctccacacaaataaatgatttggtctcctcactgaggtcatttcctatgataaaacagtttgataataaatggactactgtaatatagcaaataaatgtttacttataacaaggctatcttcttaaattacatgcaagttgatatcatttctgaaaacaagatacactcacatgggattctataaatctcaaaaacattaaaaaattaacaaagtacaaatggccgtaacagtaactaatcaaatgaaaattgctcctttaaatttcatttgtgtacaaccacaaagcttggacaggtacagagtagatgtttgagttagatactagatcgcacaagaaggcagttttatatctccttccttctgactcagtctcagctgaaatggcgaagccctcccagaagtggacgctcaagatgtctgagcctaagcccattggccactcctgcctcctcactcttcccagccctaagaacaaggtttaagaaacagctgtcaaatgatcatatggccaagactataataaatgtcctgggatctgctttccctttctcaaggagcaaaaagaaaggaaaacctattaaatacaatgggagcacaactgatctaatttccaatgctcaacaggatggaggtgagatgtggaaaaacagagaggaaaggaggaggaagaaggaaggagagattgcaaataaagaggaagaagatggaagaaccgaggaaataaaggtttgaaacagatatgcttctttcagagactgaagaacaggaaaagaagtagaagagagaatgaggatcctgccacacactttcttagaaagcattcaggccgaccgggcatgatggctcatgcctgtaatcccaacactttgggaggctgaggtgagctgatcatgaggtcaagagatcgagaccatcctggccaacatggtgaaatgccgtctctactaaaaaaaaaaaaaaatgcaaaaattagctgggcgtggtggcacgcacctgaagtctcagctacttgggaggctgaggcagaagactcgcttgaacccggaggcagaggttgcagtgagccaagatcacgccactgcactccagcctggtgacagagtgagactcgatctccaaaaaaaaaagaaagaaagaaaagaaaaaaagaaagcattcaggccaggtgcagtggctgacacctgtaatcccagcactttgggaggccgaggcagggtggatcacttaaggtcaggagttcaagaccagcctcatcaacatggcaaaatctctactgaaaatacaaaaagtagccaggcgtggtggtgggcaccgcaatcccagctacttgggaggctgaggcaggagaatcgcttgaacccaggaggcggaggttgcagtgagccaagatcgcaccactgtgctccagcctgggtgacagagtgagactcagtctcaaaaaagaaaaaaaagaaagcattcaatcgccagaagaaaacagcagctagtcaaaaa

SEQ ID NO: 688045 - DNA, 603 bp, Homo sapiens
ttttgttgttcaattataaaaactgtatccagactggattatgagaatgctgtttgcaggcaccataaccacagatgcccctgggctgaacatcaggctcactgcaatcttcccaaagaaggaaatatacttccagctgctgcaccagacccatccttcttggaaagaggacaaaatcacagcaggtgaaccttttctggaatatctgaactaygcatttggggagatgagaggcagagataagagtggaaatagacttaactaatccactaacgtttatatggcttattcctacagaaatagcagagtgaacagtgaacacaactattcagtttgcctggaggtaagagaggtttttttcctgaattaccctatatgtcagcaccaccaacattcaccaataatacctcattttctgtgtcatttttgcttctgttgtcaatatctgtgagtcacaagaaaaaaaaaaatgcgtttgcttttcagtgtagctttctttcccttaaaagctggccagagaaagtttcacatgatgtttgtcaaaggaagctttaagtatttgtcaaagacacagcatatgtttggatgccttcttttccagcc

SEQ ID NO: 688046 - DNA, 364 bp, Homo sapiens
tagagccttttgtctaaagagcttaagcattctaacaatatacattccatttttaaaaaatcatatacattatttaaaatgtgcagttwgaaaccaaaattgtgtctaactgtctgctggagccctgtttttgttcttttagactgttttctgtagtgacttgggataaagcttcaatacttcagccacccttcttttttttttttttttttagcagattcaaagcaggattccttatgtgactctcccctacccctgcacccagttttgttttccttgtgcggagcccataatccaaaattagcacttataaacacctggcccaaatcaaaatttatattccttcagcactctgtagtcaggg

SEQ ID NO: 688047 - DNA, 364 bp, Homo sapiens
tagagccttttgtctaaagagcttaagcattctaacaatatacattccatttttaaaaaatcatatacattatttaaaatgtgcagttagaaaccaaaattgtgtctaactgtctgctggagccctgtttttgttcttttagactgttttctgtagtgacttgggataaagcttcaatacttcagccacccttcttttttttttttttttttagcagattcaaagcaggattccttatgtsactctcccctacccctgcacccagttttgttttccttgtgcggagcccataatccaaaattagcacttataaacacctggcccaaatcaaaatttatattccttcagcactctgtagtcaggg

SEQ ID NO: 688048 - DNA, 364 bp, Homo sapiens
tagagccttttgtctaaagagcttaagcattctaacaatatacattccatttttaaaaaatcatatacattatttaaaatgtgcagttagaaaccaaaattgtgtctaactgtctgctggagccctgtttttgttcttttagactgttttctgtagtgacttgggataaagcttcaatacttcagccacccttcttttttttttttttttttagcagattcaaagcaggattccttatgtgactctcccctacccctgcacccagttytgttttccttgtgcggagcccataatccaaaattagcacttataaacacctggcccaaatcaaaatttatattccttcagcactctgtagtcaggg

SEQ ID NO: 688049 - DNA, 642 bp, Homo sapiens
tggagtttaacagatgagtgcaaaactaggccctatcatctatgtggccatgtcagcaaagagaagagaatctggcttctgctcttatgtcaatccaactaacaggaattgaagcacctgaattaaacaatttgcaacctgtcaaaacttagcaagatcaagcatttaaaccaaactgaaagttttgaggggaaattttttattattatagtatytataataactgaaaattgaaaacaaagtaaaacaagcctctttcttaataggggattatggattaggagcatttaactaatggagacttccacttaaggtacaccactgaagaataagtttcctgtaggcatatgacttatggatacagtcttattccctcatatttgcatttttttaaatgaaagttctgtataagcattgcatactgaaagatctaaggaataatcaaccaaacaaaagccccacatgaatgatgcaagtaattaaatgaactgaagaattttactgtaaatatgaggatgctctatattactgttggggaaaatcaaggctcttaacctttctatttagggatgtttcataagtaaatttccacctaagctaccaagaaagctgggcatcagagaagaggcagaaaaactaagg

SEQ ID NO: 688050 - DNA, 646 bp, Homo sapiens
tcaccattttggccaggctggtctcgaactcctgatctcaggtgatccgcctgcctcggcctcccagagttgggattacaggtgtgagccaccgcgcctggcccaccttctaattttcaaataatttgtgatagctgtgctcacctgtgttgttgcaggctaggctctcctgggaggcagattgtgaggctgagattagcatgcaggaccttgggatcaatagctgcataaaggaggcaaaggaaactggattttgagcagagggtgagattgggtcctgattcagtcaatccaagggttcagtgcaccccagggggaggtctggcactgggcttctgggttctgatcagctgaggmaatgcccaaggggctgacatcagaagcagctgtcagagtccttcattcctaaagagatcttggtggcaaatcacagcatccaccacattctactcatttctttgttttagtgtatttttctccatctccagtgtattttttccacctctttgaaataaacattaattacagaatcctttgagattaaacaaagttacctgatctggtcatttattcctcagttgaaaaaattgatgtgaaactacttttctgtctaccgttactgtcttttggaagttaaatgctcttt

SEQ ID NO: 688051 - DNA, 588 bp, Homo sapiens
tgcctggcctgaacatatgttttgaaaaacaactgtgaacatttatggccttttaaaaaattttactaaaggttaagaagtgcattatcataaagggttgacttgtccaaacaaattcatatgtatcactgatcttatatagcaccacgctttgcaaagggtatacacaataaccagacacagacacagcatcctctagttttcctcagaggatctttgtgtccatcaggcttagttccctaatgttatctcagcactaccatctcatgcaatgtgacaaatttggaataacagatgagcactaactgtaggtgaaatatgtgccagcttataggaagtcatttagatttgggatttagtttttatacttaatcagacaagcaatttgaaacaaaaaacaaaaacaaaagacaggcaactaacttccattctccagccagctctgccccatcagtttattaattctaggtttatttatataagcaacctagattgatcagatacatcttattaaattattgttagctaagaaatttatattttttcttcctttattaaggatctttgttatcaaataygaactacttt

SEQ ID NO: 688052 - DNA, 2093 bp, Homo sapiens
ggcaggtgcttgtaatcccagctactctgaaggctgaggcaggagaatcgcaggagaatcgcttgaacccaggaggcagggttgcagtgagctgagattgcaccactgcactgcagcctgggcaacaacgtgagatactgtctcaaaaaaaaagaaaaaaataaaaagaaagaaaacactgagcccaaatgatctgatgaagcacaaaaaataggaagaacctagctaaacgtgttagaactgactgagaagtgtctctcaaactactgctgcatattccagcagcaaagagtcttagagagtagattcaattagaaaagaagagctcacaggaggccaggcaactcagaagtacccagccaggagaaaccagtttccatgatgcgtatggctcaaaagttaataggagacatgaggcctccctgacagactcaagcctgatccttgaaagggcagatgtactcataaaaggccaaaagaggttaagagtgtgggctcctgaggtggaccaactctgccacttactgtgtgacattgggcaaattacataacattctgtgactccattttttcatctgtaaaatggggataataatagcttctttctcatactgccacgaggcttaaaagagaaaatctatgtatcacttggaacagaccttggtataaatatagtaagtactcaataactgttggctattattagcagaaagacgacgtgctttggaatcaaatccattggggtttaatgcaaatgcatctgggtttaaatctgcctcctctgaaatgtttggcaaggtttttaagttctatgtttcagttacctcatgtgtaaaatgagaataataacatctaccttaaaggtaaaaacagcctagtcctaaaaggcaaggatatcagataagagatataaaattcgtaccaaaatgccttggacacagtaaatgcttattaaatatcaataccaatcctcctctcttctgaccttggaaagtctcagattgaacactggcaagctgttgcttcctctggtgtaaaggttttccttggacttatccaagaatcaggtggccgtttacctcattatgagagcagctccctactcatttgtgaaacaytaaacctcctgctaggaaaggagtcctgatgaatcttttttctcattaagtcattaaaaatgtacaaagacaaacacagagaaatttcaagaggcataggctcttacggtttatattagcaaaggttgcagctttttcttttttctcttaatgggaattttcaattctttcttaacttcttcagtttttctagcttttaacataactccacccaattataaaggtccgtccatttgagaaacacagaatatctaattaccaatttttgattctcattttgtattctgaaaaccatttttcaataatcataaaaacaaaagacatgcattttaaatgagatgtttttttaaaaaaaatctatcacatattcttaactgatttaatcatcacattacatgcctaccgagtatcattcaaataaatagcatatcatattttccatacttcttaactaaatattctgtgataacctggtgtaataccccaagtttttctaagataatagtcaatagcctattacttagatttatatttacttaaagcctggattttttttctaaccctgatggtttgtaattggtacctctatttgcttaataaactcccttgtcaactgtttagagagtttttttgtattttgtggttacatattgaatatgcacaaaaaatttatgacaaaatataaacacaaaatgtaacattaaaatgaattcctatagtttaagaacgggaccaagacccactagcctcaaaggcctctgtctgtcctccttggtcctatctctctcattgtacctttggccactccccaagtaaacactatcctgcattttgtatcaccattttctttatagtttaccatatatgtatgtttctgtaaataaaatgctatttaatattgtagtaaaatactgtttgtaaacttcatatgatgaaatccttccatatgcactcttttgcaatttgcttttggaa

SEQ ID NO: 688053 - DNA, 2093 bp, Homo sapiens
ggcaggtgcttgtaatcccagctactctgaaggctgaggcaggagaatcgcaggagaatcgcttgaacccaggaggcagggttgcagtgagctgagattgcaccactgcactgcagcctgggcaacaacgtgagatactgtctcaaaaaaaaagaaaaaaataaaaagaaagaaaacactgagcccaaatgatctgatgaagcacaaaaaataggaagaacctagctaaacgtgttagaactgactgagaagtgtctctcaaactactgctgcatattccagcagcaaagagtcttagagagtagattcaattagaaaagaagagctcacaggaggccaggcaactcagaagtacccagccaggagaaaccagtttccatgatgcgtatggctcaaaagttaataggagacatgaggcctccctgacagactcaagcctgatccttgaaagggcagatgtactcataaaaggccaaaagaggttaagagtgtgggctcctgaggtggaccaactctgccacttactgtgtgacattgggcaaattacataacattctgtgactccattttttcatctgtaaaatggggataataatagcttctttctcatactgccacgaggcttaaaagagaaaatctatgtatcacttggaacagaccttggtataaatatagtaagtactcaataactgttggctattattagcagaaagacgacgtgctttggaatcaaatccattggggtttaatgcaaatgcatctgggtttaaatctgcctcctctgaaatgtttggcaaggtttttaagttctatgtttcagttacctcatgtgtaaaatgagaataataacatctaccttaaaggtaaaaacagcctagtcctaaaaggcaaggatatcagataagagatataaaattcgtaccaaaatgccttggacacagtaaatgcttattaaatatcaataccaatcctcctctcttctgaccttggaaagtctcagattgaacactggcaagctgttgcttcctctggtgtaaaggttttccttggacttatccaagaatcaggtggccgtttacctcattatgagagcagctccctactcatttgtgaaacattaaacctcctgctaggaaaggagtcctgatgaatcttttttctcattaagtcattaaaaatgtacaaagacaaacacagagaaatttcaagaggcataggctcttacggtttatattagcaaaggttgcagctttttcttttttctcttaatgggaattttcaattctttcttaacttcttcagtttttctagcttttaacataactccacccaattataaaggtccrtccatttgagaaacacagaatatctaattaccaatttttgattctcattttgtattctgaaaaccatttttcaataatcataaaaacaaaagacatgcattttaaatgagatgtttttttaaaaaaaatctatcacatattcttaactgatttaatcatcacattacatgcctaccgagtatcattcaaataaatagcatatcatattttccatacttcttaactaaatattctgtgataacctggtgtaataccccaagtttttctaagataatagtcaatagcctattacttagatttatatttacttaaagcctggattttttttctaaccctgatggtttgtaattggtacctctatttgcttaataaactcccttgtcaactgtttagagagtttttttgtattttgtggttacatattgaatatgcacaaaaaatttatgacaaaatataaacacaaaatgtaacattaaaatgaattcctatagtttaagaacgggaccaagacccactagcctcaaaggcctctgtctgtcctccttggtcctatctctctcattgtacctttggccactccccaagtaaacactatcctgcattttgtatcaccattttctttatagtttaccatatatgtatgtttctgtaaataaaatgctatttaatattgtagtaaaatactgtttgtaaacttcatatgatgaaatccttccatatgcactcttttgcaatttgcttttggaa

SEQ ID NO: 688054 - DNA, 1195 bp, Homo sapiens
cgttgcccaggctgcaccttgaagtctttcaagaaccaacagaaggccagggaggggagcaaagtggatgagtgggagaaggatacttcctgagctctttcaaggaggtcagggcaagtcgcatagggttttgttaaccctgacgtggatttgagaaacatcagcacgcaaggaggtatctaaagctggaggcctggatgaggttgcctttgggaagtgaggaaacagcaaaaggaggggcttggtacagacctggatggctcaacctttagaggttgagcagagacgaggggactgcaaagaagcagccaggcaggtaagagttcagatgtcygggaagccacacgagaaagtgtttccaaaagcaacacatgctgttgaagaagcccagaaagaggaagatacagaggtggccaccgatccaatgacaacgtgcaagttgttgatgactttgacgagaccaggttcagtgttctttgggaggattgaggaggaatgtgatttaagaatagatgttcatgaccgtagaagtggaaatatgaatataaaggttaaggtttgtttgttttaagatgggacttactgtctttaaactgtctgcagtagaatggaagcaactaatgaaaatgaaggtggggatagaagccatatctccttggggtttttttcccccttaaggaaatatgaggcaaggttttcagggagggaagatggactgactgtaggaagagagagaagtaaataacttgctatactgtgaacatgtagtatgaccactggacagtatttacagcctattagaatttgagagattcaggactatttgttttttttaagtccatcactcttatcagtgattttgaccaaatttagttaataccgaagtcaggatctgaacccggggacgtcttgctcagagtctgggcatttgaccactccactccactccactccactccactccactgcctctccacgagttacagctgaaactagtccccagtcagcacagatctgtcatttctccagttctcctcagctatgagcgtgcatagagaaggcacagagttaggttttatgaccaaaagagagagatgagacagaattaaatgtgtttgcaagtcagtaagtatgctatgatggtgaaatcaaagaagtgaagaaccaccgttgtagataatgagcaaattgggga

SEQ ID NO: 688055 - DNA, 1195 bp, Homo sapiens
cgttgcccaggctgcaccttgaagtctttcaagaaccaacagaaggccagggaggggagcaaagtggatgagtgggagaaggatacttcctgagctctttcaaggaggtcagggcaagtcgcatagggttttgttaaccctgacgtggatttgagaaacatcagcacgcaaggaggtatctaaagctggaggcctggatgaggttgcctttgggaagtgaggaaacagcaaaaggaggggcttggtacagacctggatggctcaacctttagaggttgagcagagacgaggggactgcaaagaagcagccaggcaggtaagagttcagatgtctgggaagccacacgagaaagtgtttccaaaagcaacacatgctgttgaagaagcccagaaagaggaagatacagaggtggccaccgatccaatgacaacgtgcaagttgttgatgactttgacgagaccaggttcagtgttctttgggaggattgaggaggaatgtgatttaagaatagatgttcatgaccgtagaagtggaaatatgaatataaaggttaaggtttgtttgttttaagatgggacttactgtctttaaactgtctgcagtagaatggaagcaactaatgaaaatgaaggtggggatagaagccatatctccttggggtttttttcccccttaaggaaatatgaggcaaggttttcagggagggaagatggactgactgtaggaagagagagaagtaaataacttgctatactgtgaacatgtagtatgaccactggacagtatttacagcctattagaatttgagagattcaggactatttgttttttttaagtccatcactcttatcagtgattttgaccaaatttagttaatacygaagtcaggatctgaacccggggacgtcttgctcagagtctgggcatttgaccactccactccactccactccactccactccactgcctctccacgagttacagctgaaactagtccccagtcagcacagatctgtcatttctccagttctcctcagctatgagcgtgcatagagaaggcacagagttaggttttatgaccaaaagagagagatgagacagaattaaatgtgtttgcaagtcagtaagtatgctatgatggtgaaatcaaagaagtgaagaaccaccgttgtagataatgagcaaattgggga

SEQ ID NO: 688056 - DNA, 1195 bp, Homo sapiens
cgttgcccaggctgcaccttgaagtctttcaagaaccaacagaaggccagggaggggagcaaagtggatgagtgggagaaggatacttcctgagctctttcaaggaggtcagggcaagtcgcatagggttttgttaaccctgacgtggatttgagaaacatcagcacgcaaggaggtatctaaagctggaggcctggatgaggttgcctttgggaagtgaggaaacagcaaaaggaggggcttggtacagacctggatggctcaacctttagaggttgagcagagacgaggggactgcaaagaagcagccaggcaggtaagagttcagatgtctgggaagccacacgagaaagtgtttccaaaagcaacacatgctgttgaagaagcccagaaagaggaagatacagaggtggccaccgatccaatgacaacgtgcaagttgttgatgactttgacgagaccaggttcagtgttctttgggaggattgaggaggaatgtgatttaagaatagatgttcatgaccgtagaagtggaaatatgaatataaaggttaaggtttgtttgttttaagatgggacttactgtctttaaactgtctgcagtagaatggaagcaactaatgaaaatgaaggtggggatagaagccatatctccttggggtttttttcccccttaaggaaatatgaggcaaggttttcagggagggaagatggactgactgtaggaagagagagaagtaaataacttgctatactgtgaacatgtagtatgaccactggacagtatttacagcctattagaatttgagagattcaggactatttgttttttttaagtccatcactcttatcagtgattttgaccaaatttagttaataccgaagtcaggatctgaacccggggacgtcttgctcagagtctgggcatttgaccactccactccactccactccactccactccactgcctctccacgagttacagctgaaactagtccccagtcagcacagatctgtcatttctccagttctcctcagctatgagcrtgcatagagaaggcacagagttaggttttatgaccaaaagagagagatgagacagaattaaatgtgtttgcaagtcagtaagtatgctatgatggtgaaatcaaagaagtgaagaaccaccgttgtagataatgagcaaattgggga

SEQ ID NO: 688057 - DNA, 1195 bp, Homo sapiens
cgttgcccaggctgcaccttgaagtctttcaagaaccaacagaaggccagggaggggagcaaagtggatgagtgggagaaggatacttcctgagctctttcaaggaggtcagggcaagtcgcatagggttttgttaaccctgacgtggatttgagaaacatcagcacgcaaggaggtatctaaagctggaggcctggatgaggttgcctttgggaagtgaggaaacagcaaaaggaggggcttggtacagacctggatggctcaacctttagaggttgagcagagacgaggggactgcaaagaagcagccaggcaggtaagagttcagatgtctgggaagccacacgagaaagtgtttccaaaagcaacacatgctgttgaagaagcccagaaagaggaagatacagaggtggccaccgatccaatgacaacgtgcaagttgttgatgactttgacgagaccaggttcagtgttctttgggaggattgaggaggaatgtgatttaagaatagatgttcatgaccgtagaagtggaaatatgaatataaaggttaaggtttgtttgttttaagatgggacttactgtctttaaactgtctgcagtagaatggaagcaactaatgaaaatgaaggtggggatagaagccatatctccttggggtttttttcccccttaaggaaatatgaggcaaggttttcagggagggaagatggactgactgtaggaagagagagaagtaaataacttgctatactgtgaacatgtagtatgaccactggacagtatttacagcctattagaatttgagagattcaggactatttgttttttttaagtccatcactcttatcagtgattttgaccaaatttagttaataccgaagtcaggatctgaacccggggacgtcttgctcagagtctgggcatttgaccactccactccactccactccactccactccactgcctctccacgagttacagctgaaactagtccccagtcagcacagatctgtcatttctccagttctcctcagctatgagcgtgcatagagaaggcasagagttaggttttatgaccaaaagagagagatgagacagaattaaatgtgtttgcaagtcagtaagtatgctatgatggtgaaatcaaagaagtgaagaaccaccgttgtagataatgagcaaattgggga

SEQ ID NO: 688058 - DNA, 1195 bp, Homo sapiens
cgttgcccaggctgcaccttgaagtctttcaagaaccaacagaaggccagggaggggagcaaagtggatgagtgggagaaggatacttcctgagctctttcaaggaggtcagggcaagtcgcatagggttttgttaaccctgacgtggatttgagaaacatcagcacgcaaggaggtatctaaagctggaggcctggatgaggttgcctttgggaagtgaggaaacagcaaaaggaggggcttggtacagacctggatggctcaacctttagaggttgagcagagacgaggggactgcaaagaagcagccaggcaggtaagagttcagatgtctgggaagccacacgagaaagtgtttccaaaagcaacacatgctgttgaagaagcccagaaagaggaagatacagaggtggccaccgatccaatgacaacgtgcaagttgttgatgactttgacgagaccaggttcagtgttctttgggaggattgaggaggaatgtgatttaagaatagatgttcatgaccgtagaagtggaaatatgaatataaaggttaaggtttgtttgttttaagatgggacttactgtctttaaactgtctgcagtagaatggaagcaactaatgaaaatgaaggtggggatagaagccatatctccttggggtttttttcccccttaaggaaatatgaggcaaggttttcagggagggaagatggactgactgtaggaagagagagaagtaaataacttgctatactgtgaacatgtagtatgaccactggacagtatttacagcctattagaatttgagagattcaggactatttgttttttttaagtccatcactcttatcagtgattttgaccaaatttagttaataccgaagtcaggatctgaacccggggacgtcttgctcagagtctgggcatttgaccactccactccactccactccactccactccactgcctctccacgagttacagctgaaactagtccccagtcagcacagatctgtcatttctccagttctcctcagctatgagcgtgcatagagaaggcacagagttaggttttatgaccaaaagagagagatgagacagaattaaatgtgtttgcaagtcagtaagtatgckatgatggtgaaatcaaagaagtgaagaaccaccgttgtagataatgagcaaattgggga

SEQ ID NO: 688059 - DNA, 943 bp, Homo sapiens
atgtggaaaaattttaaaccattttctctccttccatatgggtaaatattatgaattatgagtttttacatttataatgtaaatgtttctcaataaccaaataatattgtttacattatygttctataagaagtatcatggtgttcatatccttctgcacttgtgttttcttttctttcttcttctttttaaaaaataaaccatcatgagatctgctttaagagcaatgaattgatgctgaatgtcttcatatctaaaggaaagtatctattcaaactttcttttttttttttttttttttttgagatggagtctcactctgtctcccaggctggagtgcagtggcgcaatctcggctcactgcaagctctgcctcccaggttcacgccattctcccacctcagcctccccagtagctgggactacaggcgcccacgaccacgcccagctaatttttttgtatttttagtagagctggggtttcaccgtgttagccaggatagtctcaatctcctgacctcgtgatctgcccacctcggcctcccaaagattacactcccaaagattataggcgtgagccaccgcgcctggcccaattcaaactttcaaacttcctggatcatacattaaatccctctgaactcttctaaatccctaggtggcaagtaaaattattataattagatataataaatattaatcattaagtatggttaatattttaaaactagcttattactttaggatacacatgtgtatatgtaaatgtataatagagtagagtagtatttttatgatcctttatggaacctaatgcccctcatttaactttcatggtagtcctctcttggcgaggttctaatatgggtaagtttcagttactatgctttagttaaaacaccagctactcctcaaaccatggtccaaatttcaatgaccaaat

SEQ ID NO: 688060 - DNA, 590 bp, Homo sapiens
gaacatagacattatgtaagatctgaagtttgaaaacctgaaacaaaagcagagcattatatccaagcacattggagacaactgtggaggaatcaaggaacatctagcagagatttaatgttttagggactgttttttatttcagaaggtaataagtgtaaaacartcaaactctaggcatagggatgaacattattttgtgtcataaatttgtctaatatagttgctgcttcagcatccagttttggcttgtcatggtcaaggtgaccagtcatgccctgtcacctttggttttattaaaattttccctcctttagtggttatttgtgatatagccctgttgttccccatctcactgaccccaaattcaacacatgccacagctgctggccacagtgaaaactaatgatcaacaccagtcatgtgaataagacgtcccttcatgtgttttctttaagctagcctatccacagccccatgggaaagcctaaagaatagtacctgtggattataataaagacgtcttactggttcttgctctctatccctctctctacacactggtcaagtacactcttgtctccagactt

SEQ ID NO: 688061 - DNA, 590 bp, Homo sapiens
gaacatagacattatgtaagatctgaagtttgaaaacctgaaacaaaagcagagcattatatccaagcacattggagacaactgtggaggaatcaaggaacatctagcagagatttaatgttttagggactgttttttatttcagaaggtaataagtgtaaaacagtcaaactctaggcatagggatgaacattattttgtgtcataaatttgtctaatatagttgctgcttcagcatccagttttggcttgtcatggtcaaggtgaccagtcatgccctgtcacctttggttttattaaaattttccctcctttagtggttatktgtgatatagccctgttgttccccatctcactgaccccaaattcaacacatgccacagctgctggccacagtgaaaactaatgatcaacaccagtcatgtgaataagacgtcccttcatgtgttttctttaagctagcctatccacagccccatgggaaagcctaaagaatagtacctgtggattataataaagacgtcttactggttcttgctctctatccctctctctacacactggtcaagtacactcttgtctccagactt

SEQ ID NO: 688062 - DNA, 590 bp, Homo sapiens
gaacatagacattatgtaagatctgaagtttgaaaacctgaaacaaaagcagagcattatatccaagcacattggagacaactgtggaggaatcaaggaacatctagcagagatttaatgttttagggactgttttttatttcagaaggtaataagtgtaaaacagtcaaactctaggcatagggatgaacattattttgtgtcataaatttgtctaatatagttgctgcttcagcatccagttttggcttgtcatggtcaaggtgaccagtcatgccctgtcacctttggttttattaaaattttccctcctttagtggttatttgtgatatagccctgttgttccccatctcactgaccccaaattcaacacatgccacagctgctggccacagtgaaaactaatgatcaacaccagtcatgtgaataagacgtcccttcatgtgttttctttaagctagcctatccacagccccatgggaaagcctaaagaatagtacctgtggattataataaagacgtctyactggttcttgctctctatccctctctctacacactggtcaagtacactcttgtctccagactt

SEQ ID NO: 688063 - DNA, 636 bp, Homo sapiens
aagttaatatttttgatgttttcttttgatatgttcttttagaatatgtaatatccctatttattggagatgtgtgctaaattatttacaaatatttgggtatctgaaatttactttcaaatgcaccaaaaataatagctatacaaaaagaaatacattaaatttactctatagtagtagttattctttctgagaggtttacacagtattttcctgttcttttgtatgtatgtatttttaaaagaacgtaggcctggcgcagtggctcacgcctataatcccagcactttgggaggccgaggtgggcggatcacgtggtcaggagatcgagaccatcctggctaacacggtaaaaccccgwctctactaaaaacacaaaaacaaaattagccaggcgtggtggcgggcgcctgtagtcccagctaatcaggaggctgaggcaggagaatggcgtgaacccgggaggcgaagcttgcagtgagccgagatcatgccactgcactccagcctgggcgacagagcgagactccgtctcaaaaaaaacaaaaacgaaaacaaaaacaacataaataaattgataatatatctattttgatacagtcatggttaacataaataatcctggttatatccata

SEQ ID NO: 688064 - DNA, 1399 bp, Homo sapiens
ttatkttatttctctttacaaaagcatggtctattagactgttatgagttatagatatcttaagaggaaaaatgtattccctatatgtacaaaaaagagaacattaaaaccccagcaatactccaaataaaaaccaaggtcatcccttgtcaactcattcatttcatgtaattaattcttttttgctctattttgaatttagtggtctcaggaacccatctgcttctcaactagaaatctggaatttgtgactcagtttgaacgtagagtttcaaatttatttaaatgataccatcagaagctggtacctaaaaatacctgacatagtccttttccactgaactctgagatagtccttctttgtttaagacaaagcaccatagctggtagccgatggcaattgctttcagggaaacagtgtaaaacaaaagctactggtagattacaaaagacttaaaatggatgttgttaacttatacctgataattttcaaaagtgaaagaactgataagagttcatatgaagactagtgcaacttaaacaaaatctgactgttcctattgcatgcaaaaatatattaaaatcaatcccaaatattttattaaaaaatctatattttttatatatcttcttttttttttgagacggagtctcgctctgccgcccaggctggagtgcagtggcgcgatctcggctcactgcaagctccacctcccgggttcacgccattctcctgcctcagcctcccgagtagctgggactacaagcgcccaccgctgcgcccggctaattttttttttgcatttttagtagagacggggtttcaccgtgttagccaggatggtctcgatctcctgacctcgtgatccgcccgccttggcctcccaaagtgctgggattacaggcgtgagccactacgcacgggctattttttatatatctataaaaataatgataactgtatttttaaagaaaagtatatattacatctaatttataaaaaaatggatgaacaaaaaattttcaggtataatattcccaagacataatatgccatgaatataccatgcatatagttagaatataccaagaatacatcaaggatatcagttaacaagattcagtgagtctagagtaagtcctaaatatctgtatattaataaatctaaacaggtaagtgacgtaaactggagaattgtggaacactgacccagaagatgcaaaattcaaattaaagaagtaaagtagcatccacgataacattaaaataaacagctaaaatgaccaataatattatattattgatgtctgatatcaggtaatacatccatcaggagtcctataagtagaaacatatcctggacagctagagtattgacaaatatttaggcactattca

SEQ ID NO: 688065 - DNA, 1399 bp, Homo sapiens
ttatgttatttctctttacaaaagcatggtctattagactgttatgagttatagatatcttaagaggaaaaatgtattccctatatgtacaaaaaagagaacattaaaaccccagcaatactccaaataaaaaccaaggtcatcccttgtcaactcattcatttcatgtaattaattcttttttgctctattttgaatttagtggtctcaggaacccatctgcttctcaactagaaatctggaatttgtgactcagtttgaacgtagagtttcaaatttatttaaatgataccatcagaagctggtacctaaaaatacctgacatagtccttttccactgaactctgagatagtccttctttgtttaagacaaagcaccatagctggtagccgatggcaattgctttcagggaaacagtgtaaaacaaaagctactggtagattacaaaagacttaaaatggatgttgttaacttatacctgataattttcaaaagtgaaagaactgataagagttcatatgaagactagtgcaacttaaacaaaatctgactgttcctattgcatgcaaaaatatattaaaatcaatcccaaatattttattaaaaaatctatattttttatatatcttcttttttttttgagacggagtctcgctctgccgcccaggctggagtgcagtggcgcgatctcggctcactgcaagctccacctcccgggttcacgccattctcctgcctcagcctcccgagtagctgggactacaagcgcccaccgctgcgcccggctaattttttttttgcatttttagtagagacggggtttcaccgtgttagccaggatggtctcgatctcctgacctcgtgatccgcccgccttggcctcccaaagtgctgggattacaggcgtgagccactacgcacgggctattttttatatatctataaaaataatgataactgtatttttaaagaaaagtatatattacatctaatttataaaaaaatggatgaacaaaaaattttcaggtataatattcccaagacataatatgccatgaatataccatgcatatagttagaatataccaagaatacatcaaggatatcagttaacaagattcagtgagtctagagtaagtcctaaatatctgtatattaataaatctaaacaggtaagtgacgtaaactggagaattgtggaacactgaccmagaagatgcaaaattcaaattaaagaagtaaagtagcatccacgataacattaaaataaacagctaaaatgaccaataatattatattattgatgtctgatatcaggtaatacatccatcaggagtcctataagtagaaacatatcctggacagctagagtattgacaaatatttaggcactattca

SEQ ID NO: 688066 - DNA, 610 bp, Homo sapiens
acacggtgctaagattaggtttatataagagaagggatacttcctcccttaaagcaggacagcaggaggaagaaagagagaatggatgaaaatgcaagcatatgtatgcatttggtagcaagattttcactattgagatgactttccactagaatctttatactacctaatgtcctttagcttcacagaatgcctaaacaccctaaagatatgcttgcttgctaaaatacccaaatgatgagcctaaggcttcctttcctttaaagcccctttggatgccactgctgaagtttgcctgaaacttctcttcattattgtactcaagtctaatttagcatgagtgtctcatttattgtttcaatatgttagtatacacaataggactatgatccaatcttttagaactgagaactctttctcctcctttggatgcccttctatctctgcactgmtccattagcattgattttaaagatgaactctcaaaggactaatttacttatatttcttagtgaagtttcctgctgtaaatctacatattcactgacaatctgatgaaaaagacaggtcctggagaggttaagaaaagggagagcatattcagttagag

SEQ ID NO: 688067 - DNA, 597 bp, Homo sapiens
tgtcttatgaaatcagttagaatgaacatcctaatattcacatttatataatttgatataaaatagtcacaggatacatattattaattttgaaattctwgttttaaaatttatgatctgtttaaagtacttcactttatttctgaggtctgggatcttatttagttgataatatctctgaattatctgagtaccatgagcctgtgtagcttattctgctgcctctaatgttgctgttgctgttttgaatatggaatgagtgtggtgagtggatttcttcaaccatttactaccatagaacctctagatatttccaccaaataaatagtagagaacaaaataaaataaatcaagtgtatttttacagctacattcacatctattagacagagtctttcatagaaattttatgaaagagcatcataatcctcacacttgtcacaacacacagtctaaacaggcaacctctattcactctaggacaatatctaagggacggtgtgaaggatattgcaggcatgcacacacacacacacacacacacacacacacacacacacacaagtttacaaatagaggtttaccttttaggtagtt

SEQ ID NO: 688068 - DNA, 673 bp, Homo sapiens
ttcagatgttggttggctcttttcctatttcccgtctcttggcttttctgcattacttttagaaagcatttmtcatcagtccttgagttctaaatttctgatattgtgcttctaaatttataaaaattcttaggctgttttccgctaagaatggggaagggacagctgtctagtaatgtaaaatgaagaacatcccatgctaaaaccgcttaatagttttccaccaatcctcattttatcccctcccaaacctccttaaccccagttctagacatatccggtcatttcctgagccatttaaggattttgtgttgttgataggattggttcttggctttcccttcacaggtgccattcacccatctgcttactagcttcaaattttgtttgctcttatctcctctctttccacttccttgtgggttctatctttttaaaaatattcattactgtggtttagagatgaatgcaaaatgatatatatttgtcaaattattcatctttatgcagaattctaaatagacgtctttattacagcttctagtggtttcctttaggacgctcatcacagtctctattttaaagagactggcaggtggtgtgtgattacttgtttgttgtttgtctcctcaagctggatgcatcgtggggtaggaatcatgtctgtattatt

SEQ ID NO: 688069 - DNA, 1182 bp, Homo sapiens
ctcctgagtagctgggacctcctcctgactcagcctcctgagtagctggtaccacaggcatgcatcacgacgcccagctaatatttgtatttttggtggagacagggtttcaccatgttgcccaggctggtctcaaactcctgacctcaagtgatccacctgccttggcctcccaaagtgttgggattaccgcacccagactcctttatgtttcaccctttcttttgacttaaatttgaaatgggkttttttccctcattttgtcttagaatgatgtattagaaactactctttaatcttatatttagtgtattgtttgtcttttctagggtatttattagagagtttgattcatcttttattaagatgctaaaggtattttcctgtctaccatgatatgcaaattaagactacagattttatagtctattgttttggtaataactcttttgagacagagtctcactctgtcacccaggctggagtgtggtggtgggatcatggctcactgcaacctctgtctcctgggttcaagcaattctcatgcctcagcctcccaagtagctgggattacagatgtgcaccaccacgcctggctaatttttgtgtttttagtagggacagggtttcaccatgttggccaggctagtctcgaactcctgacctcaagtgatctgcccacgttggcctcccaaagtgctgggattacaggtgtgagccactgtgcctggccatattttggtaatcttctaagagggcaaatatatgatgtgttttagttggtatttgaaggaactgccttgaaaatcagttgccatctaaaggattgaacagtgtagagcaatacatgatttgaatatcagaaacggcagggatttataattctgcaagacaggtataaaggtttaggtgtttttattctattttgggagatcacctttgtttatggattatcaaattaatttaaagtatttctatgtgaattcataatctcccactagtgattttttttgttcgaatgagccttaatctcctactagtgattttttgtttgaaggagccttgatcttggaccaccgaaaaggtaaaaccagtggcaagcttgaatgcttgttttatggtagacttagatacgagaacgggtaaagggtactggataaacttgggatataagattgtctt

SEQ ID NO: 688070 - DNA, 637 bp, Homo sapiens
gatcattatattatasgcctgcaggctgcctaggttgctgaggtcaacccaaggatcggattatgctgctgttgtcagcacttcagtttccactgagatcattcagttcaatctcatatttaacctttgacttcaagcttatcttcatccaaaatgctttgcagacactttgaaataacacatcatttacatatcattgccccagtacaagccaaaaccatagctatcaggatgtaacagcagtgtgagttttacttcaaggacacaggatgatgtttcttctgagcaaattaaaaaagagagttgtctaatggacccagggacatttaagacaccagaataaatatgataaaatcttgaataaaaagttctattttaataagaagtgaatagctaataagaaaattgaattgaatatcctgatattcattattactacattatatgaaatagcacagtaatgatttcatctttataaaaatcaatagttacattccatctctttaaacattaatattttatgaaaggtttaatgttttggatgttcaccacagaagacaatgttatttgctgatggatagtgaagaaatactttagcacattaaataacttaccaattgtttcaaatatgttaata

SEQ ID NO: 688071 - DNA, 2715 bp, Homo sapiens
atcatcatcatcatcatcatcrtcgtcgtcgtcgtctatggcaaagctgtgggaggaaaagtggcaaaggtcaacaaggtatcttggaacttttgactaacagaatgaaattctggaacagaaagaggtgggaaaaaaaatccattgaagttgcttaggttttgactctctttttagacattttgctttcctttcatattctgttttgttctgcttttccaaagaaataaaaagagatgaaaaaaacaagattgatagaatttgctatattaagatttcctgatgctgacctcaaaacagaagaagcaagtcctttttttttttttttttttttttttaagaaaatgtgtccccagccgggtgcggtggctcacacctgtaatcccagcactttgggaggccgagatgggcggatcatctgaggtcaggagttcgagaccagcctgaccaacatggagaaaccccgtctgtactaaaactacaaaaaaaattagccaggcgtggtggcacatgcttgtaatcccagctactcgggaggctgaggcaggagaattgcttgaacctgggaggtggaagttgtggtgagctgagatcgcgccattgaactccagactgggcaacaagagcaaaactccatctcaaaaaaaaaaaaaaaaaagaaagaaagaaaaggtgtccccttaaatgtggttataaatacttgttcttagcttctgacttccatttttgcaaagaaataaagtttgggtaaatatttcctactgcttccttagctaatggctttccaaagtttccatactgctagcttggtacctagtcataacattttcaagaaaaccaaaccaagccatgaagttctgttgtaagaacagctttatgtcttatgaattcacgcaccattgggctaggtaaaggtggatgatagtctacattgagacaagagtcatctggtaatttggcattgaatggcttttgtttattcctgagaacaagtattccctcccacagctgctctgtgaacagatggagataattttattttcatatactgctttgtaaactaacttgtacttttcagctaatgttttaccagacacactcatctaacttgcatgactgaacatttctcccataacctataagagaatgaattggttttgtgggtaatacaactgcttcccaatagccgaggtttctaccaaattctttacattaagtcgtacagtataacaagctaaaattctaatactctgtacaactgttatcctttaagtgacctgttacatggaagatattaaattcaggtactctgaaacacctgttttgaggcattagagaatacatttaacaaactttgacatcatagatggatttggcatgtaaggaaaatttgtgcaatacagttgaatttttcgtatccacttccaggtatgaactatttctcaaagcctaaataagtgcatactgactctagtgttagaattctttagtttaaccaatatacttcttgctttccaaatatgaacttttgcagggggagaatgattagttttataaaatgttgtaagttttgatgaccatcagctaacaaaagcatgaatttctatatgaattcaaaccaaaagtgaacttattaaatttagaattatgcaactttgatatgaactccttttccatactctcatgagcttaatatataacttaaatacaatacaattgtgagtaaaaactgtgacactaagtacagaaattcattgtgtttagtcacacaccacatctgcaacagaaaacagttatttctcatagttaattgtatagaaaatgtaatgaaagagttggactaatctagaccaccttaaaagggatcaggctgctattgtgcaagaaatatgcagtttttttgtttgtttgttttgtttttgagatggagtcttgctttcttgcccatgctggagtgcagtggtgcaatatcagctcactgcaacctccgcctcccaggttgaagcgattctcctacctcagcctcctgagtagctgggattacaggtgcgtgccaccacacccagctaatttctgtatttttagtagagatagggtttcaccatgttggtcaggctggtctcaaactcctgacctcatgatccacctgcttcagcctcccaaagtgctgggattacaggtgtgagccaccgtgcctggccgaaatatgcagtctttatggagctgtcaggtcttgagagtttgttcatttcatgcagaatagtaagacaggggtcacgtgtaaatgtatcaaccactcaatctgaccaagaaaggaatgacattaaggaaaaaaaaatcacgctctttggtgttctaattttacatttaagcagttagattatgtttctattaaaaatctgctctctcttaatttttaattcagtgttacatcctctcatctttaaaagtggaagtaaacggttaaggatatgctgtagtttatgtcatacacaatttcgtaaatcctgaaaaaggacaaacttcttgaccaggatatagtaaagagaaaaatccacttttctcctacaaattattctaagttcactgatgtttaatggcagtcataacaataagaaaaatgatttcttttggatttgtatcaagacagtcaattaaattatacatcaaattaggttgtaattgaaaaatctattattttctactgtatttcaa

SEQ ID NO: 688072 - DNA, 2715 bp, Homo sapiens
atcatcatcatcatcatcatcatcgtcgtcgtcgtctatggcaaagctgtgggaggaaaagtggcaaaggtcaacaaggtatcttggaacttttgactaayagaatgaaattctggaacagaaagaggtgggaaaaaaaatccattgaagttgcttaggttttgactctctttttagacattttgctttcctttcatattctgttttgttctgcttttccaaagaaataaaaagagatgaaaaaaacaagattgatagaatttgctatattaagatttcctgatgctgacctcaaaacagaagaagcaagtcctttttttttttttttttttttttttaagaaaatgtgtccccagccgggtgcggtggctcacacctgtaatcccagcactttgggaggccgagatgggcggatcatctgaggtcaggagttcgagaccagcctgaccaacatggagaaaccccgtctgtactaaaactacaaaaaaaattagccaggcgtggtggcacatgcttgtaatcccagctactcgggaggctgaggcaggagaattgcttgaacctgggaggtggaagttgtggtgagctgagatcgcgccattgaactccagactgggcaacaagagcaaaactccatctcaaaaaaaaaaaaaaaaaagaaagaaagaaaaggtgtccccttaaatgtggttataaatacttgttcttagcttctgacttccatttttgcaaagaaataaagtttgggtaaatatttcctactgcttccttagctaatggctttccaaagtttccatactgctagcttggtacctagtcataacattttcaagaaaaccaaaccaagccatgaagttctgttgtaagaacagctttatgtcttatgaattcacgcaccattgggctaggtaaaggtggatgatagtctacattgagacaagagtcatctggtaatttggcattgaatggcttttgtttattcctgagaacaagtattccctcccacagctgctctgtgaacagatggagataattttattttcatatactgctttgtaaactaacttgtacttttcagctaatgttttaccagacacactcatctaacttgcatgactgaacatttctcccataacctataagagaatgaattggttttgtgggtaatacaactgcttcccaatagccgaggtttctaccaaattctttacattaagtcgtacagtataacaagctaaaattctaatactctgtacaactgttatcctttaagtgacctgttacatggaagatattaaattcaggtactctgaaacacctgttttgaggcattagagaatacatttaacaaactttgacatcatagatggatttggcatgtaaggaaaatttgtgcaatacagttgaatttttcgtatccacttccaggtatgaactatttctcaaagcctaaataagtgcatactgactctagtgttagaattctttagtttaaccaatatacttcttgctttccaaatatgaacttttgcagggggagaatgattagttttataaaatgttgtaagttttgatgaccatcagctaacaaaagcatgaatttctatatgaattcaaaccaaaagtgaacttattaaatttagaattatgcaactttgatatgaactccttttccatactctcatgagcttaatatataacttaaatacaatacaattgtgagtaaaaactgtgacactaagtacagaaattcattgtgtttagtcacacaccacatctgcaacagaaaacagttatttctcatagttaattgtatagaaaatgtaatgaaagagttggactaatctagaccaccttaaaagggatcaggctgctattgtgcaagaaatatgcagtttttttgtttgtttgttttgtttttgagatggagtcttgctttcttgcccatgctggagtgcagtggtgcaatatcagctcactgcaacctccgcctcccaggttgaagcgattctcctacctcagcctcctgagtagctgggattacaggtgcgtgccaccacacccagctaatttctgtatttttagtagagatagggtttcaccatgttggtcaggctggtctcaaactcctgacctcatgatccacctgcttcagcctcccaaagtgctgggattacaggtgtgagccaccgtgcctggccgaaatatgcagtctttatggagctgtcaggtcttgagagtttgttcatttcatgcagaatagtaagacaggggtcacgtgtaaatgtatcaaccactcaatctgaccaagaaaggaatgacattaaggaaaaaaaaatcacgctctttggtgttctaattttacatttaagcagttagattatgtttctattaaaaatctgctctctcttaatttttaattcagtgttacatcctctcatctttaaaagtggaagtaaacggttaaggatatgctgtagtttatgtcatacacaatttcgtaaatcctgaaaaaggacaaacttcttgaccaggatatagtaaagagaaaaatccacttttctcctacaaattattctaagttcactgatgtttaatggcagtcataacaataagaaaaatgatttcttttggatttgtatcaagacagtcaattaaattatacatcaaattaggttgtaattgaaaaatctattattttctactgtatttcaa

SEQ ID NO: 688073 - DNA, 2715 bp, Homo sapiens
atcatcatcatcatcatcatcatcgtcgtcgtcgtctatggcaaagctgtgggaggaaaagtggcaaaggtcaacaaggtatcttggaacttttgactaacagaatgaaattctggaacagaaagaggtgggaaaaaaaatccattgaagttgcttaggttttgactctctttttagacattttgctttcctttcatattctgttttgttctgcttttccaaagaaataaaaagagatgaaaaaaacaagattgatagaatttgctatattaagatttcctgatgctgacctcaaaacagaagaagcaagtcctttttttttttttttttttttttttaaraaaatgtgtccccagccgggtgcggtggctcacacctgtaatcccagcactttgggaggccgagatgggcggatcatctgaggtcaggagttcgagaccagcctgaccaacatggagaaaccccgtctgtactaaaactacaaaaaaaattagccaggcgtggtggcacatgcttgtaatcccagctactcgggaggctgaggcaggagaattgcttgaacctgggaggtggaagttgtggtgagctgagatcgcgccattgaactccagactgggcaacaagagcaaaactccatctcaaaaaaaaaaaaaaaaaagaaagaaagaaaaggtgtccccttaaatgtggttataaatacttgttcttagcttctgacttccatttttgcaaagaaataaagtttgggtaaatatttcctactgcttccttagctaatggctttccaaagtttccatactgctagcttggtacctagtcataacattttcaagaaaaccaaaccaagccatgaagttctgttgtaagaacagctttatgtcttatgaattcacgcaccattgggctaggtaaaggtggatgatagtctacattgagacaagagtcatctggtaatttggcattgaatggcttttgtttattcctgagaacaagtattccctcccacagctgctctgtgaacagatggagataattttattttcatatactgctttgtaaactaacttgtacttttcagctaatgttttaccagacacactcatctaacttgcatgactgaacatttctcccataacctataagagaatgaattggttttgtgggtaatacaactgcttcccaatagccgaggtttctaccaaattctttacattaagtcgtacagtataacaagctaaaattctaatactctgtacaactgttatcctttaagtgacctgttacatggaagatattaaattcaggtactctgaaacacctgttttgaggcattagagaatacatttaacaaactttgacatcatagatggatttggcatgtaaggaaaatttgtgcaatacagttgaatttttcgtatccacttccaggtatgaactatttctcaaagcctaaataagtgcatactgactctagtgttagaattctttagtttaaccaatatacttcttgctttccaaatatgaacttttgcagggggagaatgattagttttataaaatgttgtaagttttgatgaccatcagctaacaaaagcatgaatttctatatgaattcaaaccaaaagtgaacttattaaatttagaattatgcaactttgatatgaactccttttccatactctcatgagcttaatatataacttaaatacaatacaattgtgagtaaaaactgtgacactaagtacagaaattcattgtgtttagtcacacaccacatctgcaacagaaaacagttatttctcatagttaattgtatagaaaatgtaatgaaagagttggactaatctagaccaccttaaaagggatcaggctgctattgtgcaagaaatatgcagtttttttgtttgtttgttttgtttttgagatggagtcttgctttcttgcccatgctggagtgcagtggtgcaatatcagctcactgcaacctccgcctcccaggttgaagcgattctcctacctcagcctcctgagtagctgggattacaggtgcgtgccaccacacccagctaatttctgtatttttagtagagatagggtttcaccatgttggtcaggctggtctcaaactcctgacctcatgatccacctgcttcagcctcccaaagtgctgggattacaggtgtgagccaccgtgcctggccgaaatatgcagtctttatggagctgtcaggtcttgagagtttgttcatttcatgcagaatagtaagacaggggtcacgtgtaaatgtatcaaccactcaatctgaccaagaaaggaatgacattaaggaaaaaaaaatcacgctctttggtgttctaattttacatttaagcagttagattatgtttctattaaaaatctgctctctcttaatttttaattcagtgttacatcctctcatctttaaaagtggaagtaaacggttaaggatatgctgtagtttatgtcatacacaatttcgtaaatcctgaaaaaggacaaacttcttgaccaggatatagtaaagagaaaaatccacttttctcctacaaattattctaagttcactgatgtttaatggcagtcataacaataagaaaaatgatttcttttggatttgtatcaagacagtcaattaaattatacatcaaattaggttgtaattgaaaaatctattattttctactgtatttcaa

SEQ ID NO: 688074 - DNA, 1405 bp, Homo sapiens
tggcttctaagatctagtccaactccaggattgtatgattcctggaggaaaaaaatacaagagaaaaccctgaagtcaaagcctaccactctgttcatcgtcctaatcagcctcataactacagtattaccctgccataaggtataaaaactagtattactgatagccagtaaaggtttattgaattccctctgtatgtacatgcagacctccattgcactatcgagaaaaattrtagaggtgttcagtctcaaaagaatgatatgaattgggtaaagttaaatagggaaaaatgggagttttacaggtaagcaaacgtatatacttgtggaaaggattaaggatttattaaatggggggaaaagcaagtataaaggcactaagttgaaagcaaaggcagccctggaggaaaagtaaggttacaaatagcattagaccatgtgaactgcaaccacagctgcaaacctaaggacagaccaaacttatattcagtatgcagagacttacaggtcacaatcttgatttcatttcgataagatgtaataaatacacatagaatctgagtcatttataaatatcaatctcaataaacaacatctaggtacctattcatatctagagaaatacttaaaaattaaaaaaattaatttggaaggacatatctttggaatgaagcacaaatttctttttttttttttttaacaatcgtttgtgtgaaatcattgatgtaagaaaagaggctgaaataagacttctgaatttatcactagcttaactaggaaacctacaatcaaatggtagaatttgagtttgagaagcagcatggtcaagtgcatcacaatcaaatccaagctagcctccttaatggaagaggaaccttgaataacctctgtggccagaactcactcatttgtttatttggagttgttgttttagagagacagggtctcgctctgttgctcaggctggggtgcagtgatgcaatcatagctcactgcagcctcgaactcctgggttcaagtgatcctcccacttcagcctcccgagtacctgagaatacagggtgtgccaccacgcctggctaattttttgattttgtagaaatggggtttcgctatattgcctaggctgatctccaactcctggcctcaagcaatcctcctgccttggcctccataagtgctgggattacagggatgagccagcatgcctcacctactcactcatttgtgaagtgaataaaataatttctacccagaagagttactgtaaggatcacagtgacagaacactaagagcctagaatgggatccattatatgttatacctcaaaaggttgcattcattattatatagtccacttagtcattggagcaacctattcagctatgcaagagagtaatta

SEQ ID NO: 688075 - DNA, 1405 bp, Homo sapiens
tggcttctaagatctagtccaactccaggattgtatgattcctggaggaaaaaaatacaagagaaaaccctgaagtcaaagcctaccactctgttcatcgtcctaatcagcctcataactacagtattaccctgccataaggtataaaaactagtattactgatagccagtaaaggtttattgaattccctctgtatgtacatgcagacctccattgcactatcgagaaaaattgtagaggtgttcagtctcaaaagaatgatatgaattgggtaaagttaaatagggaaaaatgggagttttacaggtaagcaaacgtatatacttgtggaaaggattaaggatttattaaatggggggaaaagcaagtataaaggcactaagttgaaagcaaaggcagccctggaggaaaagtaaggttacaaatagcattagaccatgtgaactgcaaccacagctgcaaacctaaggacagaccaaacttatattcagtatgcagagacttacaggtcacaatcttgatttcatttcgataagatgtaataaatacacatagaatctgagtcatttataaatatcaatctcaataaacaacatctaggtacctattcatatctagagaaatacttaaaaattaaaaaaattaatttggaaggacatatctttggaatgaagcacaaatttctttttttttttttttaacaatcgtttgtgtgaaatcattgatgtaagaaaagaggctgaaataagacttctgaatttatcactagcttaactaggaaacctacaatcaaatggtagaatttgagtttgagaagcagcatggtcaagtgcatcacaatcaaatccaagctagcctccttaatggaagaggaaccttgaataacctctgtggccagaactcactcatttgtttatttggagttgttgttttagagagacagggtctcgctctgttgctcaggctggggtgcagtgatgcaatcatagctcactgcagcctcgaactcctgggttcaagtgatcctcccacttcagcctcccgagtasctgagaatacagggtgtgccaccacgcctggctaattttttgattttgtagaaatggggtttcgctatattgcctaggctgatctccaactcctggcctcaagcaatcctcctgccttggcctccataagtgctgggattacagggatgagccagcatgcctcacctactcactcatttgtgaagtgaataaaataatttctacccagaagagttactgtaaggatcacagtgacagaacactaagagcctagaatgggatccattatatgttatacctcaaaaggttgcattcattattatatagtccacttagtcattggagcaacctattcagctatgcaagagagtaatta

SEQ ID NO: 688076 - DNA, 1405 bp, Homo sapiens
tggcttctaagatctagtccaactccaggattgtatgattcctggaggaaaaaaatacaagagaaaaccctgaagtcaaagcctaccactctgttcatcgtcctaatcagcctcataactacagtattaccctgccataaggtataaaaactagtattactgatagccagtaaaggtttattgaattccctctgtatgtacatgcagacctccattgcactatcgagaaaaattgtagaggtgttcagtctcaaaagaatgatatgaattgggtaaagttaaatagggaaaaatgggagttttacaggtaagcaaacgtatatacttgtggaaaggattaaggatttattaaatggggggaaaagcaagtataaaggcactaagttgaaagcaaaggcagccctggaggaaaagtaaggttacaaatagcattagaccatgtgaactgcaaccacagctgcaaacctaaggacagaccaaacttatattcagtatgcagagacttacaggtcacaatcttgatttcatttcgataagatgtaataaatacacatagaatctgagtcatttataaatatcaatctcaataaacaacatctaggtacctattcatatctagagaaatacttaaaaattaaaaaaattaatttggaaggacatatctttggaatgaagcacaaatttctttttttttttttttaacaatcgtttgtgtgaaatcattgatgtaagaaaagaggctgaaataagacttctgaatttatcactagcttaactaggaaacctacaatcaaatggtagaatttgagtttgagaagcagcatggtcaagtgcatcacaatcaaatccaagctagcctccttaatggaagaggaaccttgaataacctctgtggccagaactcactcatttgtttatttggagttgttgttttagagagacagggtctcgctctgttgctcaggctggggtgcagtgatgcaatcatagctcactgcagcctcgaactcctgggttcaagtgatcctcccacttcagcctcccgagtacctgagaatacagggtgtgccaccacgcctggctaattttttgattttgtagaaatggggtttcgctatattgcctaggctgatctccaactcctggcctcaagcaatcctcctgccttggcctccataagtgctgggattacagggatgagccagcatgcctcacctactcactcatttgtgaagtgaataaaataatttctacccagaagagttactgtaaggatcacagtgacagaacactaagagcctagaatggkatccattatatgttatacctcaaaaggttgcattcattattatatagtccacttagtcattggagcaacctattcagctatgcaagagagtaatta

SEQ ID NO: 688077 - DNA, 1643 bp, Homo sapiens
taactaaatgcatttggtttcttagttctttttgttttatacttggagaacaaattttaataattttttcaattaaagatggttggtgctcttacacttttcaaaactgaaagcataactaagtccagatgaattattataaggaaaggaactattttactctgtgacagccttggaacatattagaaagattttgaatacagtgatgtctattaattgactttaaagtcaacattaaaaaataaaagcagggaacaatttgtgggtaagaagagaggtttatgagaatttatggaaaaactatgatctaattcgagtctttgtatataaaaagttttatttttatctatggtgtttgctataaaatttttgttrcaatatattttaaataaaaactagtgatcattaaaataaaagtttttgaatgatatagcatataaattctttcaggcagtgaccaaattctcaaataagtttaaatttaaatttattattttacttgctctctcttccctcaactatgcaaatattattttataaaataatgtatttaggaatgcaataatatagatttgattagaattgtagtttttgcttgtgcactggattcgtttttgatttttttaaaagtcaccctgtttaataaaagtgcttctacaatttgtgtctaatttgaacatgactactgagagactgtattttatttcctagtagagtttccatcaggcagtgaacaaagagaaaataatagatgttttttaggaaggaaaacaaaacaatgttcttcttggtcaatggaagtacgtctcttgggtaataatgggtgcaaattatgtactgaaactcatcataaaaccttcaaaagcaaactaaaaaggcatatagagcagtaattttaaaaatcaaaatatgttctaaaatatttttataacttagattgaacagtttgtactgtggaaacacatttaatgttctttctttttagggggtaactattggtcaggaaaattaatgtttaatgtcacagaaaagacattccatttctaaaatgattgttaattcataacatggccactttatttgcagaacttaaatatagtaaaacatggtctaaaacttgaacctagaataaaaccaaagaaattacaaattatttctccttatatatattttttattttgtaatattatttttctctctctgtaagatataatgacagattaaatatctttctcaggtaatgattttcatttagttaacaaatgtttactaagcccttcctatgtggtaggcattctaagtacagaatgaatcgagaaacatggaaaacagcagtgaaccaaagaaacacaataaatatcagaataattataacatttcacattaataatattcagtaccatctgccctaggcaatgcattttaaatgtaaatattttagatacaggttggtagaaagttgaactctgccaactgtattatataaaatgagaaagctttacaggattgctacaataagcgcctctcatgtgtctatttctattgtcatctgaaaaggaaatttaaaaagaactaaaaaaaatagatcaatctgtatttaaagaacaaaataaacaatggaatcaatggctgttctgactgtc

SEQ ID NO: 688078 - DNA, 1060 bp, Homo sapiens
acaccctgcatattcccaaataagctcatttgtcctgtgggaagaaaaactgtcataggtgtttgcaaaagtttgtatacctagaatatgttacaatagttggaaaaatctaatactgatgatgactaatttcaactggctaatagccaactatattagggttctctagaaaaaaaactgaactaataaaatgaagaagggggaagggattgagagaggtgtctatgtatctagatatagatagatagatagatagatagatagatagatagatagatagatagagataggtgatagaaagatgatagatagataagataggataaatagctatctagatatctttatagatatattcatgtctatagatagagatagagaggcagagaaagaggcagagaaattgattgattttaaggaattgtaacatgcaattgtgagggctggcamgtacaaactacataggccaggccagcacgtatagtcgaatgagagttgctgttgcagtcctgagtccaagttccacaggaccacaggctggaaacccaggcaggatttctatattatagagaagaattccttctttggaaaatcactgtctttgttcttaaggcctcaactaatgggatgaggcccacccacattttggagggtaatctgctgtacccaaagtctattaattagctatcaatcacatctaaaaaccaccttcacaaaaatgtctagattggtgtttgaccacataatgggacactacagcctaaccaagttgacacataaaattaatcactgcaccagctaaccctaactttgcttctcacaaccagaggaattatttaatattgtcatataatgaaattatattactttttaaagtcattgcttcaggttgacatacaaaaccatttcaactttttaaattgatctgaattgctaatatgtgcctaatttttataaataatcccttaattttatttaaaatgcaacaaaaattgatgggaaaaaaactgtgtgtgtatgcatgtgtggtattaggggtgggaggaagagattacctggc

SEQ ID NO: 688079 - DNA, 625 bp, Homo sapiens
ttaaaggggttaaaaaatgaagcaaatacggattctggataatatatgaatattttattctctcaatttgggtatgttacaaaattataatttttaacttgcatgatacaactaatcaaagcataagtgaggaactctagagcttctattagagaattacaaaacataaaagcatcaatgagaaatcctagagcctctattagagaattatataatataatatagcacaagtatgtaagattcacttgctagcagattccaaaacaaataaatgataaaacttaaagacaggccaagcgtgatggctcatgcctgtgatcccagcactktgggaggccgaagcaggtggatcacttgaggtcaggagttcgagaccagcctggtcaatatggtgaaacactgtctctactaaaaatacaaaaattagctgggtgtggtgtttcatgcctgtaattccagctactagggaggctgaggcaggagaatcatttaaaccctggaggcaaaggttgcggtgagccaagatcgctccactgcactccagcctgggagacaaagtgagactccgtctcaaaaaaaaaaaaaaccccaccttaaagacaggttaaaaagggggaaaaaagtt

SEQ ID NO: 688080 - DNA, 596 bp, Homo sapiens
tactgattttttattatgcaaatactatatggtcactataaaaagggatgaaacaatttattcaatctctgactataaatacagaatatatgcaaagtgagagtatgtgtgggtctacgggaaagagaaggtgcacacttacatgtgtgtgactctgtgtgtatacacacacatatgcctaatggacatcttgtacatatgtttttgcaggcaaggccaaatatatttttgggataaaatgctagaggtagtgttactgaattgaagggtacacacattcatttttctcctggtacactgtgtgtgtgtcagagaaagacagtgtgtgtgagatccaggactctattttacattaaccttctgytgccattttctttttcatctacttagtacctacctaaattctacagttaataatagtctgcttttcccatttaataggttacttaaacctacatgaaaaaaagtgagggggtcaattcccttgtgaggaatccctaaccagtgctcacacccatgaacctagatcaaacggcacactcctgtagcatctgtcatccccacaatctgcctcaaaatacacattagtttttctc

SEQ ID NO: 688081 - DNA, 651 bp, Homo sapiens
tagtctgtttcctccattatcagccctagcatatcaccagctgggttatgcttggatttaaccttaattagtgacctggcaagcagaaaaggagatgggtacagcttctaggggcaggtacctgttaccttatgaggagaacctaatcttcctgaccagtagaagcactagctctcactaagaaggatgacattcctttgcaaacctgagactccatgggcaaccagcagtttgaatagccagcattctcagggccatccactcagatttccctgtcctattttttcaagaccatagattttccccrccagcgccctcatgttcatataacaaatctgtcttagctaagcattcaagcatttctggagctctgtgcctctgacaataatcttcagcctatcacttaattgtgtttacccttccattacaggtgataagggcctctttataaggtacaactgagactctctgattcacacacttaactataaagtccttgttaacaaccctccatctctcattgttcttctaaaggacatctcactctgatttgtagacactgtttcccacctgttttttagatgtcaaaattattacacctgccatggcagtttctccaccaggacattttcccaggtcaccattggcaaa

SEQ ID NO: 688082 - DNA, 2605 bp, Homo sapiens
ccatgttgtccaggatggtctcaatctcttgaccttgtgatccacccgtctcggcctcccaaagtgctgggattacaattagcttcaatataatagtaggcattaaagcattatttcagaaagcctttcaatagagagatgaaagtaaatgcttttcataaataccctttgctggaaaaaggcaaatctttcatttctcgggctatggtctactttacatcataacgatgtgaacattttgaaaagaaagaggaaggaatttctgaatgtcagtgctcaacagatctggctaattatacttggcacaattattgtctatactgcttgttgcttctttcagcatgggatgagttacccctcagttttcttttctttcttttcttttttttacaaagcaaaaaacacctctacctctctttatttccctggctctaagtagccaagtgcttagtaaagagaatcaagcagaggcatgccattgctttaaatattatgagctgctgggtgtccaaatactacattctgtcctatgcaactttcatttatatgatacacaggctgttttatttttttaatttaaatttttttttttttttttttttttttttttggagacggagtctcgctctgtcgcccaggctggagtgcactggcgcgatctcggctcactgcaagctccgcctcccgggttcacgccattctcctacctcagcctcctgagtagctgggactacaggcgcccaccacacccgtatttttagtagtgttagccaggatggtctcgatctcctgacctcgtgatccacccgcctcggcctcccaaagtgctgggattacaggtgtgagccaccttgcccggccaggctgttttgataaacttttcactctttgaattttgcaacttaagtttcagcaaaaaataacccacaaagctgattttaaataaaagcagatggaactgtcaaagaaggccaaatgcaagaagcaaaaggaaaagtgtgtattttctgaaaaagtagtccataaattattttcatctacctctctcatgaaaggtgtgctttgtgtgaccaatgttgtcacacagcagcacataagatggtattgacactgatccttctaaaacaaatcaagagtaatgccacaactattaggataatttaacaaaagaattgttgccattggtcctaacaggcagtcagagttttctttgtaattctmgcattctatatgtacaacactgacaaaactacaagttctctttagagaatttttgtgcttaggaatcagtgtaattttgagtcaagcataaatcaacatagattgaaacctggcatctctcctgagttgttaaagggagttataatgcatttatttaaaatcaatacttaacttcagttgttgttgtttttttttttcttttgtttgtttgtaaaagtgatactggtatattggtaatgcacttttttttttttttttttttttgacagagtctccctctgtcacccagtctggagtgcagtgtcatgatctttgctcactacaacctccgcctcccaggttcaagcaattctcctgcctcagcctctatagtagctgggattacaagcacgtgccaccatgcccagctgatttttgtacttttagagagacagggttttaccatgttagccaggctggtctcgaactcccgacctcaagttatttgcccgccttggcctcctaaagtgctgggattacagacataagccaccatgcccagccggtagtaatgcatacttgtaaatcaatatacattgaggaattaaagcctcttgttttacaaagtcttcggtgtctttaaaaaacaaaaatcccagctcatggtagtcaaggcctgatagatgaatgaatgaagacatctcatacacacaaatataattcctccctcaattatccaagttctagctgactttgacagtgaatattgtcttgccactgtgatgtaaaaagtttaaattatgctaatacattatttgttgttgtttcactagtctatgtatacaacaaatcatccctagtcatagtggcaaacaactttttattatcttttacatttctgtcaattgacaggactcagctggacagttttcacttaaggcttcttgcagcattgcaaacaaatgtcatccaaaggtttgattgccctagacatccaagatggtaggcagttaattctggatgtcacatgagagttgagctaggggtttagaccagaggatctacatgggacatctttgtgtggctcaggcttcttacaagttcttcgaggaagcatcataaatataagtataccaagagatctgggagaacatgcaagacttagtatgacctagactttgaaatcccagaatatttctttgctgtattttataggaggatgtaagccaccagatccaggcatgattcaagaggaagggaactagactccatcttttaatgtgggaagtgtagacatacatggagggaaggaattaatagtttttagctttgactatcgcagctttttagtggttcttctttcttcaaagacataagcatgtctcaaaattaagtgaaatatttt

SEQ ID NO: 688083 - DNA, 1461 bp, Homo sapiens
attcaatagagctgggcaacccctttttgtttagtttttgggtgagtccttgaggagagactgcttcttatggtgaaacagaagaagatatattttctcctatgaaggagaaccaactctcaactagaccttcgccatttgtcttttttgtttatattactttcccttggtgtttagaggcaaagagtaaaagatgcttatcagtctcatggtggtattgtgctgccttattcactagagggcacctgtagatgctcttcccctctgtctctgctcctagctgggagttgaagctcctaacttctcctcaggtggcacagtggtgagaagtcacagkgaccaaagtccagcacacatcgtgtggtttataactactgttccctaggatagccacctctttctggagtcttgagaggggtaagaatataacctttcttacctttagtcattttaagtaatgctttagtcagctcagcccagactgggctgttaatatccttccaggaagggacaaaaatgataccatacacaataagaaatcccagcctgccagctgcagaggcatgctagctgcttacgaaggcatctatctccccaactgcatatgcttaggaggctgtcattggcctgccatctctggcttatggtcccatttatttgccatagtaattcccagggattaggaaagagtaccccaaatcatggtcccagccagaggtacctccactctctataatctgttgcagggtgttgggtagcacacccatggtccagagggatgcacttctttcattttcctattcaggcccacaggtcttacaaagtgcagtgcctgtctaggggggacctggaaggtgggctgacattcttttggcagatcaacacctctgacctctaatgtcagttccaatggcatgagtttactcaaatactaatactccttgatcagaataaggagacacatgaggagaccacacacatacacaacacatagatcacaatacaacacagagcaatgccatgaaaaactgacgctgagatattccaaattttgagtgctaaccatttaaggccatctaagatcacttttgccaactgattgtcctattgactggataaacctcatttcctaatttattttctaattaattccaataatatttcccttttcttccttattggagtcatatcattttccccaagggtttgaaaggattgctaggctcatcaaaggaaaggacatgactccaatatagagtgggaagatatttgatgagacaatgaccatagatttgtaaagctatagaaatactttaacaagtttacaaatctgaacagagctataaataaatatagaaaaccacaacatctaggcatatcacagctaatttctgaaaaacaaacaaacaaacaaacaaaaaaaacaaaaaacatttctaggtatggctgaaggaggaagta

SEQ ID NO: 688084 - DNA, 1461 bp, Homo sapiens
attcaatagagctgggcaacccctttttgtttagtttttgggtgagtccttgaggagagactgcttcttatggtgaaacagaagaagatatattttctcctatgaaggagaaccaactctcaactagaccttcgccatttgtcttttttgtttatattactttcccttggtgtttagaggcaaagagtaaaagatgcttatcagtctcatggtggtattgtgctgccttattcactagagggcacctgtagatgctcttcccctctgtctctgctcctagctgggagttgaagctcctaacttctcctcaggtggcacagtggtgagaagtcacagtgaccaaagtccagcacacatcgtgtggtttataactactgttccytaggatagccacctctttctggagtcttgagaggggtaagaatataacctttcttacctttagtcattttaagtaatgctttagtcagctcagcccagactgggctgttaatatccttccaggaagggacaaaaatgataccatacacaataagaaatcccagcctgccagctgcagaggcatgctagctgcttacgaaggcatctatctccccaactgcatatgcttaggaggctgtcattggcctgccatctctggcttatggtcccatttatttgccatagtaattcccagggattaggaaagagtaccccaaatcatggtcccagccagaggtacctccactctctataatctgttgcagggtgttgggtagcacacccatggtccagagggatgcacttctttcattttcctattcaggcccacaggtcttacaaagtgcagtgcctgtctaggggggacctggaaggtgggctgacattcttttggcagatcaacacctctgacctctaatgtcagttccaatggcatgagtttactcaaatactaatactccttgatcagaataaggagacacatgaggagaccacacacatacacaacacatagatcacaatacaacacagagcaatgccatgaaaaactgacgctgagatattccaaattttgagtgctaaccatttaaggccatctaagatcacttttgccaactgattgtcctattgactggataaacctcatttcctaatttattttctaattaattccaataatatttcccttttcttccttattggagtcatatcattttccccaagggtttgaaaggattgctaggctcatcaaaggaaaggacatgactccaatatagagtgggaagatatttgatgagacaatgaccatagatttgtaaagctatagaaatactttaacaagtttacaaatctgaacagagctataaataaatatagaaaaccacaacatctaggcatatcacagctaatttctgaaaaacaaacaaacaaacaaacaaaaaaaacaaaaaacatttctaggtatggctgaaggaggaagta

SEQ ID NO: 688085 - DNA, 1462 bp, Homo sapiens
ccaagagattgggaattcccttcattctcccagccacctttcataggtcagaggctctccccaaggtgcagccagctaaaaacatggaggtcctgatcaccctcgttccagatcatcaagaataccagagactaccaacaccctgcactctcagaaaagcaggttgctgtcttctccactcgaggctgatcagtggtaaatagagcttgaccagggaaaggcacataccatattaaaatagagtgataaacccctcctcaagggaactgactttattttgaacaaagtgtagagaagttcaagcttaagggcactctcaaaaagaatggagatttaatggtaagcaatgaagataaggccagaagcttcatcacagcagcaacttatagtcagttactttgcttctttactatttgctagagtgaatcaggaaattagacatttaggaagacattttatgaagcaaaaacaaaacaaagtaaaaacttaaaccctggcttcaacataatcaggtaaagagacagagaaccttttaaaagccactatcatttttttaaaagacatataaattatataaagtaataatcataataatttattgagtttggatcttacaaacacttaagatgcataataataatggtacacaaaatgaaaggaaagaaatatttgagtaatattttgatatctcactggaattaaattaatttaaatctgagatagcttctgataaattgaaatgcataagataaaccctagagcaactactaggaataagaaaattatacatatatatatatatgaaattttcatatacatttattatatatattatatatatataatacatatatacaatgcgggaaagagacaattagttaattcaggtggagaaagaaaagaacgagtttgtcgagaagtgtcccatactggtagatgaaatctattgtcatattgaagcttttgtttttagtagagggtccattaatttttattacaatattaaataaaagaaattaattagatgacaaaactggactactaaaaagccaacaagaaagtgtgtcatgaatgaaaaacactaaatagatatatgtatctgaagtttccttaaactaataaaataagataaataatggtaaaagtaaataaaatcaacttataattttatattaaattcagttttctttgatagttttgtctctccctctccacacacccacttgtctttctctctgcatataatagcaataagtaaaaaattctatgcttacattgtaccaataaaaatatataaaccttataactacaataataaatgaattasaaatctactttgacaatttgtttctgacctttctgtttgtactgcctatatattttactaaatatattcttttctacttttaatatttatagtttaatatgaatttatttaatattaatattaatatattttata

SEQ ID NO: 688086 - DNA, 687 bp, Homo sapiens
ctatctgggcaggtactactttcattaagtcagttaaggggggccctctgaagaggtagaatgtgagctgaaatctataagatgagaaggaatcaactattcagaaagtctacggtgtgaatggaaaatacaaaacaccagaggtacaaagttgcttggtatgttcggtgacaagagtcaacttgaatttccagtgtaagtcatgcactatgatcaaaactggccctcactctacaagctctttcagtcaagtactctatctgggctactaacccagactttcccttctctcatgggcccatttctacccctcggcctcagtcaggaccatctcagttcactagatctaaaacaatgtttagaccaagtgcrgtggctcacatctgtcccagcactttgagaggccaaggcagaaggattgcttgaatccaggagttcaagagcagcctgagtaacatgtcgagacctcatctctataaaaaatccaagagttagccaggtgtggtggcacgtgcctgtggttccagctactcaggaggctgagatgggaggattgcttgagcctgggaggttgtggcttcagtaagccgtgatcgcaccacacctctgcactccagcctgggtgacagagtgagaccctgtctcaacaacaacaacaacaacaaataaaacaatgttaagtctcca

SEQ ID NO: 688087 - DNA, 1081 bp, Homo sapiens
ggcttatcccatgtagcaaacttccaggggaacaactggccctctgtttctggaactttaaaagtggtcagtgaccctggtggacaatgttcccaaaatcccacctcggggtagggatgtggtcagacagctggttctgaaccagcaatgaggggtgggcaagtaggactccagccactccatcaccatgacggcctgggtgtgtttgtgtggcctcattctcttgatgaggtgggcatgggatatctgccagggactagtgggcaggaatcgagcccagtgtatactcacatgcactgaaccctatgtagaaggggattaggtcctgggggccatagatggcrgttgctgggctggtgtgctcggggcagtctctccaaaggcacaaatggggtttctgaacaggatctgaggagacatgcaggtgctcacaagtgctgcttcccccagttggcaaccagtgagaaaaacgcccgagtggaggtctgacctgcctcagtctggagggctgatgctctctagaaaggtggctaatgcacagtgtctgctgtctccctgtcccccactccagaatttcagggcaaaaataagattgtctggatgaaactggtgagggtggcacctttggggataggccctttagcctggcagtttcctccccaggcttctcggggagcctggacttcaaagcctgctttggggaacttcaaataagagatgtgtgtgtgagctgggtgctgtgcagcatgtcaggacagtgctcttctacctggctcttgcagaacttgttcacagcctgtgtgatgacctcttggtatttcctaccctacccctatcacacagaaaagatgaagccagcatagcctgggggtgggcagatgtacaggttctaccccaggtcccctgggcataccacctgcctcagatatgtcagagaaaagaggtgaggctcctttcttttctctgaatgttggcagtggcctattgcagccaaatgggaacaggctggcaggagagtgcctatcttgaaggaagtggctcctggaagcagctaggaggagggagaggtcccccatactcc

SEQ ID NO: 688088 - DNA, 1081 bp, Homo sapiens
ggcttatcccatgtagcaaacttccaggggaacaactggccctctgtttctggaactttaaaagtggtcagtgaccctggtggacaatgttcccaaaatcccacctcggggtagggatgtggtcagacagctggttctgaaccagcaatgaggggtgggcaagtaggactccagccactccatcaccatgacggcctgggtgtgtttgtgtggcctcattctcttgatgaggtgggcatgggatatctgccagggactagtgggcaggaatcgagcccagtgtatactcacatgcactgaaccctatgtagaaggggattaggtcctgggggccatagatggcagttgctgggctggtgtgctcggggcagtctctccaaaggcacaaatggggtttctgaacaggatctgaggagacatgcaggtgctcacaagtgctgcttcccccagttggcaaccagtgagaaaaacgcccgagtggaggtctgacctgcctcagtctggagggctgatgctctctagaaaggtggctaatgcacagtrtctgctgtctccctgtcccccactccagaatttcagggcaaaaataagattgtctggatgaaactggtgagggtggcacctttggggataggccctttagcctggcagtttcctccccaggcttctcggggagcctggacttcaaagcctgctttggggaacttcaaataagagatgtgtgtgtgagctgggtgctgtgcagcatgtcaggacagtgctcttctacctggctcttgcagaacttgttcacagcctgtgtgatgacctcttggtatttcctaccctacccctatcacacagaaaagatgaagccagcatagcctgggggtgggcagatgtacaggttctaccccaggtcccctgggcataccacctgcctcagatatgtcagagaaaagaggtgaggctcctttcttttctctgaatgttggcagtggcctattgcagccaaatgggaacaggctggcaggagagtgcctatcttgaaggaagtggctcctggaagcagctaggaggagggagaggtcccccatactcc

SEQ ID NO: 688089 - DNA, 2412 bp, Homo sapiens
  misc_feature 505, 506, 507, 508, 509, 510, 511, 512, 513, 514, 515, 516,517, 518, 519, 520, 521, 522, 523, 524, 525, 526, 527, 528,529, 530, 531, 532, 533, 534, 535, 536, 537, 538, 539, 540,541, 542, 543, 544, 545, 546, 547, 548, 549, 550, 551: n = A,T,C or G
  misc_feature 552, 553, 554, 555, 556, 557, 558, 559, 560, 561, 562, 563,564, 565, 566, 567, 568, 569, 570, 571, 572, 573, 574, 575,576, 577, 578, 579, 580, 581, 582, 583, 584, 585, 586, 587,588, 589, 590, 591, 592, 593, 594, 595, 596, 597, 598: n = A,T,C or G
  misc_feature 599, 600, 601, 602, 603, 604: n = A,T,C or G
atttcttttaaaaattacagtaaaatattctttataaagtagataactaatgcccacataaagaacaagaaataatgcaaacctcaaacctggctaatcataacaaaaatggaatgaatccaatataaaattttttggacaggtctttggtttacatgatcatttactctccagccaaaattacgtttagtcctttagtttttccagctatccaaataaacctgaggttgttttccaactctgagtcctgaattgcacactgtcaaaaatgtacctacaaatgtatttcaaatttactatcttttcaaagaggattaggttttagtttttaaaaactgttttagaacatgaattgccatttcctgggaggggcctatgtagaaacttaggaaacctccaaaccatggcaggttcacaaatgctctgtccctggcatagatttccttatactgaatcctggctctgccatttactagctgtgtgactggaaaagttatttcatttnnnnnnnnnnnnnnnnnnnnnnnnnnnnnnnnnnnnnnnnnnnnnnnnnnnnnnnnnnnnnnnnnnnnnnnnnnnnnnnnnnnnnnnnnnnnnnnnnnnnagatctttgttagattggggcataaacatctcagttaatctgtttcactggaaatgaggaatgcagcacagcatccctaggggactcagcttcaggccagtcagggcacaaataaaatgccttaagtgcgtgttttcttgggatcaaagtctcctagcccttgggcaaaaatagccaacacatctgctccaggaagacatgaaccagcaagttggagaagcagcatttcatgcttagactcaggtcagtggatgaaggtcatttctgaaacaaaacaatattttatgcctatggctcaacttcaaaagacaaagaaaaatttttgttcgttacatatattacaacatcctaaatgttttctgtgccaaaatagaagcagaaaaggaaaatgattcatatatgttttagtcaaagcctatcttaaaagtgcacacctgggcgcataacagatattcacaaaatgatagttatgatgaccatgaagatgtttgtcactggtgtttctcatccttttttccttgcattcctcagactgccaccattgaggcatctctagcctccttactttctctataggcaaaatttgccatcctatcaccttgtttcctttaatccaagtgtatgcatcccattcatggctgctgtagtccctatggggtgcccgaataggtaatatatgtctaaacatgcatagtatgccatcagctgcaggccagcttttgctcagggtattacaaagaaataataattgtgaggatttcaaacccagtgccatgtcagcaggatgtgttgtaatagactagagtcttgctactgaaattgtgctctgtggacggacaccaataacatcacttctaagtgcaataaaattcagaacttcagccccatcctagaagactgaaggtgattcttatgcacataaaactttggtaagtcctcctttagattttaggcattaagagatcctggcccaaagtaggcacttggtttgtgtttattttctaccctgacaggtttggaggatcttctgagctattgaaaccctactaccccttccagcaccgatggcacactgcagataacctttctgattaggtattctgattaggtaaaagaaaaattaaaaggaacactcagagaacctctgcttggattcgtgactgtagtttgtggcattcgggagactaaaagttttcttargaaatctttcaagtgagtctgacattgcatctgattaatttttttttttttttattccagaggataacaggctgtttatctaggacctataaactacattttgtgctccttcaggcaggtttgccatgacaaaaaagtgtgaaatagcattttgtgttcaggaaactaatatgattcagtgaccttggtggagagtagagaatcaaggctgagaaaaacatcaggaacaggaccatggtagggtgaatatactacataaggtgttttttgggaggatcctgggtggaggggccagggggtggtcagatcatgtgacttttaggaaaatattttgataccacagaatgccagttagcaaaatattctcatagtcaagataaaaggtagttaattacttttaaattctggtaagggaagaaagatggagaggaatagatgttttaagatatcatgggaaggtagagttgaaagatattagtgacagatgtggatgtagtggttttggaaaaggaagagtcaagatgactcccaggtttcagcattgcttaaaatgattttgccattttctaaaataaggcctacaagtgaataaattagttttcgaggaa

SEQ ID NO: 688090 - DNA, 2412 bp, Homo sapiens
  misc_feature 505, 506, 507, 508, 509, 510, 511, 512, 513, 514, 515, 516,517, 518, 519, 520, 521, 522, 523, 524, 525, 526, 527, 528,529, 530, 531, 532, 533, 534, 535, 536, 537, 538, 539, 540,541, 542, 543, 544, 545, 546, 547, 548, 549, 550, 551: n = A,T,C or G
  misc_feature 552, 553, 554, 555, 556, 557, 558, 559, 560, 561, 562, 563,564, 565, 566, 567, 568, 569, 570, 571, 572, 573, 574, 575,576, 577, 578, 579, 580, 581, 582, 583, 584, 585, 586, 587,588, 589, 590, 591, 592, 593, 594, 595, 596, 597, 598: n = A,T,C or G
  misc_feature 599, 600, 601, 602, 603, 604: n = A,T,C or G
atttcttttaaaaattacagtaaaatattctttataaagtagataactaatgcccacataaagaacaagaaataatgcaaacctcaaacctggctaatcataacaaaaatggaatgaatccaatataaaattttttggacaggtctttggtttacatgatcatttactctccagccaaaattacgtttagtcctttagtttttccagctatccaaataaacctgaggttgttttccaactctgagtcctgaattgcacactgtcaaaaatgtacctacaaatgtatttcaaatttactatcttttcaaagaggattaggttttagtttttaaaaactgttttagaacatgaattgccatttcctgggaggggcctatgtagaaacttaggaaacctccaaaccatggcaggttcacaaatgctctgtccctggcatagatttccttatactgaatcctggctctgccatttactagctgtgtgactggaaaagttatttcatttnnnnnnnnnnnnnnnnnnnnnnnnnnnnnnnnnnnnnnnnnnnnnnnnnnnnnnnnnnnnnnnnnnnnnnnnnnnnnnnnnnnnnnnnnnnnnnnnnnnnagatctttgttagattggggcataaacatctcagttaatctgtttcactggaaatgaggaatgcagcacagcatccctaggggactcagcttcaggccagtcagggcacaaataaaatgccttaagtgcgtgttttcttgggatcaaagtctcctagcccttgggcaaaaatagccaacacatctgctccaggaagacatgaaccagcaagttggagaagcagcatttcatgcttagactcaggtcagtggatgaaggtcatttctgaaacaaaacaatattttatgcctatggctcaacttcaaaagacaaagaaaaatttttgttcgttacatatattacaacatcctaaatgttttctgtgccaaaatagaagcagaaaaggaaaatgattcatatatgttttagtcaaagcctatcttaaaagtgcacacctgggcgcataacagatattcacaaaatgatagttatgatgaccatgaagatgtttgtcactggtgtttctcatccttttttccttgcattcctcagactgccaccattgaggcatctctagcctccttactttctctataggcaaaatttgccatcctatcaccttgtttcctttaatccaagtgtatgcatcccattcatggctgctgtagtccctatggggtgcccgaataggtaatatatgtctaaacatgcatagtatgccatcagctgcaggccagcttttgctcagggtattacaaagaaataataattgtgaggatttcaaacccagtgccatgtcagcaggatgtgttgtaatagactagagtcttgctactgaaattgtgctctgtggacggacaccaataacatcacttctaagtgcaataaaattcagaacttcagccccatcctagaagactgaaggtgattcttatgcacataaaactttggtaagtcctcctttagattttaggcattaagagatcctggcccaaagtaggcacttggtttgtgtttattttctaccctgacaggtttggaggatcttctgagctattgaaaccctactaccccttccagcaccgatggcacactgcagataacctttctgattaggtattctgattaggtaaaagaaaaattaaaaggaacactcagagaacctctgcttggattcgtgactgtagtttgtggcattcgggagactaaaagttttcttaggaaatctttcaagtgagtctgacattgcatctgattaatktttttttttttttattccagaggataacaggctgtttatctaggacctataaactacattttgtgctccttcaggcaggtttgccatgacaaaaaagtgtgaaatagcattttgtgttcaggaaactaatatgattcagtgaccttggtggagagtagagaatcaaggctgagaaaaacatcaggaacaggaccatggtagggtgaatatactacataaggtgttttttgggaggatcctgggtggaggggccagggggtggtcagatcatgtgacttttaggaaaatattttgataccacagaatgccagttagcaaaatattctcatagtcaagataaaaggtagttaattacttttaaattctggtaagggaagaaagatggagaggaatagatgttttaagatatcatgggaaggtagagttgaaagatattagtgacagatgtggatgtagtggttttggaaaaggaagagtcaagatgactcccaggtttcagcattgcttaaaatgattttgccattttctaaaataaggcctacaagtgaataaattagttttcgaggaa

SEQ ID NO: 688091 - DNA, 2358 bp, Homo sapiens
ctgttggggaggcattattgtattttgaaatgtgagaaggaaataagattgggagaagtgccaggggtggaattatatggtttagatctgtgtccccacccaaatctcatgttgaattgtaatccccagtgttggaggtggggcctggtgggaggtgattggatcatgaggtcagatttcccccttggtgctgtcctcaagacagtgagtgagatctcataagatctggttgtttaaaagtgtgtagcaccgcccctttctctgttgctcctgctcctgccatgtaagacatatctgcacccactttgccttccaccataattgtaaatttcctgaggcctccccagaagctaagcagttgccagcatcrtgtttcctttacagcctgcagatctgtgagccaacaaaacctcttttctttatggataacctagtctcaggtgttgttttatagcaatgtgagaacagcctgatagttttcaaatggaatgcttaagcccaaccccaaatcatttaaactagaatctctgggtcccaggcaatgatatttttaaaacccgcaggtgactctaataggacagccagaatggatacccatgaggctgatgaacagtaagacccttcagttctgtttttctaacttaggtcccaactctcccaggatcagaagccattcttttctcccttactgggatccattctggggggtggctagtttctctgtctcataaggctgtcccaaaagccttgattaatttcctggaactttctgactgtctcaactgtcctgcagtccctgaactgaccattcccagcatctcattctaccaccaagaagtattgaaatcccatcccactctcctgtggtacatatgggttggaaacttctaccaaaagctgcaaagagcagggaacatgacagaagacagctgtgtctactgaaagactatcttctccttagcctcgttgaatgcttgccctgtttgactttaataaggttaattctaatctgtagcttttccggaggtgagagaatctcccctttctgaacatgactcactggcttctatttcagctcccaaagaagagtgttaatgtctcactcagcaggtgactgagagaagctttggccttatgagtcccatattcttcacccttttctatgcctcctgtcacccctatttctacaacaggagagcttcgtgcagcactctaagatacaactaacaataaaagtaatttatatcacttactactctccagatgcgaggctctgcataaagtgtttacatgcttcatttcatttattcttcacaagtccccacatgagatggtattatagttattaccatcatcattcccattttataaatgaggaatctgagtagactgtactgcctgttcctcttccttagcactggtccccacagtccacccattttctgaataatgtctgttttcctactagtctgtatgcttggctagagcagagaccgcatcaggattggctgatcacttaatccccaaactggcggagcagagccagaactgagacatgagcaggctggcccccagggccttgtgtgctcaccctctgctctcatggaaggtgagtctgcaaagctgagaagtgggttcctgggaggtgggcaggcccttggggtatgtatgggtcaggaaggcagtggaagagagagttttaggaggaaaagcagtcatcggcaccacgtgctgccaagacaccaaggcttcacccacatagagcttacctagtgccaatgagggtcattttggtggagctgtagggccagaagacagatggggcaagtggaatgtgtgaaaggtaagggtcagagtgaatgtgtggggacaactcactggagttgaagggcagtttttattttattttattttattttccacgagagagacacagaagcagacgggaaggatccagttgagcatgagaggttgagtgtcccagggataaagggcatagtggtcctgcaggggtcctcagagggaagagaggactgggccaggcttggtggctcatgcctgtaatcccagcactttgggaggccgaggtgagcagatcacctgtagtcaaaagtttgaggccagcctgaccaacatggcaaaacctcgtctttactaaaagtacaaaaatcagccgggcatggtggcaggcatctgtaatcccagctactcaggaggcttaggcaggataattgcttgaacccagaggcagaggttgcagcgagctgagatcatgccactgcactcaagcctgggcgacaagagcaagactctgtctcataaaaaaaaaaaaaaaaaaaaaaaaaaaaaaaaaaaaaa

SEQ ID NO: 688092 - DNA, 1374 bp, Homo sapiens
tttgatgcaattctcctgaaggcagatgaagatgctaggccaaacccacctaaggcagagagtagccaggagcaggtgggagaaaagagttcaagaaggtctcaggggagagcctcaagatcaccttcaccaccactccctgataattctgcctgttcctgcaattcaccaaattatgacataatatttgcacaggacaaagggacataaaaaactgtgccaacaatcttgaaacttttgaccagaatataccttaaaacacaacagtgatcacctagatgagtcagggaaactaactggaaagaagagttggctgaataactggttctctagtccctgcaggttaggaaagcagttccccaaaaaacaagatgacataacacagccaattccccactcagccagagcccttttccatagttttttcctggagaattgtggtccatgtcctgacacaatcaacatacaagacttccatggacagatagattcatctaaaggccatatcaaatgatgagctattgtttcactggctgactcccattctaacatatgtgaaagaaactcccacgatgatgaactcaagattcgagttcagagctctgaaaggaataaaccagcaggcactgatgatgtttttaaggtagttgtatggaatcaaggtctgaaaaaaagaagcaaagaaaaaaagacagagaatgtatgggtaaatatggcaggagaaatgggcagtgagacaggtaacaaacctgcttgctgtgtgcagttagtcacagttctctgctgctatatgcctttcttcaggaaggaaaaaagaagagttcaagagagtgtttgtacaaacaaaaacacatgtcatttaggataccctctaagggatataagggaaagagcattgtaattttgggtctcctaatccatctctgccagtgtctccctctgatagtttcattgaggcattttaaaccttccatgatgtcaaaacttaataataatgtgatttattctaaatagccctagatttccttaatagcctattatgaatccatcagacatttatttgtccgaggtcttgaacttttctataatttcagtgtgtgatacattttagagaataaaagttccaaaaaataaactctgtgaaggctttccttgtatttgttcttaaaatgtctctcaggctttaagggttgcctytaaattctgttattgtttggtttgacatcaggtcaatgctggtgccattcaagtcctccataatttttgtaatttataatgtaccacccttaacctgtatgtacagcaatggctagaaagctagatttctcttactgtttctacttgggattttgtcttagtccatgtgggtggcca

SEQ ID NO: 688093 - DNA, 941 bp, Homo sapiens
ttttcaactttaaaacagttttccttcttggaaggatttagtcactaaaatgcataaagaaggctwgaagctactggaaaacaagtgtaatggtgtattgtaaagaacaggaaacaaaattaaagacaagactaagaacctggacctatctccactactaattatacaacagtgagcaaggctgagccggttgtatccatgaccccaaaatagaggaaccaggaacacaatacaattcagttgaaataaaatgatacatatatttatgacattactatgcatattttattaaaattgactacacttttaataatagaatctaaaataatttattgtcttagttgattaatttcaaatcatcagtttctctcatcaactttaagaggcataatggcatggaagaaaagaatgttatatgggaagtcattttatctcatttcactaaatgagaaattcaaagtccagaaagattaaattacttacccaagatctctcagcttttaaatggctgaggccaaacttcagcccaggtcctctgattctaaagtatgatttgctcagcataaaccttacaagacacaagtgatctgggtcctatctttagcctccttaaacagaataactgtcagcccagaattttctattcagcaaaactaagtttcataaatgaaggagaaataaagtctttttcagacgagcaaatgctgagggaatttgtcactatcagaccagccctacaagaaatgctaaaaatgggttataaatcttaaaataaaagattgatgtgtgccacagtaaaacctcctgaaggcataaaactcacagagcctagaaaataataacacaatgaaggaaaaaagtaactaggtaacaacatgatgactggaacagcacctcacatctcaatgttaacattgaatgtaaatggcctaaatgctcca

SEQ ID NO: 688094 - DNA, 941 bp, Homo sapiens
ttttcaactttaaaacagttttccttcttggaaggatttagtcactaaaatgcataaagaaggctagaagctactggaaaacaagtgtaatggtgtattgtaaagaayaggaaacaaaattaaagacaagactaagaacctggacctatctccactactaattatacaacagtgagcaaggctgagccggttgtatccatgaccccaaaatagaggaaccaggaacacaatacaattcagttgaaataaaatgatacatatatttatgacattactatgcatattttattaaaattgactacacttttaataatagaatctaaaataatttattgtcttagttgattaatttcaaatcatcagtttctctcatcaactttaagaggcataatggcatggaagaaaagaatgttatatgggaagtcattttatctcatttcactaaatgagaaattcaaagtccagaaagattaaattacttacccaagatctctcagcttttaaatggctgaggccaaacttcagcccaggtcctctgattctaaagtatgatttgctcagcataaaccttacaagacacaagtgatctgggtcctatctttagcctccttaaacagaataactgtcagcccagaattttctattcagcaaaactaagtttcataaatgaaggagaaataaagtctttttcagacgagcaaatgctgagggaatttgtcactatcagaccagccctacaagaaatgctaaaaatgggttataaatcttaaaataaaagattgatgtgtgccacagtaaaacctcctgaaggcataaaactcacagagcctagaaaataataacacaatgaaggaaaaaagtaactaggtaacaacatgatgactggaacagcacctcacatctcaatgttaacattgaatgtaaatggcctaaatgctcca

SEQ ID NO: 688095 - DNA, 941 bp, Homo sapiens
ttttcaactttaaaacagttttccttcttggaaggatttagtcactaaaatgcataaagaaggctagaagctactggaaaacaagtgtaatggtgtattgtaaagaacaggaaacaaaattaaagacaagactaagaacctggacctatctccactactaattatacaacagtgagcaaggctgagycggttgtatccatgaccccaaaatagaggaaccaggaacacaatacaattcagttgaaataaaatgatacatatatttatgacattactatgcatattttattaaaattgactacacttttaataatagaatctaaaataatttattgtcttagttgattaatttcaaatcatcagtttctctcatcaactttaagaggcataatggcatggaagaaaagaatgttatatgggaagtcattttatctcatttcactaaatgagaaattcaaagtccagaaagattaaattacttacccaagatctctcagcttttaaatggctgaggccaaacttcagcccaggtcctctgattctaaagtatgatttgctcagcataaaccttacaagacacaagtgatctgggtcctatctttagcctccttaaacagaataactgtcagcccagaattttctattcagcaaaactaagtttcataaatgaaggagaaataaagtctttttcagacgagcaaatgctgagggaatttgtcactatcagaccagccctacaagaaatgctaaaaatgggttataaatcttaaaataaaagattgatgtgtgccacagtaaaacctcctgaaggcataaaactcacagagcctagaaaataataacacaatgaaggaaaaaagtaactaggtaacaacatgatgactggaacagcacctcacatctcaatgttaacattgaatgtaaatggcctaaatgctcca

SEQ ID NO: 688096 - DNA, 941 bp, Homo sapiens
ttttcaactttaaaacagttttccttcttggaaggatttagtcactaaaatgcataaagaaggctagaagctactggaaaacaagtgtaatggtgtattgtaaagaacaggaaacaaaattaaagacaagactaagaacctggacctatctccactactaattatacaacagtgagcaaggctgagccggttgtatccatgaccccaaaatagaggaacyaggaacacaatacaattcagttgaaataaaatgatacatatatttatgacattactatgcatattttattaaaattgactacacttttaataatagaatctaaaataatttattgtcttagttgattaatttcaaatcatcagtttctctcatcaactttaagaggcataatggcatggaagaaaagaatgttatatgggaagtcattttatctcatttcactaaatgagaaattcaaagtccagaaagattaaattacttacccaagatctctcagcttttaaatggctgaggccaaacttcagcccaggtcctctgattctaaagtatgatttgctcagcataaaccttacaagacacaagtgatctgggtcctatctttagcctccttaaacagaataactgtcagcccagaattttctattcagcaaaactaagtttcataaatgaaggagaaataaagtctttttcagacgagcaaatgctgagggaatttgtcactatcagaccagccctacaagaaatgctaaaaatgggttataaatcttaaaataaaagattgatgtgtgccacagtaaaacctcctgaaggcataaaactcacagagcctagaaaataataacacaatgaaggaaaaaagtaactaggtaacaacatgatgactggaacagcacctcacatctcaatgttaacattgaatgtaaatggcctaaatgctcca

SEQ ID NO: 688097 - DNA, 941 bp, Homo sapiens
ttttcaactttaaaacagttttccttcttggaaggatttagtcactaaaatgcataaagaaggctagaagctactggaaaacaagtgtaatggtgtattgtaaagaacaggaaacaaaattaaagacaagactaagaacctggacctatctccactactaattatacaacagtgagcaaggctgagccggttgtatccatgaccccaaaatagaggaaccaggaacacaatacaattcagttgaaataaaatgatacatatatttatgacattactatgcatattktattaaaattgactacacttttaataatagaatctaaaataatttattgtcttagttgattaatttcaaatcatcagtttctctcatcaactttaagaggcataatggcatggaagaaaagaatgttatatgggaagtcattttatctcatttcactaaatgagaaattcaaagtccagaaagattaaattacttacccaagatctctcagcttttaaatggctgaggccaaacttcagcccaggtcctctgattctaaagtatgatttgctcagcataaaccttacaagacacaagtgatctgggtcctatctttagcctccttaaacagaataactgtcagcccagaattttctattcagcaaaactaagtttcataaatgaaggagaaataaagtctttttcagacgagcaaatgctgagggaatttgtcactatcagaccagccctacaagaaatgctaaaaatgggttataaatcttaaaataaaagattgatgtgtgccacagtaaaacctcctgaaggcataaaactcacagagcctagaaaataataacacaatgaaggaaaaaagtaactaggtaacaacatgatgactggaacagcacctcacatctcaatgttaacattgaatgtaaatggcctaaatgctcca

SEQ ID NO: 688098 - DNA, 583 bp, Homo sapiens
ggccgtgtcagacttctgacctccagagctgtaaggtactacatttgtgttgttgcagccaccaagttkgaggtcatttgttacagcagcaacaagaaatcaatatggaggtgatttcaggccccggagggattctgagggcagtgggcacattcaggagtttcaagtcaatacagtggtgacaggtgcccagcaccttacttcctcggggcgaatttgccgaagagcggagagagcaggtttcaatgcaaagaggaagaaccaggaaacagtcacatcagagcatctgcttttgtccttgccaaatgcacaggcacagatcagcttggagaactcccttttgtgtttctggttcaaggaacggagccctcatttctccctgtgctcgtgaggaacaggaagtcaaatgaaagtttaaaaggatgacgcggctggaaaaatcattgtaatcgtgagtactgtctcaggggcagcctttagactttgcccagtttatctgtcaccaaacaaaggatcataacagggacaggtccattgtgatctgtctgctgggaagagcctcacagccagggtggagacacag

SEQ ID NO: 688099 - DNA, 622 bp, Homo sapiens
gagagtaacagtcataatataagttaaggttggaaaggaccacagagaactgcagctccaaacacatcctttcacaggcaaggacactgtgggccaaagatcagggagctctgcctaagacgtactagtctagttagagacatagctagttatggccatcccagaactaagaacccagtcctcctggttttggttctgggggccttgtactcctcaagaagttctggagagagaggaaagagcgagagagggagggagagtactgggaaagtagctgtcacatgattggcccaggcctggcatttctcaagatggatgtctcctggcctgccttggtccctcaaagtggtaagtggtgatgaggtgtgagagcccccagcagggctgtttgctcagcctctctgcagtcttggtggtgtggtcagcagcgctgagcctggctgggcgtacctagacagaggccaggctgacagtgtgcaggctgggctgctctggtggaacagcaggcttgagaggcttggggtaagaaaagggccctgggtgttgtggggctggatcaggggccctttgacattcatatgagaataggargaggactgggctgcagcaaataacctttgag

SEQ ID NO: 688100 - DNA, 1234 bp, Homo sapiens
ctgcaacttcacagaaaggttgaagaccaacaagtcagtctcataaaaaaaaaatttaacaaacttggaaatcacratagcttcttaggtttgactgagttgttgagatctttcctgccacaaagggaacaactaggaaagaactggcattcaggagaagctctctagctccaatttagaaagtttcccaccatccattttaaagtatctgaatgttttagccggatgtggtggtgcttgcctgtagtctcggctatttgggaggctgaggtagaaggattgcttgagcccaggagtttgaggctgcagtgagctgtgattgcaccactgcacctcagcctgggtgacagagccagaccatgtctcttaaaaaaagtgtctgaattttaaatttagctctgacctcttggcatttgtttccttatcaattataaaaccatatttactgaaaaacaacatcaataacagcagtttagcaaagtaccacaaagtagttacctatgcatgtggcccagtccatgttattttatggaaaaacaaaaactcttcaacagggtgacaggttcgttctctatgcccagggagctattgtgttactttggggaggaagccaggggccacatgtgagacagatgttttcggtgtctcactaatggagttgaatcttctgccttttcctcaataacaaacaagcaaggcagagaaagagttaatattaaacatgaaattgtaattactttcatgctaaggagcatgcagtatatattgtatattttatctaacatacagataaaattccttttgaaagtatataccagacttttttttcagtatctgagagaggcattttgcaaaatgtctggggtttgtatggagccctgcaatctgtggaaataggtcacattttgccctttggtgttagtggtcacagctcttcatctcagtttagagtgtaggggtgcgcacacaggtattgtggtttaatctttgatcattcaccacgtgttcttgtagaaaagggagaaatctatactcgagttttagaagaagataaaatatgggtaaggtcacagttgttactcccaagcagaaagaaaatattggggtttgatagataagcaaatacacaagacacctttgtgataaaggtctccacttagagctctctttttagacagtatgcccctcaataactccttcaccatctccagagtttcaggtacttgagctctca

SEQ ID NO: 688101 - DNA, 532 bp, Homo sapiens
ttgatcatagtaagcagggtgttttaaggtgtgtattgaaagattcacaccatggatcccttgtgggcgtgtttgtgttctctagtgtttgagagagttttctttaatggaattgtgtccctttgtatgtctgattattttttattatatgttggaatttgtatttgaaaaattgtagaaataatttgaagcctagaatagtgctattttccccttgagaggttttaattstgtaagaaaattaaattcctgatgccctaagtagggttgccagataaaatacaggacactcaagtttgaatttccagctaggtgcagtggctcatgcctataatcccagcactttgggaggccaaggtgggtggatcacttgaggtcaggagttttgagaccagcctggccaacatggtgaaaccctgtctctaccaaaaatacaaaaattagccaggcatggtggtgcatgcctgtaattctagctacttgggaggctgaggcaggagaatcatttgaatctgggaggcagaggttgcag

SEQ ID NO: 688102 - DNA, 766 bp, Homo sapiens
cattgtcactcattcacatttaactgagtgttgtgtatttttatttgctcagtctgacaacccaactcctaaggcatctcttttatatgatgaattaagttgtatcctatacatctagagtgttgaactaaattgtctcctgtacatctggctatgagagaattgagaaaatagtcactcagatcattttctttgttccataattcagatgaggagacctgattgggaaaggttgctccagagagtgcttctgcaaggtgcttggaagcactagtaattcacttatcaccttaatacaatttcagggattgaaatggtttgaagctgggctatagtccctgtgagagctgttctattttcgtcaaaagatctgttcagcctctcttctgcctctttctgagctggcagatgccctcagggaaaaaagtggcctaaatacttgctcatatatttgaatttstgtgtagatcttggccttataattttttactatcctgttagctctgtggtgtattcaagcagattttaaaaggttgtccagcttttctagttgccttcagcaggcgggttggcctaaattacttaatctgccattgctggaagcattatataattttaaaacagcagaagaaaagagccatagttaaactgtaggtcaggatctatctgagtgacacaaaatactctttagaaaagaaaggaagcatgtatttttatacataatttcagcctgtgtgcttaacatatacatgttctgaggcaaaac

SEQ ID NO: 688103 - DNA, 1755 bp, Homo sapiens
atacaattaaaagtgattttattttaggagtttcgctgcaagatttaacgctctttagcaaaggactgatacatacatataccataaaactcaggtgtagcttcttagtgagttaaatggacaaatctttagtaggaaataaaaatacagaattttctaatcagtttcttaaagtcatatatattttttagtttttttccataaaggtagcaagtatttctaaaattaatctttgcagatgttttcctattataacttctgctggagaggtggtgatgggactctgctcccaaagactccacctgagccaggaaaagagaagctaagaaaagtcaactggcctctttacactggtmtgatagccaacttgacactaggagttccgaaatgttacatagcatctaactgcagcagaaagtgtatcagtatttttataagctcactaaaactgtaggaatgaatatagacaattcagctacattttatgaagttataaaattattagtttgtattggattttcaaaagtagtatttaggacatatgtgggcattatttaccattagataactttaaaaccaaaaaaacctgttctatagtgtatcattatagaaattgataaatgagaaaagctacatttatttttcaagcagtaaatttttacagaaaaattttttataaaggtattaaatgaatcataatggaaagtactatattttattagtttttatttaggaaatggaactttcactttatcccaatattttcttcagaggtagactttgtttttatttcaatgagttcttccactcgagctagaacactttcaatcaaatcaaatgtgaaaagagctgaatgcaggacctgcaatgccaagaaaaagtaatgttattaatgctgcctttaaagcaaaacaaagcaaaacacagaaaagatttcagctggaggtagcttaggaatatttaagaccaggtacagtggtttgcacctgtaattcctgtgctttgggaggctgagctgagaggattactagaggccaggagttggagaccagcctgagcaacatagtgagaccctatctctactaaaaattagccaggcatggtggtgtgcacctgcagtcctggctaatcaggaatctgaggtgggtggatcacttgagcccagggagttgaagctgcagtgagccacaatcatgccactgcactccagcttgggcaagatagcaagaccccgtttctaaagaagaaaaaggaaagaaaagaaaatttcagatcaccttaagctgcatttcaggaggcatattagggatctcttctccacttacagttatagaacaaagatctttagatttctgggcctctgtaagagaagaaaaatcatgtgtgacacttaactctcagatttcaataacaaaggtataagctactttcattcactaacttaaaacatgtcagttatttgtataaattattaagtccattgtttaacagctcagggtatacttaagctataagcaaacagaatgaaatatcaaaattctgcaacatgtaaattaatgcttctttagataaatagcattattttggcatgtataggattcatgaaactgttttcttcagtatataatcagaattatagccattatactaaaaacaaaatttccggtaatgcctataaaagcaccaccacagatatacggaagagatcacacgattattatagaattattgacttaaaaaaattctggatctaag

SEQ ID NO: 688104 - DNA, 1755 bp, Homo sapiens
atacaattaaaagtgattttattttaggagtttcgctgcaagatttaacgctctttagcaaaggactgatacatacatataccataaaactcaggtgtagcttcttagtgagttaaatggacaaatctttagtaggaaataaaaatacagaattttctaatcagtttcttaaagtcatatatattttttagtttttttccataaaggtagcaagtatttctaaaattaatctttgcagatgttttcctattataacttctgctggagaggtggtgatgggactctgctcccaaagactccacctgagccaggaaaagagaagctaagaaaagtcaactggcctctttacactggtatgatagccaacttgacactaggagttccgaaatgttacatagcatctaactgcagcagaaagtgtatcagtatttttataagctcactaaaactgtaggaatgaatatagacaattcagctacattttatgaagttataaaattattagtttgtattggattttcaaaagtagtatttaggacatatgtgggcattatttaccattagataactttaaaaccaaaaaaacctgttctatagtgtatcattatagaaattgataaatgagaaaagstacatttatttttcaagcagtaaatttttacagaaaaattttttataaaggtattaaatgaatcataatggaaagtactatattttattagtttttatttaggaaatggaactttcactttatcccaatattttcttcagaggtagactttgtttttatttcaatgagttcttccactcgagctagaacactttcaatcaaatcaaatgtgaaaagagctgaatgcaggacctgcaatgccaagaaaaagtaatgttattaatgctgcctttaaagcaaaacaaagcaaaacacagaaaagatttcagctggaggtagcttaggaatatttaagaccaggtacagtggtttgcacctgtaattcctgtgctttgggaggctgagctgagaggattactagaggccaggagttggagaccagcctgagcaacatagtgagaccctatctctactaaaaattagccaggcatggtggtgtgcacctgcagtcctggctaatcaggaatctgaggtgggtggatcacttgagcccagggagttgaagctgcagtgagccacaatcatgccactgcactccagcttgggcaagatagcaagaccccgtttctaaagaagaaaaaggaaagaaaagaaaatttcagatcaccttaagctgcatttcaggaggcatattagggatctcttctccacttacagttatagaacaaagatctttagatttctgggcctctgtaagagaagaaaaatcatgtgtgacacttaactctcagatttcaataacaaaggtataagctactttcattcactaacttaaaacatgtcagttatttgtataaattattaagtccattgtttaacagctcagggtatacttaagctataagcaaacagaatgaaatatcaaaattctgcaacatgtaaattaatgcttctttagataaatagcattattttggcatgtataggattcatgaaactgttttcttcagtatataatcagaattatagccattatactaaaaacaaaatttccggtaatgcctataaaagcaccaccacagatatacggaagagatcacacgattattatagaattattgacttaaaaaaattctggatctaag

SEQ ID NO: 688105 - DNA, 1727 bp, Homo sapiens
ttgtcttaaaaatatatatttatttttatattatttttcatattatatattttttaaactacatatatactttatatattatatataatatacattatatatgtacaagtatatattatatatgtaaatatgtgtacatataaatatatactttatatttttatatatttatatatctttatatttatatatatactttatatatatatttatatatatatatatatttgcaacaacaggcaaatccaaatagtgcagtaggatagcattatcaagttttttaaaaagttttgctgtactcctgtaacaattttaaaataattgggggaaaaagatgaaggaagaakacagaaggagaactatatcaaaaaatatattattaacagatgtactgaaattataggcttcttctgaaatttatatatcagaacctagaaataaggttttgtctggggaataaaaatttctaccttgaaagttacaatgtataaatactatggggtactttacttttctattgttttcgggttttatttgctattttttatttagttattttatttctctttcattctacagtggccattctggagaagaagtacagttatgcagtaaagccattaaaacatcagatatcgacaatcctagccactttgaaaagcaatatgaatctagttcttctagcactcacagtgatagtagcagtgacaatgagcaagactttgtttcctccattctaccaggaaacagaccaaattcaacaaatattagaccacagctgcaccaaaaaagcataatgaaaaagaaagctggtcacaaagctaactccaaacacaaagacaaagaacagacagtagtagatgtcactgagcagttaggcgattgcaaattagatagtcaggagaaagatgctacatgtgaacttcctttacagaaagtaaatactcagagttcttcaaatagcactttgcctgaaagattaaaagcgtcagaaaattctgaaagtgaatacagtaggtcagaaataactctagtaggcataagtaagaaaagtgcagagcattttaagagaaaatttgccaaatcaaaccaagtgtctaggtcagtgtctagttcagtgcaggtgtgtcctgaagttggaaagagaaacttacttaaagttttgaaggagactttgattgagtggaagacagaagaaacattgaggtttttgtatggccagaattatgcttctgtgtgtctgaaacccgaagcctctctggttaaagaagaacttgatgaagatgacataatctcagatccagatagtcatttccctgcctggagggaatctcagaacagcttggatgagtctttaccttttaggggctcaggtacagccattaaaccactgccaagttacgagaatttgaaaaaagaaactgaaaagttaaatctgaggatcagggagttttacagaggacggtatgttttgggtgaagaaaccaccaaatcacaagactcagaagaggtatgtcttacagacattgagtttttccagatcgttaacatttggaaaactcaccacagcaaatcttggagcaggaaggatattgaagagttaattgttaaattttcaaatagtttctttagtcattctgccttttggtttacagtgccatctccactgttggcattactattttacaaataagttgacgtttacccctagcaaattttcatcagtg

SEQ ID NO: 688106 - DNA, 1683 bp, Homo sapiens
gctcaagcaatttttcccaccccagcctcccaagagcagtggactacaggcacatactaccacccccggttatttttaaatttttttgtagagacagggtatcacccctatctctatctatctatccatccatagatagatatctatctatctatccatccatagatagatatctatctatctatccatagatatctatctatctatccatagatatctatctatctatctatccatagatacctatctatccatagatgtctatctatccatccatagatatctatccatagatatctatctatctatccatagatatctatccatagatatctatctatctatccatagatatctatctatctatctatctatctatctatctatctatctatccatatcactactcatatagtgatatgggtatcactgtcacccatagtgataccctatgttgctcaggctggacttgagtttctggcttcaagtgatcctcctctctcagcctccaagtgagctgagattacaggcatgagtcactgttcctggcttcctctctttttctatgttacctccaaccaattgccataagtcatattcactagtttattttcttacagctttatttaattataaaacaaacctatctatcatctatctacctatcatctatctatctatctatctatctatctatctatctatctatcatctatctatcatctctctctaacctatcattgtcatcatctatctgcagacatgtagtagacatgtacagaaatcatttttgctattacttcacaaaaatgggatcttcttacacaaattcttctgaattgtattctttcattgctagtgtgaaacttcccatgccaaacaccaccatctaaggcagggcagtgtagaggcagtgtagaggcagtattcctgcagaggaacacattcatttactcttctttagtgatgtccttggcaggagactcagggttatttgaaagaattctaattaataaatttggctccaagtatctacaacagatagtgctttttagagactgaattcactgttttatttgaaagcagtgaagcataggatgccattaatcttgttttgagaacacttttctagaaaatctagatcctggtgtttggatttcccctcatcatttggcagagtcccgtcctctcttcctgggaatgcacactttgctggacattggcagacctctgccataataaccacattgtaggaagagtttaattaacatagtgcagtctggcagtattaagcagcatctggaaagctgaaaattcccacaaaacccagcttgttcaacgtcctcagactcacttatgatcagtgcagggcaaggaagaagtccttctgtcctaagctgtggggggccctgtctcatgcctgccttcagtgctgtragatccacacttctgccaatctgacctctccctggattctttgcccccatccaataatgggttttcagctctttgttgcactctcagcagaatgggtgaatccctcaattaccctgaagttgtaaacagacatccctgtgtctttgctttttcactgtgtctttctcaagtggaaaaactgcaataacaacaaaaaccggtagctcctaatggaagaccaggaaagcttttgcagttctgttacta

SEQ ID NO: 688107 - DNA, 1029 bp, Homo sapiens
gtcataaagttgattgtgcatagtagcactccattatcaaatgtaagtactatatatgtgttttggcactgaaggcacagataagttagatgaagtggctcaaatgctcagggtccccattcctaccatactactttctctctcctttacattaactattacatgtataaggttttgtatattataggcatatgtatgaattctcttgtctttcataaacttatgagttccaatgacagaaagcaagtatagttgatggaagttactttggaagtcacttaatataattttctcatttgaggtccacaaagttgaagtagtctttgtaacctgaaaagagtcttaatatcagatcttccatagaaaaacaaaataaaaaacaagttgactattttttgcactataaacctgaatgtttgtcttatgaaaaaatgagacagagaaaaacaaatctgataggatgaatacattattaaagttcttttgtatgtcagaaattttatagaccataataagttaaatattaaatctgaattatttttatataacctcaaaaatgatttatgtgtagtacaccagatattatggagttgaccatggaattttgctaatgaatgatattcggtcaaggactagaatcctgtgattctgaaatggttgattcaccatgaaatgagaacaagtcaaaaaccatctggaaaatgatgtgaaatatcttatctgtcctctgagataaaaagaactggtcttatactaggaaacttctttccttctgcttttaggtaatgttacaatccgtcaaggatttccttacttttctacacttttagtagggaggacattttctagagcagaaatataaattcaatattcatgargcatattattggtaaactaaactggcattccttggaagtaaaatataatctctgtgaagttcgtgaaatgcttcagaaaactttttggtgattttcttttcagacactaaatattttattaaataagtgagatccctaaacaaatttccaa

SEQ ID NO: 688108 - DNA, 1029 bp, Homo sapiens
gtcataaagttgattgtgcatagtagcactccattatcaaatgtaagtactatatatgtgttttggcactgaaggcacagataagttagatgaagtggctcaaatgctcagggtccccattcctaccatactactttctctctcctttacattaactattacatgtataaggttttgtatattataggcatatgtatgaattctcttgtctttcataaacttatgagttccaatgacagaaagcaagtatagttgatggaagttactttggaagtcacttaatataattttctcatttgaggtccacaaagttgaagtagtctttgtaacctgaaaagagtcttaatatcagatcttccatagaaaaacaaaataaaaaacaagttgactattttttgcactataaacctgaatgtttgtcttatgaaaaaatgagacagagaaaaacaaatctgataggatgaatacattattaaagttcttttgtatgtcagaaattttatagaccataataagttaaatattaaatctgaattatttttatataacctcaaaaatgatttatgtgtagtacaccagatattatggagttgaccatggaattttgctaatgaatgatattcggtcaaggactagaatcctgtgattctgaaatggttgattcaccatgaaatgagaacaagtcaaaaaccatctggaaaatgatgtgaaatatcttatctgtcctctgagataaaaagaactggtcttatactaggaaacttctttccttctgcttttaggtaatgttacaatccgtcaaggatttccttacttttctacacttttagtagggaggacattttctagagcagaaatataaattcaatattcatgaggcatattattggtaaactaaactggcattccttggaagtaaaatataatctctgtgaagttcgtgaaatgyttcagaaaactttttggtgattttcttttcagacactaaatattttattaaataagtgagatccctaaacaaatttccaa

SEQ ID NO: 688109 - DNA, 612 bp, Homo sapiens
tgtttttaaaattttccagttataaaaacaacaacatttaagctgcttcttctaaccgtagaggccttcctgttcaataactatgacataaatgattcaataatggcaatgattctttgttaatggctaattcaccatgcataatccttttagacatgactcagctttcctgttgggacaatatttcatttatgactatcaaattaatttatctgaagcatatactgggtacaataaaccttcactttcagctgaaaatgrgcaagggcagcactaggcatctcatctcagaacttgctggcttcaaaacttttcctttgctggtggaaggccggggcctctatgaaatctagaacacagatcagggaaacagattctttctacagctcaggtgcagcgtgaagattatgtgattgggacaagtatgtgtttcatgttctcagggttcccactgggtagaacacagtgcagtcatgaaagacagactggaaagccatggtatccccaggagccccccaacttatttctttaagtctacaggtcacaacttcccagtggtaccccaggaaatgatgacaagctagcaatatacttgttctcttggctcttagg

SEQ ID NO: 688110 - DNA, 612 bp, Homo sapiens
tgtttttaaaattttccagttataaaaacaacaacatttaagctgcttcttctaaccgtagaggccttcctgttcaataactatgacataaatgattcaataatggcaatgattctttgttaatggctaattcaccatgcataatccttttagacatgactcagctttcctgttgggacaatatttcatttatgactatcaaattaatttatctgaagcatatactgggtacaataaaccttcactttcagctgaaaatgggcaagggcagcactaggcatcycatctcagaacttgctggcttcaaaacttttcctttgctggtggaaggccggggcctctatgaaatctagaacacagatcagggaaacagattctttctacagctcaggtgcagcgtgaagattatgtgattgggacaagtatgtgtttcatgttctcagggttcccactgggtagaacacagtgcagtcatgaaagacagactggaaagccatggtatccccaggagccccccaacttatttctttaagtctacaggtcacaacttcccagtggtaccccaggaaatgatgacaagctagcaatatacttgttctcttggctcttagg

SEQ ID NO: 688111 - DNA, 1571 bp, Homo sapiens
ctcctttctttagatcatatccttggaattacctgcattcctatgtgcccatattcccatggagatcatataaccaacccttcttrctgttagaaccttctagtccttataatgggcagaaagccaaatggctttctacctgtgccaactgaaggccaaggaagacaatggactggactctctgctgcctctggaacaccatatccaaaacaagagctgctggtagcatatctgtacctatttttactccaatgtgagccccaggtgcaaaatagtcaattcactggtaaaccatgagagacagaattgtcagagtacagtaaatcagctcaacaaaactggctggataaaaggtagaatttactgtacaaactattaagcataatgcttaattgtaggctagaattgttgacataatggcatattagccaaaaagaataaaaaccacattttgggtactagtgaaatgaaatggtcgttgtttaggaaagttttttggctccctttcccaattaaagttctccatgtcaaggaaatgtaaacgatcaacttcttcagaccaacttggataaactaacagaagataaaaaagaggcgggccaggcgtgatggctcacgcctgtaatcccagcattttgggaggctgaggtgtgcagatcacctgagtcaggagttcgagaccagcctggccaacaaggtgaaaccccgtctctactaaaaaaacaaaaattacccaggcgtggtggcaggtgcctgtaatcccagctactcgggaggttgaggcaggagaatcacttcaacccacaaggcagaggttgcagtgagccgagattgtgccactgcactccagcctggagacagagcaagagtccgtctcaaaaaaaaaaaaaaaaaaaaaaaaaagataaaaagaggcatatgaaaataatgtctcatcaaataactcttggtacctccaccccgctttctatatgattcatattgccgagggccaggtgcttattacagtggcagtaagatggtccaaaacagtcctcctgcctgatttcatgtggctcaagtctaaggcaaatcatacagctaggacttaccactaacactactactgctctatgtggtctatgtcaagacattggtcgcagatgctccctttaattcaatttatgcttattaaagatttacaaaacacatgacaagatcaaggtttatagaaaaaggttttataatcccatggattctacaaggcagtgatttagacttacccaattatctgcagaagtttcttttatagcaatatttcataaaatcctagcaaattagaagtttttaatatattttcctatgccatactaactttgtagtttatgaaaaataacattaaatttacaaacaataagatacagatatattttaaaaatcttaagggagaagcttctgctcttaaaatcttatcatgaaaaggagccagtaacttggattttaaatggaaatcagtaagaaagaacaattaataggtggcctggtgtggtggctcacacttgtaaacctagcactttgggaagctgaggcag

SEQ ID NO: 688112 - DNA, 1571 bp, Homo sapiens
ctcctttctttagatcatatccttggaattacctgcattcctatgtgcccatattcccatggagatcatataaccaacccttcttactgttagaaccttctagtccttataatgggcagaaagccaaatggctttctacctgtgccaactgaaggccaaggaagacaatggactggactctctgctgcctctggaacaccatatccaaaacaagagctgctggtagcatatctgtacctatttttactccaatgtgagccccaggtgcaaaatagtcaattcactggtaaaccatgagagacagaattgtcagagtacagtaaatcagctcaacaaaactggctggataaaaggtagaatttactgtacaaactattaagcataatgcttaattgtaggctagaattgttgacataatggcatattagccaaaaagaataaaaaccrcattttgggtactagtgaaatgaaatggtcgttgtttaggaaagttttttggctccctttcccaattaaagttctccatgtcaaggaaatgtaaacgatcaacttcttcagaccaacttggataaactaacagaagataaaaaagaggcgggccaggcgtgatggctcacgcctgtaatcccagcattttgggaggctgaggtgtgcagatcacctgagtcaggagttcgagaccagcctggccaacaaggtgaaaccccgtctctactaaaaaaacaaaaattacccaggcgtggtggcaggtgcctgtaatcccagctactcgggaggttgaggcaggagaatcacttcaacccacaaggcagaggttgcagtgagccgagattgtgccactgcactccagcctggagacagagcaagagtccgtctcaaaaaaaaaaaaaaaaaaaaaaaaaagataaaaagaggcatatgaaaataatgtctcatcaaataactcttggtacctccaccccgctttctatatgattcatattgccgagggccaggtgcttattacagtggcagtaagatggtccaaaacagtcctcctgcctgatttcatgtggctcaagtctaaggcaaatcatacagctaggacttaccactaacactactactgctctatgtggtctatgtcaagacattggtcgcagatgctccctttaattcaatttatgcttattaaagatttacaaaacacatgacaagatcaaggtttatagaaaaaggttttataatcccatggattctacaaggcagtgatttagacttacccaattatctgcagaagtttcttttatagcaatatttcataaaatcctagcaaattagaagtttttaatatattttcctatgccatactaactttgtagtttatgaaaaataacattaaatttacaaacaataagatacagatatattttaaaaatcttaagggagaagcttctgctcttaaaatcttatcatgaaaaggagccagtaacttggattttaaatggaaatcagtaagaaagaacaattaataggtggcctggtgtggtggctcacacttgtaaacctagcactttgggaagctgaggcag

SEQ ID NO: 688113 - DNA, 997 bp, Homo sapiens
caggcgtgagccaccgtgctctgccattttttttttttttaaagacagggtctcactccatttgcccagactagagtgcagtggcgtaatctcagcttactgcagccttgacctcccaagctcaggtgatcctctcacctcagcctcctgagtagctggtaccacaggcatgtgccaccacacctggctaatttctagtatttttagtggagtcaaggttttgccatgctgagtccaggtctcgaactcctggattcaagcaagctgcctgcctcggcctcccaaagtgctggtacaggcaggggccaccatgcagggcctctaagatgatattcttaaaaggaaggcctacttctgaaataatagttgtaaatgctatagcagttgttaacataaattagagtactctcatcattttgaaaagaaaattttcaaatgttattattagttgtattcattgaccaccaattaawacaagaatgtctgtttattcttatttaatttattctacctaggtatttgcaggtattaggcagattttaagagtataagagaaccatatgctctaggtaggagcaaagcgggtataaatgaatgaaaagtttgatgtactatttttgaaaaaatatttttgtaattttttaagcagtatttttttaattacaaaagcaatacagtttatacatgaatttcataacaacattgttcataatagccaaaaagtagggacaactcaaatgtaattcaattgatgaaggaataaataaaatgtggtataccataaaatagaatattattcagtcataaaaaggaatgaagtactgatacatgctacaacatggatggaccttggaaacattatgctaagttaaataagacagacacaaagcaccacatgatgtgtgattacatttatgtaaaatacccaaaatagacacatagattagtgatatgtggaatctacaaatctacagaaagattgtggttgctggaggct

SEQ ID NO: 688114 - DNA, 1380 bp, Homo sapiens
atggaaagagccttaggaaagttaattagggcagtgcaggaggcccacaaggcaaggttgagcttacctatctgtgattttcaacttgtttttacatttcttttttaacaccctggtactctattctgtgatatgtggactcaaaactaaattagtaaaaatggtggcaggttttctgccttctaaattcccacatttaaaaatatagtgtacctgggatcaaaggagaccaagtatccttctcaagagaaaggggacggtgtcaaggccctgcgcaatagtgtttccttgagctgtgtcatctggaattaccaccattcatcagcttaatgatattttctgctgcctcttcagctgagtttgggcaggagtgatatatgaaagtgaagtggaacagtattggtggcctaatgggaaatcttttgttaaaggtgtcctaacaaaatagacgagtctattcttcaagtgctttttggtagtataaaagtaagtgattatttttttctttcttggctagttaatatcttttctgaaagtaaatatttttcatatactttttgacaaagcactgaaccaggcattatttttaaaatagaatataaaatgtgaaagattttgaaatgcattatattgtgtagattggataacggaaagtaaatacaacacaactgtgattttaaattgttgtaaaacagtttttaaaattcaaatgtaagtttactatgaagtatttccaagttgtatgtgtgtattcacttatatatcatctctcccataaagcatttgaggtggctaataagagtgcttgcaataaagttaggtttgacagaaaatacaagatgccgaatggatatagttttttgtttgtttgtttgtttgtttgtttttgagatggaatttcgctcttgttgcccaggctggagtgcaatggcacgatctctgctcaccgcaacttccgcctcccaggttcaagcgattctcctgccttggcctctcgagtagctgggattacaggcatgtgccatgcctggctaattttrtattttaagtagagacggggtttctccatgttggtcaggctggtctcgaactcctgacctcaggtgatccgcctgcctcggcctcccaaagtgctgggattacaggcgtgagccactgtgcccagccccaaatggacgtacttatactaaaaatgatttttttatctgaagttcaaaggtatctgggcgctcctttttctaagtctggaaaccccaaataaagtgggaagcatgaagaaagcaatggaaataatatagggtgaagtttctagaaaaaggagtctaatataattaccaaagttgggccatagttttgatttggggagttctggttcccaga

SEQ ID NO: 688115 - DNA, 580 bp, Homo sapiens
accgtgtaagccccagtttctctagtagattcactagtcactggttattctatcacttgcacaagtctagggagacagaagactaacatagcaaattaattaaagcaactttattacctacagatagccagcaagggaaaatccgtgtctggaattcaaggcgagccagtcccctagggctcaggaaatctgctcctggggcagatggagtcttatctcaatgtctcacattacattgccctggaactgacggaccccaaaaggctactctgccctgggttttatacccaggcacaattgagtttctgggctaacgcgctgaaggacatcgtgttctaggacgaacaggaacagcccgckctctgttctagccagttcctcgttatctcaggatgttacattcccagcactttctatagttatttttgagaactacaagtgagaaagggggaagagctgggtgagccaaggccatgtggggattcatcctgcacgctgcttatgatttttggctatagattcatctactcttgtcactctaatcccatctggtttctgtcttctaggaattcctcacatg

SEQ ID NO: 688116 - DNA, 672 bp, Homo sapiens
ttatcgtagctcactgcagccttgaactcctgagctcaagcgacactcccacctcaggctcccgaatagctaggactataggtgtgtgccactgcacccggctaatttttattttttatttattttttttgatagaggctgggtctctctatattgccccaggctgatcttgaactcctgggatctggtgatcctcccacatcagccttccaaagtgttgagattacaggcgtgagccactgcgcctggtccttgcagctgccagtatataaaggagcttctgagaaatgtccttggtcagagacaggcgcagcagctgcctyctggaatggtgttttaagtgaggcacatgcaggcttcgggttctgtttcatttgtggatgaagcaagaaagctgctgcctgacaaggatgagtggcttcgttaattaaattagcagtggaaattttactggctttaattagtgtaaaataagccacagaaataaagatagtgattaaagcatgctaatctgattagaatcacagtgtgcgtggttataggcaacttgatattagagaatcacagactaaggccaggaagaggcagagtcctgttttaaagaagaggatggttgcagatggcacaaaaacttggagctgctgcgggattgccaaattgcttggggaggat

SEQ ID NO: 688117 - DNA, 603 bp, Homo sapiens
aagaaaattgaggagcagagagcaccagttattttcccagtggcacacagcttaagaaatagccccgcctctttagtagagatggggtttcaccatgctgaccaggctggtctcgaattcctgacctcaagtgacccgccctcctcagcatccaatgtgctgggattacaggcgtgatccaccatgcctggccaaaagtgcatcagatttctgaccccctgtcccagagtttctgattcagtagtaggtcatgggtagagcccaagaatttatttctaacaacttcccatatgatgctgagcctgctcaccagggctctacaaccggcagccatcccactaaagaaacatggaccacartttattataaaaatattaggaattaaatgttacatatagtctataaatcattgaagaaaccattaaattagtaatattttattattaaaaagagggaaactggacttgattttagtggaaaagagcttttatttgtagtgtttgaatttggtcaaaattgaatatatttattttattattctaattgatgtttttcatgaaaatcatccattttatcaacttttacgtttgcgttagttcaccc

SEQ ID NO: 688118 - DNA, 603 bp, Homo sapiens
aagaaaattgaggagcagagagcaccagttattttcccagtggcacacagcttaagaaatagccccgcctctttagtagagatggggtttcaccatgctgaccaggctggtctcgaattcctgacctcaagtgacccgccctcctcagcatccaatgtgctgggattacaggcgtgatccaccatgcctggccaaaagtgcatcagatttctgaccccctgtcccagagtttctgattcagtagtaggtcatgggtagagcccaagaatttatttctaacaacttcccatatgatgctgagcctgctcaccagggctctacaaccggcagccatcccactaaagaaacatggaccacagtttattataaaaatattaggaattaaatgttacatatagtctataaatcattgaagaaaccrttaaattagtaatattttattattaaaaagagggaaactggacttgattttagtggaaaagagcttttatttgtagtgtttgaatttggtcaaaattgaatatatttattttattattctaattgatgtttttcatgaaaatcatccattttatcaacttttacgtttgcgttagttcaccc

SEQ ID NO: 688119 - DNA, 645 bp, Homo sapiens
ttccagccaattctcagcatcctctgcagggcaagcttgtcacccagctgtgtcatgatggctaaaagtatgggggggcagacaacacagcctcaagcacaaccacctggcactaatttgaaaaccccagggctgtctgggggaaatgctgtgatatttcccattaggcgaaaggcagcttaacattcataatttgattgagaaaaatggagctattttataggccagtaggctccaaattgttattctactcagatctttattgcttggcctttcttaatttaataagcaacctgtatctctcgtactgaagacaaatagattctataagtgaagatctaaaatctgaagtgttaataacagaactaaaaatatagttttgtttatttttctccatgtcagattctgttttctgtacaarcaaaccaatatgttcttgctctgagggacatacttgaaatgacagaatcatggggtctccattcatggcactgccatagtaacagattgggaccacgatgatttaacattaccaggagttactgttggaacaggtcaacacaacgtgaaacctctgctacacatcccacacacacttggccccaagacgttgcttctactttggaaaaatcacttttccaaaat

SEQ ID NO: 688120 - DNA, 697 bp, Homo sapiens
ttatctacaaaatgagggcattagaccccgtgccttccagcttcagtatttctctgattttggaaattttagatcaggcagatattggttcaaatttagagaatctgacataaaaacttttgtaggagaatagggtaggaagattggcctaaattattcagaaatctgccttactattatacatcattttaaacccatgaagagtaagaaattgttatgaattatttaacaaaacaaatttgtatttaaaataattttgctgagtactggtrtaaacaggctatctgctaaataggggataatgacaaatactctgcatttttacagatattgaaaggtggaaatgttctctccaacacactaaagagtaatcaaaggaactgatcctaaaactatgtgttgtacaagcaaaggtaaggggtcagcgctgtcgtttctgcagtgtctcagtctcatcacagaagtgaggatttatggtgaaaaggagtttaaagtttccattgtaaagaatgttccttcaaagataattgaaacgaaattttacaagtgaaaaggaggaaataaaagcagaaatgtgattcttgaaagtatagttgaaatgtcccagttattaacctctctgatactcactgttagtgattcatgtcatctctcaaccgccactttaataattgctttattagtgcacactggaaag

SEQ ID NO: 688121 - DNA, 584 bp, Homo sapiens
agctctacctcattctgttaggcatcagggttggttctaaccaagtcccacaaatccctttgctcccggcagacagtgcagggatacattgatcaattctttatcttcattaattttaggattccttaactgtggcctgaagctttggttctaatcacattactcttattatatgttcccagggttggtttacattgctttcattttaatgggggctgcttcttgaactcactaattgcatgactaattacactaaagcattgtggatcctccagtccgatgtgctgtctcaggcacgcatccattcattcattcactcgaaatgtgtcaatccagtgtttcctgcgttccaggcactgctctaggctgggagggcccatgggctgtgagaccaacaaggactctactcccagrggcctcccattccactggggcaactggtgataagcattttaaatggtgatgggatggggagatgcggtggggctttagcctctgctgagaggtgatctgaggacaggatgaggcagcagaggcaggaaaacagggatgcagctccgcagaacatctcagtgcaaagattc

SEQ ID NO: 688122 - DNA, 663 bp, Homo sapiens
gtttctttccctgaacagaagttcagttctgctcaattatcattaattttgctcctttatttcctttgcgggcgtgaacggagaagtcgtgctctttgaggttttgcgagctggccttggctggcagaggtgaccggcaatccttcagccggcggaaaaagtgcgagtgtgtgtgtgtgtgtgcttgtgaaaatgtgccgttcctcccagaaaaagtggaaacgtaggtggaaagctcagcacatgttggcgacacctaaaaaccrtgttctcggtcctgaacctttagaagcggtatcccaggaacgagtctgagtctgtgcaacagggcacagatgattcgacaaacttcaatgactgcaccgcattcatgcattatatccattgaaaagtaaatccagcgtctccactcgcgcgcccacgtgcgtggataaacgcgggaattcggcagccctcaacgtcactctgcagagatttccgggctgtgagagagttggggtgtgcggcgggggaggggagggtctgatatcttcaggttgagagtcaagtcctgggggagcggcatgggcgggggtggccggggggaggcggaggatggagcgcgaaccagaaagcgcagaggaccctcggcccgcgccgcacccgctgtgattagctccagag

SEQ ID NO: 688123 - DNA, 654 bp, Homo sapiens
ttttgtttttagagacagagtctgtctgtgtcacccaggctggattgcaatggcaaaatctcagctcactgcaacctctgcctcctgggtttaagcgattcttatgcctcagcctcccaaatagctgggactacaggtgcacaccaccatgcccggctaatttttgtatttttagtggagacagaatttcaccatgttggccaggctggtctcgaattcctgacctcaggtgatccacctgcctcggcctcccarcgtgccgggattacaggcatgggccactgtgccctgcccttgcctatattttgaaccaattgagaaataaaacaggacccaaacatcacccttattattgatgatgttaatattatgaacatggctaataggtacaaataagtggcttcctaatgctaatattttagaacatgccttataggtacaagcaggtgggcttcctactgtagacacacatctagtcatggccaggtctccccagcaggcttctcccatgtttgggagcaatggagacttattctctctgcaggtgggctcactcccaggagaaacagaagaggaagaagctcaggaatgcatgcccaggtcctccttcaaacccaccctgaggaagaaaaaaggttggaaagcagagaaaac

SEQ ID NO: 688124 - DNA, 966 bp, Homo sapiens
ctgctctgtggtttgacagtagctgtgactctatggtcacatagctgccactctcccactgctgcagatctcaccagattgccaaagagggccctctttctacccctccaggcctgggattacagcagctttctgctgctgatactgccttggtgtttctctaccctttgactggtcccttcttcctccccacacctccacaaatagtgctttccatgaactctcttcaattactccttggagagagctgtctttctctcactggttcctgattgattcaaccagaacctgaagaacttatgtagcatcttttttaaaaacaaacaaacaaacaaaaacctttattatagtttctactttggagtcaggcagacctagttatggaccctagtttgatcacttaccagtttgtgtgatctcagacaagtaacttagccccttactatgagtgagccatagtttactcactcaaaataaaagataatggtttgtgaagatttttaaaaaaagaatatgcaaactrcctagaccagtgtttggtacataataggtaattcatagaattgaaaatgggaaatgatgtcatggaaatatgtctgatatggtttggctgtatccccacccaaatctcatcttgaattctcatgtgttgttggaggagcccagtgggaggtaattgaatcatgggggcaggtctttcccctggtgttctcctgatagtaagtctcacaagagctgatagttattataagagggagttttcctgcacaagctttttttgcttgctgccatccatgtaagatgtgactagctcctccttgccttccaccatgattgtaaggcttccccagccatgtggaactgtaagtccaattaaacctctttcttttgtaaattgcccagtcttgggtatgtctttatcagcagcgtgaaaatggactaatacaatgtcaaacaataaattat

SEQ ID NO: 688125 - DNA, 966 bp, Homo sapiens
ctgctctgtggtttgacagtagctgtgactctatggtcacatagctgccactctcccactgctgcagatctcaccagattgccaaagagggccctctttctacccctccaggcctgggattacagcagctttctgctgctgatactgccttggtgtttctctaccctttgactggtcccttcttcctccccacacctccacaaatagtgctttccatgaactctcttcaattactccttggagagagctgtctttctctcactggttcctgattgattcaaccagaacctgaagaacttatgtagcatcttttttaaaaacaaacaaacaaacaaaaacctttattatagtttctactttggagtcaggcagacctagttatggaccctagtttgatcacttaccagtttgtgtgatctcagacaagtaacttagccccttactatgagtgagccatagtttactcactcaaaataaaagataatggtttgtgaagatttttaaaaaaagaatatgcaaactgcctagaccagtgtttggtacataataggtaattcatagaattgaaaatgggaaatgatgtcatggaaatatgtctgatatggtttggctgtatccccacccaaatctcatcttgaattctcatgtgttgttggaggagcccagtgggaggtaattgaatcatgggggcaggtctttcccckggtgttctcctgatagtaagtctcacaagagctgatagttattataagagggagttttcctgcacaagctttttttgcttgctgccatccatgtaagatgtgactagctcctccttgccttccaccatgattgtaaggcttccccagccatgtggaactgtaagtccaattaaacctctttcttttgtaaattgcccagtcttgggtatgtctttatcagcagcgtgaaaatggactaatacaatgtcaaacaataaattat

SEQ ID NO: 688126 - DNA, 966 bp, Homo sapiens
ctgctctgtggtttgacagtagctgtgactctatggtcacatagctgccactctcccactgctgcagatctcaccagattgccaaagagggccctctttctacccctccaggcctgggattacagcagctttctgctgctgatactgccttggtgtttctctaccctttgactggtcccttcttcctccccacacctccacaaatagtgctttccatgaactctcttcaattactccttggagagagctgtctttctctcactggttcctgattgattcaaccagaacctgaagaacttatgtagcatcttttttaaaaacaaacaaacaaacaaaaacctttattatagtttctactttggagtcaggcagacctagttatggaccctagtttgatcacttaccagtttgtgtgatctcagacaagtaacttagccccttactatgagtgagccatagtttactcactcaaaataaaagataatggtttgtgaagatttttaaaaaaagaatatgcaaactgcctagaccagtgtttggtacataataggtaattcatagaattgaaaatgggaaatgatgtcatggaaatatgtctgatatggtttggctgtatccccacccaaatctcatcttgaattctcatgtgttgttggaggagcccagtgggaggtaattgaatcatgggggcaggtctttcccctggtgttctcctgatagtaagtctcacaagagctgatagttattrtaagagggagttttcctgcacaagctttttttgcttgctgccatccatgtaagatgtgactagctcctccttgccttccaccatgattgtaaggcttccccagccatgtggaactgtaagtccaattaaacctctttcttttgtaaattgcccagtcttgggtatgtctttatcagcagcgtgaaaatggactaatacaatgtcaaacaataaattat

SEQ ID NO: 688127 - DNA, 966 bp, Homo sapiens
ctgctctgtggtttgacagtagctgtgactctatggtcacatagctgccactctcccactgctgcagatctcaccagattgccaaagagggccctctttctacccctccaggcctgggattacagcagctttctgctgctgatactgccttggtgtttctctaccctttgactggtcccttcttcctccccacacctccacaaatagtgctttccatgaactctcttcaattactccttggagagagctgtctttctctcactggttcctgattgattcaaccagaacctgaagaacttatgtagcatcttttttaaaaacaaacaaacaaacaaaaacctttattatagtttctactttggagtcaggcagacctagttatggaccctagtttgatcacttaccagtttgtgtgatctcagacaagtaacttagccccttactatgagtgagccatagtttactcactcaaaataaaagataatggtttgtgaagatttttaaaaaaagaatatgcaaactgcctagaccagtgtttggtacataataggtaattcatagaattgaaaatgggaaatgatgtcatggaaatatgtctgatatggtttggctgtatccccacccaaatctcatcttgaattctcatgtgttgttggaggagcccagtgggaggtaattgaatcatgggggcaggtctttcccctggtgttctcctgatagtaagtctcacaagagctgatagttattataagagggagttttcctgcacaagctttttttgcttgctgccatccatgtaagatgtgactagctcctccttgccttccaccatgattgtraggcttccccagccatgtggaactgtaagtccaattaaacctctttcttttgtaaattgcccagtcttgggtatgtctttatcagcagcgtgaaaatggactaatacaatgtcaaacaataaattat

SEQ ID NO: 688128 - DNA, 966 bp, Homo sapiens
ctgctctgtggtttgacagtagctgtgactctatggtcacatagctgccactctcccactgctgcagatctcaccagattgccaaagagggccctctttctacccctccaggcctgggattacagcagctttctgctgctgatactgccttggtgtttctctaccctttgactggtcccttcttcctccccacacctccacaaatagtgctttccatgaactctcttcaattactccttggagagagctgtctttctctcactggttcctgattgattcaaccagaacctgaagaacttatgtagcatcttttttaaaaacaaacaaacaaacaaaaacctttattatagtttctactttggagtcaggcagacctagttatggaccctagtttgatcacttaccagtttgtgtgatctcagacaagtaacttagccccttactatgagtgagccatagtttactcactcaaaataaaagataatggtttgtgaagatttttaaaaaaagaatatgcaaactgcctagaccagtgtttggtacataataggtaattcatagaattgaaaatgggaaatgatgtcatggaaatatgtctgatatggtttggctgtatccccacccaaatctcatcttgaattctcatgtgttgttggaggagcccagtgggaggtaattgaatcatgggggcaggtctttcccctggtgttctcctgatagtaagtctcacaagagctgatagttattataagagggagttttcctgcacaagctttttttgcttgctgccatccatgtaagatgtgactagctcctccttgccttccaccatgattgtaaggcttccccagccatgyggaactgtaagtccaattaaacctctttcttttgtaaattgcccagtcttgggtatgtctttatcagcagcgtgaaaatggactaatacaatgtcaaacaataaattat

SEQ ID NO: 688129 - DNA, 966 bp, Homo sapiens
ctgctctgtggtttgacagtagctgtgactctatggtcacatagctgccactctcccactgctgcagatctcaccagattgccaaagagggccctctttctacccctccaggcctgggattacagcagctttctgctgctgatactgccttggtgtttctctaccctttgactggtcccttcttcctccccacacctccacaaatagtgctttccatgaactctcttcaattactccttggagagagctgtctttctctcactggttcctgattgattcaaccagaacctgaagaacttatgtagcatcttttttaaaaacaaacaaacaaacaaaaacctttattatagtttctactttggagtcaggcagacctagttatggaccctagtttgatcacttaccagtttgtgtgatctcagacaagtaacttagccccttactatgagtgagccatagtttactcactcaaaataaaagataatggtttgtgaagatttttaaaaaaagaatatgcaaactgcctagaccagtgtttggtacataataggtaattcatagaattgaaaatgggaaatgatgtcatggaaatatgtctgatatggtttggctgtatccccacccaaatctcatcttgaattctcatgtgttgttggaggagcccagtgggaggtaattgaatcatgggggcaggtctttcccctggtgttctcctgatagtaagtctcacaagagctgatagttattataagagggagttttcctgcacaagctttttttgcttgctgccatccatgtaagatgtgactagctcctccttgccttccaccatgattgtaaggcttccccagccatgtggaactgtaagtccaattaaacctctttcttttgtaaattgcccagtcttgggtatgtctttatcagcagygtgaaaatggactaatacaatgtcaaacaataaattat

SEQ ID NO: 688130 - DNA, 621 bp, Homo sapiens
caagtagaatttgccccattctcaccttttaattagtagattatcacgtcatcataatcatcattttgtrctaagacaaattatgaaattaaaaccaaatcactttaaagaaatacttagcattttgaggaacacatttatggtgaacatatcacttttttccggctttggcttaaagcaagttacatagttgggattctattggattctttcttgctccctggttccaaaagacaccatagtaatactccatactcttatagctttaggctacttgctgtaagagataaaaaactgttttcccactttcaaatcactcaccactctcagtactttacttctgacaccagatatatggggagttttccccacacactaagaaattctccaatgagcactaactgggtttcctacaatttaactcaatcctgacactatgtatctggagttagggtcagaacccacaggtaaagggctcagtcctgtaagagtgccccccacccctcaaagacatcaatcacacatactaagttgtcacatatacttctgactgaacagttataaatcagggttcccatatcctgttctcatatttgaagaatttgttagaatgactcatgg

SEQ ID NO: 688131 - DNA, 621 bp, Homo sapiens
caagtagaatttgccccattctcaccttttaattagtagattatcacgtcatcataatcatcattttgtgctaagacaaattatgaaattaaaaccaaatcactttaaagaaatacttagcattttgaggaacacatttatggtgaacatatcacttttttccggctttggcttaaagcaagttacatagttgggattctattggattctttcttgctccctggttccaaaagacaccatagtaatactccatactcttatagctttaggctacttgctgtaagagataaaaaactgttttcccactttcaaatcactcaccactctcagtactttacttctgacaccagatatatggggagttttccccacacactaagaaattctccaatgagcactaactgggtttcctacaatttaactcaatcctgacactatgtatctggagttagggtcagaacccacaggtaaagggctcagtcctgtaagagtgcmccccacccctcaaagacatcaatcacacatactaagttgtcacatatacttctgactgaacagttataaatcagggttcccatatcctgttctcatatttgaagaatttgttagaatgactcatgg

SEQ ID NO: 688132 - DNA, 640 bp, Homo sapiens
tggccccatttgtcccagtctgagcttcttcacyctgtctttgatattcttagttatatcctctggtctagaccaagataggaacctgagaaggatgcaaaggaggtacagcgttgctggactgccctggctggctccactctcagaatcagggaaaggtcagggattggagatggagtaaaggtttagatgaaaaaggaaagcagcaagaatcttaagataaagtcactttgaccccaccccatccctaatattactgtttgaatatgtagtccataatattgggcatggaggagagacaaattatggcagtaaaaagacaaatcagaaattaagcattgaactccagaatatgatgggcatattctgaatctgcactgccctccatggtagccactagccacatgtggttatcgagcactggaaatgtgactggtgttactcaagattgaaattttgaatttcattgaattttaattaatttaaagttaaatttaaataactgcatgcgagctgggtatggtggctcatgcctataatcccagtgctttaggaagccaagttgggaggatcccttgagaccagaagttcaagagcagcctgggcaccatagtgagacccctgtctctacaaaaaaact

SEQ ID NO: 688133 - DNA, 640 bp, Homo sapiens
tggccccatttgtcccagtctgagcttcttcactctgtctttgatattcttagttatatcctctggtctagaccaagataggaacctgagaaggatgcaaaggaggtacagcgttgctggactgccctggctggctccactctcagaatcagggaaaggtcagggattggagatggagtaaaggtttagatgaaaaaggaaagcagcaagaatcttaagataaagtcactttgaccccaccccatccctaatattactgtttgaatatgtagtccataatattgggcatggaggagagacaaattatggcagtaaaaagacaaatcagaaattaagcattgaactccagaatatgatgggcatattctgaatctgcackgccctccatggtagccactagccacatgtggttatcgagcactggaaatgtgactggtgttactcaagattgaaattttgaatttcattgaattttaattaatttaaagttaaatttaaataactgcatgcgagctgggtatggtggctcatgcctataatcccagtgctttaggaagccaagttgggaggatcccttgagaccagaagttcaagagcagcctgggcaccatagtgagacccctgtctctacaaaaaaact

SEQ ID NO: 688134 - DNA, 640 bp, Homo sapiens
tggccccatttgtcccagtctgagcttcttcactctgtctttgatattcttagttatatcctctggtctagaccaagataggaacctgagaaggatgcaaaggaggtacagcgttgctggactgccctggctggctccactctcagaatcagggaaaggtcagggattggagatggagtaaaggtttagatgaaaaaggaaagcagcaagaatcttaagataaagtcactttgaccccaccccatccctaatattactgtttgaatatgtagtccataatattgggcatggaggagagacaaattatggcagtaaaaagacaaatcagaaattaagcattgaactccagaatatgatgggcatattctgaatctgcactgccctccatggtagccactagccacatgtgsttatcgagcactggaaatgtgactggtgttactcaagattgaaattttgaatttcattgaattttaattaatttaaagttaaatttaaataactgcatgcgagctgggtatggtggctcatgcctataatcccagtgctttaggaagccaagttgggaggatcccttgagaccagaagttcaagagcagcctgggcaccatagtgagacccctgtctctacaaaaaaact

SEQ ID NO: 688135 - DNA, 542 bp, Homo sapiens
agatatctatactcccatgtccactgcagcattattcacattagacaagatacagaaacaaccaagtgtctggatgaatgtatgaatgaataatgtatggtgtgtgaataatatatatgtataatattccattatataaaaaatatatactattccattatatagagtatacagtattctgtcatatatgatatgtaatattccattatacataatatgcaacattttgttatatatatttcactatatataatatatatattcattataatataatgttccattatatattatttcattttatatattatatattatatatattatatatattatatcatatataaaawaaaataatataataaaaaataaaaataaaaatatataaataaaaataaaatatataaataaatatataaatcacaaaaatatataaataaatataatatttatataattatatacattatgtattttatataatattatatattttatataatatatcttatatatcttatatgataatatataatatatct

SEQ ID NO: 688136 - DNA, 1282 bp, Homo sapiens
attaccctggtcggaggaatacattgtgtgtgactctaacacgatcaagtttgcctggtagctgtactcataaggccagcgccagctttatgtggagaaacagtagatatctgcctaaagagccatgactgaaatgtttcacatagtcctctcagtcccagagcatttccttcatcagctttcatgggatacctgtggattttcctatgcagaaattcccatcattataccagtattcattgtttagacaacaaaatcaaggacatattctctagaattgtgttggccaattgaaatagctactagccaggtatggctagttaactttaaattaattaaatataattacaaattcagttcttcagctgtagtgatcacatttcaagtgctcaatattcacatgtggttggtggctaccatattggacagtgaagatcatttccatcacaatagcaagttctctcagacagcactactctaaaaggtctagaaagcatctatttaataaattagcccttgaatgcaattcaagttatattttatgagarctgtggatatatctagcattatgtatgctgggtgaaggcatagatgttattatttgttaagtgccacagcaatccttattgataggtgctgttctcattttagagatgagaaaacagagactgtgcacaacacaaaagtaaatgacaagctgattcaagctcttctcaccaaaacctgctgcctcaaaaagtgaaatgtactcaaagacaatccttaagagtgaacatgagagaaaactacaccctagccagagctcaatttggaagagtttcttcccttaggtgaggacactaaaataacaattgttatggctggaaataatgacaaaggggatggagggaaaaaaaacaaaacaaaacactgaaacaaagggccctatccagagggaacgcttgggtattttgttttttctctaatatattcaatacatactatattctatcttaaggcaaaatttgatacatgtaaaacttttatgcattaagataaccttcataagtttatttaaagaatgggaaaatgggaactacttaaatgtctgatttcattagttaattaataactaatttcattaatgaaactcaacagaatgttatccaacccctggaaacaattgtttggaaattgatataataattcagagaagtactttgatgtatcgttgagatcaaaaggtagtgctaattcaataaatgtgtatacaataaggatgacaacattgaatggaaagaca

SEQ ID NO: 688137 - DNA, 646 bp, Homo sapiens
tgtggcttaagagatgctaactgtacctctggcttaaccctgattgagttaatctccgtggttatagaaatgtattcaggccttgacacatcactcaactgggggcaatgagacatttgctgaggatatctggaaaagaagcttcttcactagtctaaaagaactcccggaagagagtctccattctcattggaagtgacccagacttgtagccccttgaagctcctgacaattattttactgttgtgatagaagccagcctgaggactaaactaacacaaagttgggaaaatccatgagcattatagataaattgatgctgagtactaagttttagatttttagttaagttgatataactttttctaggtgaaataagcaagtcagagttccatcactctctagctatatggcattaaggcaagttacttaatctcactaagcttccctttcctcatctgaatattggatttctacagtgtctagttcatagagtctcawgaggactaagtaagaaaatgtgtacaaggcactcagtccaggattgatcagttttaagtgtgaggtagttgtaagataatatttattggtattattattatttgcatcagtaatataattattattagattatagcaaacccagg

SEQ ID NO: 688138 - DNA, 578 bp, Homo sapiens
  misc_feature 2, 3, 4, 5, 6, 7, 8, 9, 10, 11, 12, 13, 14, 15, 16, 17, 18,19, 20, 21, 22, 23, 24, 25, 26, 27, 28, 29, 30, 31, 32,33, 34, 35, 36, 37, 38, 39, 40, 41, 42, 43, 44, 45, 46,47, 48, 49, 50, 51, 52, 53, 54, 55, 56, 57, 58, 59, 60,61: n = A,T,C or G
  misc_feature 62, 63, 64, 65, 66, 67, 68, 69, 70, 71, 72, 73, 74, 75, 76,77, 78, 79, 80, 81, 82, 83, 84, 85, 86, 87, 88, 89, 90,91, 92, 93, 94, 95, 96, 97, 98, 99, 100, 101: n = A,T,C or G
tnnnnnnnnnnnnnnnnnnnnnnnnnnnnnnnnnnnnnnnnnnnnnnnnnnnnnnnnnnnnnnnnnnnnnnnnnnnnnnnnnnnnnnnnnnnnnnnnnnnncaatgtctattaaaatttaaaatgcatgctctttagcaagaaacctcacttttgggaatctgtcctacactagtaaaaccaacgacacatgaaaaacatagaggaggatgtttattgcagcactgtttgggacaaggaaaaygaatgattttttttttttttttttttttttttttttttttgtgtgagacagagtcttgctctgtcacccaggctggagtgcagtggcaagatctcagctcactgcaacctctgcctcctagattcaagagattctcctacctcaaccttccaagtagctgagattataggcaggagccactacacctggctaatttttgtatttttaatagagtatttttaatgttagtgaggctggtcttgaactcctgacctcaggtgatcctcccacctcagcctccgaaagtgctgggattataggtgtaagccaccaagcctggccggaaaatgaatgat

SEQ ID NO: 688139 - DNA, 578 bp, Homo sapiens
  misc_feature 2, 3, 4, 5, 6, 7, 8, 9, 10, 11, 12, 13, 14, 15, 16, 17, 18,19, 20, 21, 22, 23, 24, 25, 26, 27, 28, 29, 30, 31, 32,33, 34, 35, 36, 37, 38, 39, 40, 41, 42, 43, 44, 45, 46,47, 48, 49, 50, 51, 52, 53, 54, 55, 56, 57, 58, 59, 60,61: n = A,T,C or G
  misc_feature 62, 63, 64, 65, 66, 67, 68, 69, 70, 71, 72, 73, 74, 75, 76,77, 78, 79, 80, 81, 82, 83, 84, 85, 86, 87, 88, 89, 90,91, 92, 93, 94, 95, 96, 97, 98, 99, 100, 101: n = A,T,C or G
tnnnnnnnnnnnnnnnnnnnnnnnnnnnnnnnnnnnnnnnnnnnnnnnnnnnnnnnnnnnnnnnnnnnnnnnnnnnnnnnnnnnnnnnnnnnnnnnnnnnncaatgtctattaaaatttaaaatgcatgctctttagcaagaaacctcacttttgggaatctgtcctacactagtaaaaccaacgacacatgaaaaacatagaggaggatgtttattgcagcactgtttgggacaaggaaaacgaatgattttttttttttttttttttttttttttttttttgtgtgagacagagtcttgctctgtcacccaggctggagtgcagtggcaagatctcagctcactgcaacctctgcctcctagattcaagagattctcctacctcarccttccaagtagctgagattataggcaggagccactacacctggctaatttttgtatttttaatagagtatttttaatgttagtgaggctggtcttgaactcctgacctcaggtgatcctcccacctcagcctccgaaagtgctgggattataggtgtaagccaccaagcctggccggaaaatgaatgat

SEQ ID NO: 688140 - DNA, 1356 bp, Homo sapiens
ttactatagagaaaaggccttttcatagctatgtagtctttggttagtaattagcattgtctttcttacattaattctgattataatgtatattctacagtttctagacccatataatctcagtgaaaaatgctgcatgatttttagttatgtattcctcaaactttaacagtagcctcacccacatataacttagcagcagttttgttttagcatcttgtctttatcaaaccacttcaaagcagcctccttgatattcatataagtaacagctcttcttctttgcctttgtgttttattctttacttacaaatacaaatgagccaacattaacatattaaataccagttggctgaacagaacacagtgaacaggaggtatacagagttggctaacaactatgagtcagcagtacatttgattctccgtatttgtgttttacaggggaaaatggagagctttcggtaatctaagtatgagtaaatggaggtcagtcaagggttgacctgcaggggctgcagaaagctgcctgaagataccatgattcagcccattcttaatggagacagagatgttgatggaagaacagtgagcacaggaggaagttgataaactagtctgaaaatgctgctatttcaaatctgtgtctgcagttaaacatccaaaaatttggttgcatttttttgttttaaaaattttaactcaatccttactaatgtatccttcatgttttaaatttcatgcaaaaggaaagaagaaactaagtgcatatagcaaaatattaatcacctttaaaagagaaacactgagaataaaaaaagcatcacattttaggaaacacatgttaagtaatgataggcctatggctttttcacttgcctactaatgtattacaggcatcttgctatattctatgggacacagaattaaattgaattaaattttattacagaaagaggcttattagctaattactctctcaggcggttgccaaagttagaaccagatatctaccatacttgctcaaacacaaataaaaataacttttagaaaaagctaattattaatgatactcttgattaaaaacctcttttcttttatacatgctatttaaaaattgatagcgaggcaggcagatcacgaggtcaggagatgaaaaccatcttggctaacacagtgaaaccccgtctctactaaaaatataaaaaattagctggacatggtggcrggtgcctgtagtcccagctacttgggaggctgaggcaggagaatggggtgaacccaggaggtggagcttgcagtgagctgagattgtgtcgtgccactgcactccagcctgggcaacagagcgagact

SEQ ID NO: 688141 - DNA, 660 bp, Homo sapiens
actaatcattgatacacagaaatgagaaaaactgtaacataagtgaaaagtagcacatgcattcacattgggctattccggtggtgaataaagaaaattcccttgaatcaattagactgtgatgaaaactatgagaatggcatagaacctgagtggtaatttataatcatctaattcacaatgtcttttctaagtgttctaatagtgattgtgttagatagaawaacggtcccccaaagatcttcacgtcctaattcccagaacctatgaatatgttacattgcttggcaaagggatttaagagtgtagttgaaattaagggtggtaatcagctgatcttaacataagatatcatcctcaattattcagatgggcccaatatattcactcacaatagactttgatgaaccttaaagctttttaattatttttaatccaatagaacatcttcctttttttgtagttgttcttggcattttcctcacctatcttttatattgtatttatctaagttatttgccaactacttaaagaactcctattgggaattagcactatgctattggagtacacaaaccattcattacagcgttatgtgctaaaacagcaacaagcaaagacagctaatacagccttggagattgtgatgtatgtatgtga

SEQ ID NO: 688142 - DNA, 606 bp, Homo sapiens
ttttacaaatcgaacgggaaaataaaatctcagtgctgttatagtttatataaccatcattgaaaatgaggttgagaaactttgattttctgtgaattgttaacagccattgaccatttttcttctgttgggttttttgtgtttaccatatcgatttaagaaaattatttatatatgattaagctttaatatttatcttccatcttttctattgtgctaggctgtctttttatttggctcatggtatctttcttcataaagaagagtttaaaattatcattattttgttaaagttatcttctcttcctgcatggctgtctgttttgttttctactgcaaaaggccccccacgctaaaatattcttgacagtattttcataattattttattgcacttagttctttaatcaatgtggattttaaaatgttatgaactagaaatctaatttctctcattcaaatgaatcattctttttccattggttcttttttttccttttcttctctattctttcactttttctcttcyacatcatctgcatatttagtctgactgagattgcattacatagattaatttagaaaaattggcattaataatataga

SEQ ID NO: 688143 - DNA, 1732 bp, Homo sapiens
ctgaattccacccagtcttcaggtctcaggataaatgtcactttccaagaaaagcttttgcctacattggatagccctatcctagacttcatgcagcctgtacttttatttcatagcagttgacatgttggtatttatatcatttatatggggtttttcgatatctctttttttcccactagagtataaattccacaagagcaggaaccttgcctctcttgtcatcacatctgagtgcttcatactgtgtctggcaaatagcaatggtatttagagggtgagcatgtcacatactctgtgttcgacacagttttatgtacagacatatttgttaatcctcaaaagttgtttgaggaaagtaccataatatttccctttttaaagattgagaaactgagataaagagatgtagagcaacttctataaactttcactgccaacaggggccaagtctagattaaacccaggcgctcttgcttcagactttgtgttcttaaccactttttttttttttactgcatttatagataaccctttgtcaaataagtcaaagaataaattaatgagctagacaaactaataccaaagtgcctaacctactttagcagtcttacatgtcttttgaagatataaagattaaatgaaaactgaaagatgagtaggaggactgaaatttagccctagcatttgggcaaaaaagtgtggatatgcagaaaagtatattccaggtaaggtaagcttcatagatgaaagtttggagatgtacgagtatagatacttctagaaatgagtagaatttcattttacctggcaggcatgctgagtgtgagaggcatcttggtaaggctgtagatctaggcagggcctaaatgatgggaggctttataaatactttctaaagaagttttataggatttgacggaaaggcttaaaagacaggagtgacccaatcagataggcgttttgagaatgctgctgcctatattgtagaaaagcattttaagcaaataagtccagaaacagagagaaaaagctgtttggtagtacttgaaataaaagatttggtgacctgtactacagtagtagcagtaggagtggagataaatatttggatgtaataatatttaggattaagagacaaaaggacttcatgattgaatacaggagtgtgaggaagaagttagtcatcgcaagttattgaaatatgaagttggagtcaggaataggaaagaaaggatcagactttgaggtgccagtgtggttttccagtgaccatgattattaacagttgagaatgtttctcttgagcttaagagatatacgtctaggctagaaatacaaatttgggatagtttaagtagcaactgaagccatgaaagtccaaggcaaaagaaaataattaccaggacagatgtctcaggacttgtcaatgtgaactgtaatgagtttgttgtttcttagcctcaggtttctatgctrtaaaatgtcagtgtgaagaatgtacttcacagggttaatatcaggctattatgaaacaactgtgaaaacctctggaagttgtgtacattcactaaagcataattccatctctttgtttctacgtagttaaaataactttctttttcaagtaatctcaagaggaaacataaaacttgcatcagcaagtgaatactaaatttccaaggattgtaatgggagtttgtaggaaaaagaaaatatcctctctcctaat

SEQ ID NO: 688144 - DNA, 1732 bp, Homo sapiens
ctgaattccacccagtcttcaggtctcaggataaatgtcactttccaagaaaagcttttgcctacattggatagccctatcctagacttcatgcagcctgtacttttatttcatagcagttgacatgttggtatttatatcatttatatggggtttttcgatatctctttttttcccactagagtataaattccacaagagcaggaaccttgcctctcttgtcatcacatctgagtgcttcatactgtgtctggcaaatagcaatggtatttagagggtgagcatgtcacatactctgtgttcgacacagttttatgtacagacatatttgttaatcctcaaaagttgtttgaggaaagtaccataatatttccctttttaaagattgagaaactgagataaagagatgtagagcaacttctataaactttcactgccaacaggggccaagtctagattaaacccaggcgctcttgcttcagactttgtgttcttaaccactttttttttttttactgcatttatagataaccctttgtcaaataagtcaaagaataaattaatgagctagacaaactaataccaaagtgcctaacctactttagcagtcttacatgtcttttgaagatataaagattaaatgaaaactgaaagatgagtaggaggactgaaatttagccctagcatttgggcaaaaaagtgtggatatgcagaaaagtatattccaggtaaggtaagcttcatagatgaaagtttggagatgtacgagtatagatacttctagaaatgagtagaatttcattttacctggcaggcatgctgagtgtgagaggcatcttggtaaggctgtagatctaggcagggcctaaatgatgggaggctttataaatactttctaaagaagttttataggatttgacggaaaggcttaaaagacaggagtgacccaatcagataggcgttttgagaatgctgctgcctatattgtagaaaagcattttaagcaaataagtccagaaacagagagaaaaagctgtttggtagtacttgaaataaaagatttggtgacctgtactacagtagtagcagtaggagtggagataaatatttggatgtaataatatttaggattaagagacaaaaggacttcatgattgaatacaggagtgtgaggaagaagttagtcatcgcaagttattgaaatatgaagttggagtcaggaataggaaagaaaggatcagactttgaggtgccagtgtggttttccagtgaccatgattattaacagttgagaatgtttctcttgagcttaagagatatacgtctaggctagaaatacaaatttgggatagtttaagtagcaactgaagccatgaaagtccaaggcaaaagaaaataattaccaggacagatgtctcaggacttgtcaatgtgaactgtaatgagtttgttgtttcttagcctcaggtttctatgctgtaaaatgtcagtgtgaagaaygtacttcacagggttaatatcaggctattatgaaacaactgtgaaaacctctggaagttgtgtacattcactaaagcataattccatctctttgtttctacgtagttaaaataactttctttttcaagtaatctcaagaggaaacataaaacttgcatcagcaagtgaatactaaatttccaaggattgtaatgggagtttgtaggaaaaagaaaatatcctctctcctaat

SEQ ID NO: 688145 - DNA, 1826 bp, Homo sapiens
  misc_feature 1735: n = A,T,C or G
aatgtgcctctgttgctaggctacatatgactgtatattcaagaacatggttaaatcatctcattgtacttagccagtgctacagcaaatatttattgaaataagctcacctcctaatgggatttataactagttttattaaataggaatttccattgaaatagcatttgctacttagggtttcaccagcaaacaatataatctctcatccaggaatttagatcttaagtgaatttgaaagggacatatcagatacatagtagatatagtaatataacaataatacacattgatcatgatttgggtgaattctctcagttgctctctctctttctctctctctctgtcactctatttcttctctcctctctctctctctctgtcttattcttcagtttgtgaatgtgcacatgtagaaacttaggaatctgtatgtgaatggttgttaaggtagcttgtcttgagagtttctttactacagcaatgactgataaaggatcactgccaaattgtggacacaaacacaaaaagagacaaaattagagagcaagagacaaaataaaatcgaagaaccagtgacaccaggtctactagggctgaattaccaaggaaaggatagcagttcaacacatttgcttcaagtctaccgcccagtagcctggagtaaatacactgggctattctcttttccttttcccaaataggatcggggggtgaactttttatttatagaagaaaatagttacaggaaacagaagaggtggttagaatgcagtctgtaaccttagcccaaattttccctctttattctcagagaaagtcatatatatatggagatagagagagagagagagcaggagagagaaagagaaagaggattccttgtacttttttttcctattttctgcctaccaaaattttgacaatcctttttccttgaactatatctttttatttgaatcagatgttgattaatgttttcttttgatatgtttcaatcaattctcagatgtgcttcttctagtagggtttctgcattttcactgatttatgatttatatgctctactaatcctcatgatgaataatctgtcaaaaaccactcatatatagtacttgtcagacaagcaaaaatattttaagtgaaagaaaatcaaaacaatcagtaccactttaacatttatgggttcatgtaatacttggatgaagactgtgtgtgtatacgtatgcatatatatacatatacctgcatatattcatatgtatatgcatgtacacatacaaaactgtgtgtgtgttagtgtaaaaccctgcaaccaaatcttctgttgtatttttttggctgattaaaatttattatgcactactggcctcaacttctaaattatcaacattggtgaaatataaaccagcaagggggtattcagtaactcaacttaaaagagtcggatgacactggatgcctttgcagtgttgttctagcaatatctagaaaattcctgcctttgactctgtgtcacaaatgaccagtgatgcatatagagaatgtggtcacaaagaagtacaagaaatttgaaaacagaaaaaaattgagaatgatctacctaaccactggtgtattcatgatagtctctttatatacaaacataacacataaaaataatacgcatgcctgaaacacagttggcagtcaataaattctacttagggaagacgattttatagaagataggawnacagcgaatatgagccagacctgggatcaaatcttagttcaaaatctcttaatttatgtaactttgggcaatttatacactatctataatg

SEQ ID NO: 688146 - DNA, 1826 bp, Homo sapiens
  misc_feature 1735: n = A,T,C or G
aatgtgcctctgttgctaggctacatatgactgtatattcaagaacatggttaaatcatctcattgtacttagccagtgctacagcaaatatttattgaaataagctcacctcctaatgggatttataactagttttattaaataggaatttccattgaaatagcatttgctacttagggtttcaccagcaaacaatataatctctcatccaggaatttagatcttaagtgaatttgaaagggacatatcagatacatagtagatatagtaatataacaataatacacattgatcatgatttgggtgaattctctcagttgctctctctctttctctctctctctgtcactctatttcttctctcctctctctctctctctgtcttattcttcagtttgtgaatgtgcacatgtagaaacttaggaatctgtatgtgaatggttgttaaggtagcttgtcttgagagtttctttactacagcaatgactgataaaggatcactgccaaattgtggacacaaacacaaaaagagacaaaattagagagcaagagacaaaataaaatcgaagaaccagtgacaccaggtctactagggctgaattaccaaggaaaggatagcagttcaacacatttgcttcaagtctaccgcccagtagcctggagtaaatacactgggctattctcttttccttttcccaaataggatcggggggtgaactttttatttatagaagaaaatagttacaggaaacagaagaggtggttagaatgcagtctgtaaccttagcccaaattttccctctttattctcagagaaagtcatatatatatggagatagagagagagagagagcaggagagagaaagagaaagaggattccttgtacttttttttcctattttctgcctaccaaaattttgacaatcctttttccttgaactatatctttttatttgaatcagatgttgattaatgttttcttttgatatgtttcaatcaattctcagatgtgcttcttctagtagggtttctgcattttcactgatttatgatttatatgctctactaatcctcatgatgaataatctgtcaaaaaccactcatatatagtacttgtcagacaagcaaaaatattttaagtgaaagaaaatcaaaacaatcagtaccactttaacatttatgggttcatgtaatacttggatgaagactgtgtgtgtatacgtatgcatatatatacatatacctgcatatattcatatgtatatgcatgtacacatacaaaactgtgtgtgtgttagtgtaaaaccctgcaaccaaatcttctgttgtatttttttggctgattaaaatttattatgcactactggcctcaacttctaaattatcaacattggtgaaatataaaccagcaagggggtattcagtaactcaacttaaaagagtcggatgacactggatgcctttgcagtgttgttctagcaatatctagaaaattcctgcctttgactctgtgtcacaaatgaccagtgatgcatatagagaatgtggtcacaaagaagtacaagaaatttgaaaacagaaaaaaattgagaatgatctacctaaccactggtgtattcatgatagtctctttatatacaaacataacacataaaaataatacgcatgcctgaaacacagttggcagtcaataaattctacttagggaagacgattttatagaagataggatnacagcgaatatgagccagacctgggatcaaatcttagttcaaaatytcttaatttatgtaactttgggcaatttatacactatctataatg

SEQ ID NO: 688147 - DNA, 647 bp, Homo sapiens
ctatgagttagcaaccaggaacacagcggatagatagttctcaacaaatatttatcgaatgatggaatgaatcttcaccccacaacacacacacacacacacacacactctctctctctctctctctcaacttgccttggcagaagaacctaatatctgaagggatttcagaatcttctgtcacatacatcgagcctgcttttgtgtctttgttccagctacctcctccttctctggtttgacagctagtggctctggggaattagacaatgggatagaaaggggaaatctcaaagttctagaatggcctcatgttccctgaagcttactgggtttctggctccaagatgacccagtggcatctccactacgtgctggagactgagaggctcaggacagtgcctgaagttcattcaccctcaggctacgtcttcagggactctgatctgctactaaaaccaagccccagggagtgaaggtccctgccatgycatccctctgatctcctccctgtgagggcaaagaaaactactgggtgttgatcatccagcaccggtagaacctgcagtcagctcttagactccagtataattgtgaagtgtgctgcagcaaacaggtcagttcaaatcccagctttacttacttca

SEQ ID NO: 688148 - DNA, 647 bp, Homo sapiens
ctatgagttagcaaccaggaacacagcggatagatagttctcaacaaatatttatcgaatgatggaatgaatcttcaccccacaacacacacacacacacacacacactctctctctctctctctctcaacttgccttggcagaagaacctaatatctgaagggatttcagaatcttctgtcacatacatcgagcctgcttttgtgtctttgttccagctacctcctccttctctggtttgacagctagtggctctggggaattagacaatgggatagaaaggggaaatctcaaagttctagaatggcctcatgttccctgaagcttactgggtttctggctccaagatgacccagtggcatctccactacgtgctggagactgagaggctcaggacagtgcctgaagttcattcaccctcaggctacgtcttcagggactctgatctgctactaaaaccaagccccagggagtgaaggtccctgccatgtcatccctctgatctcctccctgtgagggcaaagaaaactactgggtgttgatcatccagcaccggtagarcctgcagtcagctcttagactccagtataattgtgaagtgtgctgcagcaaacaggtcagttcaaatcccagctttacttacttca

SEQ ID NO: 688149 - DNA, 630 bp, Homo sapiens
cagtctcagcctctgaatgacccattgacacactccccttgttgtcagtgtggtgccgcatcctcccttgtgcctggagctttccaatgcagagattcccttctttatggtcgccagacaataaactcagagtcctctgttgggtgggatggcacagtcaccttgcagcgtggagctgggaaggggatcaggggatatctaactgcttcttcaacacctttttccgactgccctttcctctcccaggacatccccctgccgcctgtccccaccacctaggagctctgggggatgtgcccatttcttcctttattatgttcctaggataggctgaggttgggtccccaaggacaagaagtggctcctcagagttaatcaagccagagaggaagcccccgaatagcaataggctccttaagtctcatccttccacgtgtccccaggcctcaggggcactgcaagatcatcaactgtgggattccacwttgctgtcctgagtctctattcccctcatttggccaagaggagtgacaatgcctactctctccacttaatgggtgatatggcatcaatcctggtaacagaaagctgttgacctggaatgagcccatcagacaaatgagggtacaa

SEQ ID NO: 688150 - DNA, 2468 bp, Homo sapiens
tgatcagttgttcactcactgtctctcttgctagactatgagctcttgaggatggggccacctctgtcatgtgcatccacctgacatgtggaagcacaataaacatttgtggcatgaacagttgcctcttcctgaatcacacatcctaacccccttatccttccagatcaactaaatgccccctcctccaggaggtcttcctgtgctccctctgagaccagtagcamcccctccgcctgagtgcccaagccctctttgtcaccatcactttctatcacatgctattgactttagggagcatgcctcagctcctctctgggcctgtgagttcctggagggagggagccacatctgattcttctgtgtctctcacacacatgcacagggacaacccagaagactatctggttcagcagcagaattgttgaccaggaagcaagactcctggtgtggcctctggctggccatgtgacatccagcaacagcctcactttccccacctggcctcttagggcccatccagatccagcattctctgatacgccacctgatgctgcagctcaggggctgctgagctctactctgcatgcctctctccgtgggccatgggcttgggttcctgggaatttgttttccattcggagatcaaaggaacagaaatgctggacaccaggttcccaggcaaaacaaaacaaacatatcagagtggagaaacttttattaacttaacagctggcatcaggcctcagaggaactgtaacataatttggacaaaaatattgtgaggagtcttagggaggaaggtaagaactcatgagtctggagccaaagctttggggcaagggaggatgctgcctgtgagggggaagactttgcagcttgatgaagaatacttcatatttattgatacgttgctttgcactaaggaagatgtgtactttgtgctttaatgtattgcagcaatcaaggtgctggattacaaaaaaagaacagaaaggaaaaagagagagggagaaaaggaaaataaaagaacagaaaataacaaaaaagaaaggcaaaggaaccatctgtggctagctgaagcagtggaggaaatctattagaaggtatatgagttagatataatataaggcacatggctatgcaaagaagagagagcccagaaataacagtggcttaaattagacagagatttctttctttctcagtaagtagccaaaatgttatggtagttgtcttagttggttcaggataccataacaaaatagctcagattgggtgagctgtgaaatttattactcacagttgtagaggctgggaagtccaagatcaagatgctggcagattcagtgtctggtgagggcttcatagatggagccttgttgaagcattctcacatggcagaagggcaaaagggggtgaaggggtgaacagaaccccttgagccctttctaggagcatgaatcccatttgtaagggtagagccctcatggccaattgcctcctaaaggccccatctcttaatactattgcattggggattaagtttcaacatgaattttggaggggtataaccattgaaatcatagcagtggttctgcttcaagaagttttcaggccctggtttgtggatcccctaaccctaggtattgccctcaggatgtggtccaggaagccttactccatatccacattctagccaggagggaagggagaaagcaagggggaaggaatgctccttccttggaaggcaccacctggaaggtgcccacctctcttctgctcacacctgctgtccacagcacagtcaatggccacacttggaacaagggaacctggaaaagccattgtaatctaagcagtcattggcccagctaaataatctattactacataagcaggaagatggctcttgggaggatccacaagtctctgccaccgatgagattgggcagcctagataattgttggcaagagtgaggaatcaggcttagaaaactggtaggagtcaaactagccacagggcaggaccccagccccatcatactaatggacaggctggctggggtatgtcaccactgctgccactgggaaggatttcccgtctgttcctgcatctttgcacaagatccagaagggcagcgttctgcaggtggagtcaacgtcacaggcccaggtaccaactgccagggggtggagaggaaagacttcaggacccctcactgacttccgtggaaggaaagggtacgggacccacccacactagaggcaactgagaattgctccccaaatgtgatgggagttggatatctgatgatgtgtaccaccccttgaaagccaaaagcaaatgttcatgacacatgccatttcatcctcacagccatctagtgaggtgaatctcttcataagccccagcgttcaagagaaattgaggagcataactggagtcacatttgtcactcacttac

SEQ ID NO: 688151 - DNA, 2468 bp, Homo sapiens
tgatcagttgttcactcactgtctctcttgctagactatgagctcttgaggatggggccacctctgtcatgtgcatccacctgacatgtggaagcacaataaacatttgtggcatgaacagttgcctcttcctgaatcacacatcctaacccccttatccttccagatcaactaaatgccccctcctccaggaggtcttcctgtgctccctctgagaccagtagcaccccctccgcctgagtgcccaagccctctttgtcaccatcactttctatcacatgctattgactttagggagcatgcctcagctcctctctgrgcctgtgagttcctggagggagggagccacatctgattcttctgtgtctctcacacacatgcacagggacaacccagaagactatctggttcagcagcagaattgttgaccaggaagcaagactcctggtgtggcctctggctggccatgtgacatccagcaacagcctcactttccccacctggcctcttagggcccatccagatccagcattctctgatacgccacctgatgctgcagctcaggggctgctgagctctactctgcatgcctctctccgtgggccatgggcttgggttcctgggaatttgttttccattcggagatcaaaggaacagaaatgctggacaccaggttcccaggcaaaacaaaacaaacatatcagagtggagaaacttttattaacttaacagctggcatcaggcctcagaggaactgtaacataatttggacaaaaatattgtgaggagtcttagggaggaaggtaagaactcatgagtctggagccaaagctttggggcaagggaggatgctgcctgtgagggggaagactttgcagcttgatgaagaatacttcatatttattgatacgttgctttgcactaaggaagatgtgtactttgtgctttaatgtattgcagcaatcaaggtgctggattacaaaaaaagaacagaaaggaaaaagagagagggagaaaaggaaaataaaagaacagaaaataacaaaaaagaaaggcaaaggaaccatctgtggctagctgaagcagtggaggaaatctattagaaggtatatgagttagatataatataaggcacatggctatgcaaagaagagagagcccagaaataacagtggcttaaattagacagagatttctttctttctcagtaagtagccaaaatgttatggtagttgtcttagttggttcaggataccataacaaaatagctcagattgggtgagctgtgaaatttattactcacagttgtagaggctgggaagtccaagatcaagatgctggcagattcagtgtctggtgagggcttcatagatggagccttgttgaagcattctcacatggcagaagggcaaaagggggtgaaggggtgaacagaaccccttgagccctttctaggagcatgaatcccatttgtaagggtagagccctcatggccaattgcctcctaaaggccccatctcttaatactattgcattggggattaagtttcaacatgaattttggaggggtataaccattgaaatcatagcagtggttctgcttcaagaagttttcaggccctggtttgtggatcccctaaccctaggtattgccctcaggatgtggtccaggaagccttactccatatccacattctagccaggagggaagggagaaagcaagggggaaggaatgctccttccttggaaggcaccacctggaaggtgcccacctctcttctgctcacacctgctgtccacagcacagtcaatggccacacttggaacaagggaacctggaaaagccattgtaatctaagcagtcattggcccagctaaataatctattactacataagcaggaagatggctcttgggaggatccacaagtctctgccaccgatgagattgggcagcctagataattgttggcaagagtgaggaatcaggcttagaaaactggtaggagtcaaactagccacagggcaggaccccagccccatcatactaatggacaggctggctggggtatgtcaccactgctgccactgggaaggatttcccgtctgttcctgcatctttgcacaagatccagaagggcagcgttctgcaggtggagtcaacgtcacaggcccaggtaccaactgccagggggtggagaggaaagacttcaggacccctcactgacttccgtggaaggaaagggtacgggacccacccacactagaggcaactgagaattgctccccaaatgtgatgggagttggatatctgatgatgtgtaccaccccttgaaagccaaaagcaaatgttcatgacacatgccatttcatcctcacagccatctagtgaggtgaatctcttcataagccccagcgttcaagagaaattgaggagcataactggagtcacatttgtcactcacttac

SEQ ID NO: 688152 - DNA, 2468 bp, Homo sapiens
tgatcagttgttcactcactgtctctcttgctagactatgagctcttgaggatggggccacctctgtcatgtgcatccacctgacatgtggaagcacaataaacatttgtggcatgaacagttgcctcttcctgaatcacacatcctaacccccttatccttccagatcaactaaatgccccctcctccaggaggtcttcctgtgctccctctgagaccagtagcaccccctccgcctgagtgcccaagccctctttgtcaccatcactttctatcacatgctattgactttagggagcatgcctcagctcctctctgggcctgtgagttcctggagggagggagccacatctgattcttctgtgtctctcacacacatgcacagggacaacccagaagactatctggttcagcagcagaattgttgaccaggaagcaagactcctggtgtggcctctggctggccatgtgacatccagcaacagcctcactttccccacctggcctcttagggcccatccagakccagcattctctgatacgccacctgatgctgcagctcaggggctgctgagctctactctgcatgcctctctccgtgggccatgggcttgggttcctgggaatttgttttccattcggagatcaaaggaacagaaatgctggacaccaggttcccaggcaaaacaaaacaaacatatcagagtggagaaacttttattaacttaacagctggcatcaggcctcagaggaactgtaacataatttggacaaaaatattgtgaggagtcttagggaggaaggtaagaactcatgagtctggagccaaagctttggggcaagggaggatgctgcctgtgagggggaagactttgcagcttgatgaagaatacttcatatttattgatacgttgctttgcactaaggaagatgtgtactttgtgctttaatgtattgcagcaatcaaggtgctggattacaaaaaaagaacagaaaggaaaaagagagagggagaaaaggaaaataaaagaacagaaaataacaaaaaagaaaggcaaaggaaccatctgtggctagctgaagcagtggaggaaatctattagaaggtatatgagttagatataatataaggcacatggctatgcaaagaagagagagcccagaaataacagtggcttaaattagacagagatttctttctttctcagtaagtagccaaaatgttatggtagttgtcttagttggttcaggataccataacaaaatagctcagattgggtgagctgtgaaatttattactcacagttgtagaggctgggaagtccaagatcaagatgctggcagattcagtgtctggtgagggcttcatagatggagccttgttgaagcattctcacatggcagaagggcaaaagggggtgaaggggtgaacagaaccccttgagccctttctaggagcatgaatcccatttgtaagggtagagccctcatggccaattgcctcctaaaggccccatctcttaatactattgcattggggattaagtttcaacatgaattttggaggggtataaccattgaaatcatagcagtggttctgcttcaagaagttttcaggccctggtttgtggatcccctaaccctaggtattgccctcaggatgtggtccaggaagccttactccatatccacattctagccaggagggaagggagaaagcaagggggaaggaatgctccttccttggaaggcaccacctggaaggtgcccacctctcttctgctcacacctgctgtccacagcacagtcaatggccacacttggaacaagggaacctggaaaagccattgtaatctaagcagtcattggcccagctaaataatctattactacataagcaggaagatggctcttgggaggatccacaagtctctgccaccgatgagattgggcagcctagataattgttggcaagagtgaggaatcaggcttagaaaactggtaggagtcaaactagccacagggcaggaccccagccccatcatactaatggacaggctggctggggtatgtcaccactgctgccactgggaaggatttcccgtctgttcctgcatctttgcacaagatccagaagggcagcgttctgcaggtggagtcaacgtcacaggcccaggtaccaactgccagggggtggagaggaaagacttcaggacccctcactgacttccgtggaaggaaagggtacgggacccacccacactagaggcaactgagaattgctccccaaatgtgatgggagttggatatctgatgatgtgtaccaccccttgaaagccaaaagcaaatgttcatgacacatgccatttcatcctcacagccatctagtgaggtgaatctcttcataagccccagcgttcaagagaaattgaggagcataactggagtcacatttgtcactcacttac

SEQ ID NO: 688153 - DNA, 1495 bp, Homo sapiens
tgattggcgtagtgaactacagcttagaactcctggactcaagcaatcctcctgcctcagtatctgtagtagctgagactgcatgggtgtgccaccacatctggtactatattctcatctgaagctttagcagtgtaatacagctctgatgctgcccctataccatgtgaaccaagaagtatctgagacaggtctcaatcaatttagaaagtttattttgcccagatgaaggatgcacatctgggaggtaggtttgtgcctttctccgaagatgattttgagagcttcaatatttgaaggggaaagaggaagaaatttttaaaaggtgtgggtagataagagacaagcagttgtattcttttgagtctttgatcagcctttcactgaatacacaatatacctgtgagaggggagtagaggaatagccacttaagccttgtctagctcagcgaatctgcatttttacatcagaggaaaagtcacatgtgcattggtgtcaggttagcagagggatgacttagaactcttttgtcctgcactcatgaagataagctatcaaaatacattatcagggtaaagttcaacataaccattttagtgtaaagatcttgaggcccacaaggaatttcctagtaggcaaattgtgagggaagtatgtagcttttttttttttttaattgttgtagctatcttatttgggaataaaatgggaggcaagtttgcctgacacagttgccagcttagtttttccttttggcttagtgatttggaggtcctgagatttattttccctttcacaactaatatcttagggtcttgtattattaaaaagataataacagatcaaatgacattcatttaatgcttatagtgtgtcaggtagtttatgtaaagaatgaaaagaactagatacgtctacttctcagagttgttttatactatcttatggataagaaaatttaagttaaaggagattaagtaactgcccaacatcaggtaattactcagcattaaagccaaaacataaaaaatatttattgagcacctattgtgttctgaagatacagtggccgatagacttttaactcttaaatcatactagctcttcagtattgtaacacaaagaaaatgactgaggcaagtttgaatttagaggtttattttgccaaggttgaggatgtacccaggcaaaaggaacacaaaaatcacagaacagctgtgacatgtgctttttccaaagagggttttgagggcttcaacctttaaaggggaaaaaggggacagtagggaaaggggaaagaaaaaataaagagggggagagtatggtcacattcctgtgagctcactaaatcyacatgttgcatgtgaaaaggagggggtagactgaaagtcaactatgcattcttctggcactctatgaatctgcattttacataagataaagtaaacagaggaatcagtcaagtatgcctttgttttgggtgagtggaggaat

SEQ ID NO: 688154 - DNA, 602 bp, Homo sapiens
tttttttgcttcacatccttcaaaacaaataatacaataaaaatacaggtaaagtttcctgtattcctccccatctcattcccctctctcccttcctcctcagaggtaactgctatcctaaaatacatatcatctcccttcattttttttttttttttttttttctgagtcggagtcttgctctgtcgcccaggctggagtgcagtgacacgatctcggctcaatgcaagctccgcctcccaggttcacaccattctcctgcctcagcgtcctgagtagctgggactacaggcgcccgccaccatgcctggctaattttttgtatttttagtagagacggggtttcaccgtgttagccaggwtggtctcgatctcctgaccttgtgatccacccgcctcagcctcctaaagtgctgggattacaggcatgagccaccacgcccagccctcgcttcatatttttatacttttataatacatataggtatctacaaacaacagataacatttttcttatttttaagtatatagcatcatactctacatatccttttacaatttgttttttccattcaacgttatatttttgagatttatccatg

SEQ ID NO: 688155 - DNA, 601 bp, Homo sapiens
atataaataatgtgaaaagtaaataaaaatgcatttatttcattaagatagatgacataacttttttaatgtcaaggaatttaataatcacctccctaaaacttaatgggtcctccccacccccaggttggaccagcaattgctaatttttttaaatttaacacatctagtcagttttaaatttttagacacatcattgaaagagttgggaaaaatacatttatgttggtatatattcagttaagcctctaaaagaatatgcatgatgatgacaaagattggggagtataggaaagacgagaaagaacggtagaaggatcactgtggttggctttcagacattcatcaaaccccaaatgattaagtcaatcatggtaattctgtcccctcctttgcaaatgactgacatacgcaagggttcttgtctcatactgygttcactggaagcagagcctaagacagtgatttgtttgcatgtgatttacagagggagagctctcaggagaaagggaataatggaatcagaaaatggtaggggaagaaactaagcaagaatggcctcagctataatttagcttgagctaaattacagggagctcta

SEQ ID NO: 688156 - DNA, 599 bp, Homo sapiens
gctcctccttgccttctgccattaatgtgaggcctccccagctatgtggaactgtgagtctaattaaacttcttttttttgtaaatcgcccagtctcaggtatgcctttatcagcagcgtgaaaacagactaatatagtgggggataaattatgatatatctatacactggaagattatacagctgaggaagaaaaagaatgaggaaactctgtaacaatacrgaaagatctcaagatacactactgagtgaaaaaggtacagaaatataatatgctataatttattgggaggaaaactgggcaagaatatatatctagagtggcttatatatgcatacatatatatctggaaggatacacaaaaaaactaatagtggtggtttcttttgatgtagaaggctagaaattagggagataagggtagagtaagaggtagagtaggaggtagagtaggaggaagagttttcaccatgtacattttatatttttaaataattgagtcatgtaaatatattaccgattcaaaagttaaattagtcatttttgaaatctataaaagaaaaaatggattacataacaaaatctggctaatatgaca

SEQ ID NO: 688157 - DNA, 599 bp, Homo sapiens
gctcctccttgccttctgccattaatgtgaggcctccccagctatgtggaactgtgagtctaattaaacttcttttttttgtaaatcgcccagtctcaggtatgcctttatcagcagcgtgaaaacagactaatatagtgggggataaattatgatatatctatacactggaagattatacagctgaggaagaaaaagaatgaggaaactctgtaacaatacggaaagatctcaagatacrctactgagtgaaaaaggtacagaaatataatatgctataatttattgggaggaaaactgggcaagaatatatatctagagtggcttatatatgcatacatatatatctggaaggatacacaaaaaaactaatagtggtggtttcttttgatgtagaaggctagaaattagggagataagggtagagtaagaggtagagtaggaggtagagtaggaggaagagttttcaccatgtacattttatatttttaaataattgagtcatgtaaatatattaccgattcaaaagttaaattagtcatttttgaaatctataaaagaaaaaatggattacataacaaaatctggctaatatgaca

SEQ ID NO: 688158 - DNA, 599 bp, Homo sapiens
gctcctccttgccttctgccattaatgtgaggcctccccagctatgtggaactgtgagtctaattaaacttcttttttttgtaaatcgcccagtctcaggtatgcctttatcagcagcgtgaaaacagactaatatagtgggggataaattatgatatatctatacactggaagattatacagctgaggaagaaaaagaatgaggaaactctgtaacaatacggaaagatctcaagatacactactgagtgaaaaaggtacagaaatataatatgctataatttattgggaggaaaactgggcaagaatatatatctagagtggcttatatatgcatacatatatatctggaaggatacacaaaaaaactaatagtggtggtttcttttgatgtagaaggctagaaattagggagataagggtagagtargaggtagagtaggaggtagagtaggaggaagagttttcaccatgtacattttatatttttaaataattgagtcatgtaaatatattaccgattcaaaagttaaattagtcatttttgaaatctataaaagaaaaaatggattacataacaaaatctggctaatatgaca

SEQ ID NO: 688159 - DNA, 915 bp, Homo sapiens
  misc_feature 3, 4, 5, 6, 7, 8, 9, 10, 11, 12, 13, 14, 15, 16, 17, 18,19, 20, 21, 22, 23, 24, 25, 26, 27, 28, 29, 30, 31, 32,33, 34, 35, 36, 37, 38, 39, 40, 41, 42, 43, 44, 45, 46,47, 48, 49, 50, 51, 52, 53, 54, 55, 56, 57, 58, 59, 60,61, 62: n = A,T,C or G
  misc_feature 63, 64, 65, 66, 67, 68, 69, 70, 71, 72, 73, 74, 75, 76, 77,78, 79, 80, 81, 82, 83, 84, 85, 86, 87, 88, 89, 90, 91,92, 93, 94, 95, 96, 97, 98, 99, 100, 101, 102: n = A,T,C or G
aannnnnnnnnnnnnnnnnnnnnnnnnnnnnnnnnnnnnnnnnnnnnnnnnnnnnnnnnnnnnnnnnnnnnnnnnnnnnnnnnnnnnnnnnnnnnnnnnnnnttctcttataatcctgtctccacacagaagcggagccaccctttaaaaacatgaattacagcaggtcaccctcccgcttaaaatcctctagtggtcacccggccagcacagaataaacctctaacttttctggtttaaaagcccttcgggacctgctcacaccacagctgggcccatttgctccagccgcaccagccccgctgggtttctcagacccacccggttcagtggtgcccaggagctgcttacctcgctccccacacctgtgcgtggctgctcccggtcactcaygtcttacgtttccttgcccagaggccttctctgaccatccaggctacggctactctttccagtgaccttatttgaatcaccttataataattatctggtagcctaccagaaagtgacagaattatcgtcatctgttatttttcttatttattacctgcttccaccccactcaaatctaagttctgtgtctgttgttcaccactggattcacgatgcctaaataaataactgttcaactgaatatatgaatgaataaatgaatggttttaagggatttatttttactattataagtgttacaaacatgaattagtcttctagttgttataaaatactttactgtattaatacttataccatatgctataccattacgggattcgccccttatctgcagtttcaggtagttactcatggtttcacttaactgccatcaaacatcgtccaaaaacattaaaaggaaaattttagagacaaacatttcataagttttaaatctcatgccatccggcgtagtgcgat

SEQ ID NO: 688160 - DNA, 915 bp, Homo sapiens
  misc_feature 3, 4, 5, 6, 7, 8, 9, 10, 11, 12, 13, 14, 15, 16, 17, 18,19, 20, 21, 22, 23, 24, 25, 26, 27, 28, 29, 30, 31, 32,33, 34, 35, 36, 37, 38, 39, 40, 41, 42, 43, 44, 45, 46,47, 48, 49, 50, 51, 52, 53, 54, 55, 56, 57, 58, 59, 60,61, 62: n = A,T,C or G
  misc_feature 63, 64, 65, 66, 67, 68, 69, 70, 71, 72, 73, 74, 75, 76, 77,78, 79, 80, 81, 82, 83, 84, 85, 86, 87, 88, 89, 90, 91,92, 93, 94, 95, 96, 97, 98, 99, 100, 101, 102: n = A,T,C or G
aannnnnnnnnnnnnnnnnnnnnnnnnnnnnnnnnnnnnnnnnnnnnnnnnnnnnnnnnnnnnnnnnnnnnnnnnnnnnnnnnnnnnnnnnnnnnnnnnnnnttctcttataatcctgtctccacacagaagcggagccaccctttaaaaacatgaattacagcaggtcaccctcccgcttaaaatcctctagtggtcacccggccagcacagaataaacctctaacttttctggtttaaaagcccttcgggacctgctcacaccacagctgggcccatttgctccagccgcaccagccccgctgggtttctcagacccacccggttcagtggtgcccaggagctgcttacctcgctccccacacctgtgcgtggctgctcccggtcactcacgtcttacgtttccttgcccagaggccttctctgaccatccaggctacggctactctttccagtgaccttatttgaatcaccttataataattatctggtagcctaccagaaagtgacagaattatcgtcatctgttatttttcttatttattacctgcttccaccccactcaaatctaagttctgtgtctgttgttcaccactggattcacgatgcctaaataaataactgttcaactgaatatatgaatgaataaatgaatggttttaagggatttatttttactattataagtgttacaaacatgaattagtcttctagttgttataaaatactttactgtattaatacttataccatatgctataccrttacgggattcgccccttatctgcagtttcaggtagttactcatggtttcacttaactgccatcaaacatcgtccaaaaacattaaaaggaaaattttagagacaaacatttcataagttttaaatctcatgccatccggcgtagtgcgat

SEQ ID NO: 688161 - DNA, 915 bp, Homo sapiens
  misc_feature 3, 4, 5, 6, 7, 8, 9, 10, 11, 12, 13, 14, 15, 16, 17, 18,19, 20, 21, 22, 23, 24, 25, 26, 27, 28, 29, 30, 31, 32,33, 34, 35, 36, 37, 38, 39, 40, 41, 42, 43, 44, 45, 46,47, 48, 49, 50, 51, 52, 53, 54, 55, 56, 57, 58, 59, 60,61, 62: n = A,T,C or G
  misc_feature 63, 64, 65, 66, 67, 68, 69, 70, 71, 72, 73, 74, 75, 76, 77,78, 79, 80, 81, 82, 83, 84, 85, 86, 87, 88, 89, 90, 91,92, 93, 94, 95, 96, 97, 98, 99, 100, 101, 102: n = A,T,C or G
aannnnnnnnnnnnnnnnnnnnnnnnnnnnnnnnnnnnnnnnnnnnnnnnnnnnnnnnnnnnnnnnnnnnnnnnnnnnnnnnnnnnnnnnnnnnnnnnnnnnttctcttataatcctgtctccacacagaagcggagccaccctttaaaaacatgaattacagcaggtcaccctcccgcttaaaatcctctagtggtcacccggccagcacagaataaacctctaacttttctggtttaaaagcccttcgggacctgctcacaccacagctgggcccatttgctccagccgcaccagccccgctgggtttctcagacccacccggttcagtggtgcccaggagctgcttacctcgctccccacacctgtgcgtggctgctcccggtcactcacgtcttacgtttccttgcccagaggccttctctgaccatccaggctacggctactctttccagtgaccttatttgaatcaccttataataattatctggtagcctaccagaaagtgacagaattatcgtcatctgttatttttcttatttattacctgcttccaccccactcaaatctaagttctgtgtctgttgttcaccactggattcacgatgcctaaataaataactgttcaactgaatatatgaatgaataaatgaatggttttaagggatttatttttactattataagtgttacaaacatgaattagtcttctagttgttataaaatactttactgtattaatacttataccatatgctataccattacrggattcgccccttatctgcagtttcaggtagttactcatggtttcacttaactgccatcaaacatcgtccaaaaacattaaaaggaaaattttagagacaaacatttcataagttttaaatctcatgccatccggcgtagtgcgat

SEQ ID NO: 688162 - DNA, 633 bp, Homo sapiens
taccccctgctgcccacctcttaatttccctccttcctctagttcctctgtatctgtgaatttctcaaatcctgctggtactttcatataaataaatgtcttttttaagattgctcaaatgattacttaggagtaaatgttgagcacactatgctcctgatagagtgatatttcttgacccttgaatttaattaatagcagatctttacgatcactrtttacccattttcacttgagtaaagtgtaggtgatgtgtttggtttggatgtctctgttacagaccgcaggctctttggcttcccatgtaatggaaattaacatggagccgagcagatttcccagatgaggctttcaaatcagggcttgtgctcaagcacagggagacagtggaggtgaggcacagggtcctctgactggctctgcaggaagcagcagggggaagctggtaggtgtttttttattaggcaaacacagatattgttatcaaggctaaagtatacaggcttggctgggcaaagcacaaaagaggggtagggtatgcgggtcagcatatctggttgtaatagttatctcgagtgatgggctcctcgctggtctggccagcagcaacaaggctgtaaatcaattgttcgg

SEQ ID NO: 688163 - DNA, 1350 bp, Homo sapiens
atggtttgtttgttcgtttgtttctttgtttttctcaagcacctgtttgtccatttgcatgccagtattatggaaaacattttaaaagtatgagttatgttgcatgttcttcatcttaatggtttaaatagggaaacaaaactgataacatgtaaaacagctagcaagggacatacggcattctataattgttgctcattgtggggttcgcataacgggtgctgaaatagttcagaaaattagagtttggagggcatattgtactccagtaatgctccttgggagtgatagaatttgaatgggctctatagatagatgagatttaggcagatggaagggggcgctggtcagaggcagcctcagggcatcccaggccgaagaggtcagtatgcttttctccctcatccattattgcttcttctttctcctcctacttggtttcagtcttttggaaatgagattgacatctttctctaatgattatatttagatacatttattcacatctgtacttccttyaggtggaaatgaagggggaggaaatggagagaaagaattaatgttttccattttttaaagattaagtttattcttagtgtggattacgtattactcacttgaagggaaaccttttacaaggccatctagataagagaaatctcagattatcaactgtgattagtgttttcaactgcactggaaacagaacatataagaacatggatatttttagattctgatttaactcttttattctatttgccagctctaaaaagtagactgagcaaaggtaagggtgagtgctgctgctttaaaaaagggaacaaccagcttcttgtctagttagggaatctcttaagactctgtcacatacattttagtcccactgacatattactcccacctccttgtgggtagtaaagttaaaatgttttaaatgttctttgatcgtccacccaccgatctagtagacttttaagttcaataccgcagctgggagaaaggggagttgaaattcaatttttactgttaaaaacaaggctcaacaatcatagtctgtatgtctgcaccagtttagaaattgtaacaataaattggcttccgctttcaaatgtgttgttagtcatcacactttaaattacgtggcattactatgtgtgacctacttaaaaatggttgtcccttcagtgggaacaatatgtgtgcagccattgggtgtctcgtaggccttttaaaaagctcacttttaatgcaacacattttgaacatcaacacattaaataaatacttactatgattctttactggctggattttattgggtaaagaagtgtgatcagtctttaggga

SEQ ID NO: 688164 - DNA, 1350 bp, Homo sapiens
atggtttgtttgttcgtttgtttctttgtttttctcaagcacctgtttgtccatttgcatgccagtattatggaaaacattttaaaagtatgagttatgttgcatgttcttcatcttaatggtttaaatagggaaacaaaactgataacatgtaaaacagctagcaagggacatacggcattctataattgttgctcattgtggggttcgcataacgggtgctgaaatagttcagaaaattagagtttggagggcatattgtactccagtaatgctccttgggagtgatagaatttgaatgggctctatagatagatgagatttaggcagatggaagggggcgctggtcagaggcagcctcagggcatcccaggccgaagaggtcagtatgcttttctccctcatccattattgcttcttctttctcctcctacttggtttcagtcttttggaaatgagattgacatctttctctaatgattatatttagatacatttattcacatctgtacttccttcrggtggaaatgaagggggaggaaatggagagaaagaattaatgttttccattttttaaagattaagtttattcttagtgtggattacgtattactcacttgaagggaaaccttttacaaggccatctagataagagaaatctcagattatcaactgtgattagtgttttcaactgcactggaaacagaacatataagaacatggatatttttagattctgatttaactcttttattctatttgccagctctaaaaagtagactgagcaaaggtaagggtgagtgctgctgctttaaaaaagggaacaaccagcttcttgtctagttagggaatctcttaagactctgtcacatacattttagtcccactgacatattactcccacctccttgtgggtagtaaagttaaaatgttttaaatgttctttgatcgtccacccaccgatctagtagacttttaagttcaataccgcagctgggagaaaggggagttgaaattcaatttttactgttaaaaacaaggctcaacaatcatagtctgtatgtctgcaccagtttagaaattgtaacaataaattggcttccgctttcaaatgtgttgttagtcatcacactttaaattacgtggcattactatgtgtgacctacttaaaaatggttgtcccttcagtgggaacaatatgtgtgcagccattgggtgtctcgtaggccttttaaaaagctcacttttaatgcaacacattttgaacatcaacacattaaataaatacttactatgattctttactggctggattttattgggtaaagaagtgtgatcagtctttaggga

SEQ ID NO: 688165 - DNA, 1242 bp, Homo sapiens
gagaagtccttattttttaactaaacaaatgtgaataatcagaaattagaataattttcatacactgctggttgatatgtaaagtgttataatagcttgcaaacaaagccgattaaaatctaatgaaattaaaatttcagacaccaggaatcaataacgacatgtgttcatagagacaygggttatgagaatattcaactcagtacagcttttttgttatatcaaaaaatgaaaaccatggtagtgttcaatataaaataattaataattaaaaataaagtaataaaaagaattaaaaagagtataatatgaacaccctgtagtattcacaaatctatggtagatagaaagataagcagatagacacataaatagatatagatagataacagatagataagagatagataatatacatatagtatatagatagatatgacagatgtctattttctagacacaaatataaatataccaaaattatatcttacaaaacaattttgaattttttaaaagttggaataatatcaattttataatgtaaggatgtgttaaggacaaaagtgaaaaaaaaatcatgtctctatatatcaacaattcagaaggatccttaccatagtaatggttgccactggggaggaaaaaggaatagttaattttgtaataatgtttaaaaggttttaaattgtttttgtaaaaatacaagaaacaaatgtaaaaaaaaagtatgaagaatgtatttccatttagttttgattcgcttttttaacattactaaaaataaaaatgtgagaaatcaaacatgagcaagcaactcaccagtgcaaccttattttggagtaatgcaacacagtacatcagttatttgtacacacatcctcctacctccgtctgtgtattcctttgtagcattgatgatgattgtgtattctcaacaactgccaagtgtatggttcatgcaaataataatagttattacttatcaaacctttcctttgtaccaagtgctgtgctagttcacatcttgtatcttacacaattcccacaacattcctgaaaccattacctttatttttagatctagaactgacgttaagaaatctgttctaacttgatgaaagccatacaacttgtaaattaaaggctggcatttgtacttagatatttttgacactcggaactttgcattatattattcaataaatattggctgaataaacacaacatctgaaattactctga

SEQ ID NO: 688166 - DNA, 671 bp, Homo sapiens
tgtgagcatttgtcaaaaccagttatatacaaacatacatactctcttttgaattaagctagctactttaacttaggaaasaagaaaaaattccagtaccatattaacttctctaagaaagatgaaaacaaatatgctgagttttttaatgaaaaaaaaaatctagtatatgttagtccaacatatacatatagatgcggaaatcttaaataaaatatgagtaatgttaaaatatttctgacacttgctgaaatgctaaaggctttatttaaaaatattgcaatatgtgccatgactataggggagggagattagactcaactctaaatacaattggagaaagtggggattaatagccaaggagcagattggggttggttgttggatggaaaattactaagaagagacatcaaggataggagaaattattgctagactgaccaaatgggattcttgctgagggcaggccagagtgacttcatattaagagtggacggattctccctaaagtgatttagcaggcttattgctaaaggtgaattctgcaaggatgaaaaagaaatgcaaggttgaggactacttgagaagagagcttataggagccttactaaaatttgattaaggagaaagttatgtttaatagtctttgtctggaaggatgaatagtctcg

SEQ ID NO: 688167 - DNA, 671 bp, Homo sapiens
tgtgagcatttgtcaaaaccagttatatacaaacatacatactctcttttgaattaagctagctactttaacttaggaaagaagaaaaaattccagtaccatattaacttctctaagaaagatgaaaacaaatatgctgagttttttaatgaaaaaaaaaatctagtatatgttagtccaacatatacatatagatgcggaaatcttaaataaaatatgagtaatgttaaaatatttctgacacttgctgaaatgctaaaggctttatttaaaaatattgcaatatgtgccatgactataggggagggagattagactcaactctaaatacaattggagaaagtggggattaatagccaaggagcagattggggttggytgttggatggaaaattactaagaagagacatcaaggataggagaaattattgctagactgaccaaatgggattcttgctgagggcaggccagagtgacttcatattaagagtggacggattctccctaaagtgatttagcaggcttattgctaaaggtgaattctgcaaggatgaaaaagaaatgcaaggttgaggactacttgagaagagagcttataggagccttactaaaatttgattaaggagaaagttatgtttaatagtctttgtctggaaggatgaatagtctcg

SEQ ID NO: 688168 - DNA, 1115 bp, Homo sapiens
tatccttattttcatttctgcattgcagacacatgaattacttaaaaagaacccctcccatctcctatgaacttttttttttttttttttttgagacagggtcttgctctttcacccaggctggagtgcaatggcaagatcttggctcactgcaacttccacctcccgggttcaagcgattctcctgcctcagcctccagagtagctgggactacaggtgtatgccaccatgcccagctaatttttgtattttcaatagagatggggtttcaccatgttggccaggctggtctcgaactcctgaccttgtgattcgcccccctcagcctcccaaagtgctgggattacaggcgtgagccaccgcgcctggctgaacttttttatacctttgttcattccacaggttcttttggacgtttcttatatttttatccctctaatttgacagatacgttgtttaaatattacttctatataaaattcatgtcttgtgtccctttagataactgtagaaggatacgtataagatgctactataattattaattttattatttttaatttcaacgtactatgaaattctaatgggaaagagtcttatttggaatattgatattaagcaagctttataaagtttaggatgttgaaatcagtgcaaataaaagacaaattataaatagatctcaagttttcaatgctaatcaaagaaataaatgtttaaaaaacttgatcaagaaacattatgcaatcttattaaaatcaatgtacaaatgaagcctctcaaaaattatttttataataaatatgtatataaggctcattatttttattgtaaccataagttcctacgtttgcctaaacattgaataaataaatacaaaagtttaatacaaaccaaatagatcatacctgagatttttcaaattgctttcaaaattaaacaaagttgcttctcaagaggttggactgctmttcattttgcctttttattgaaaaatgcattatgatgttttttgtaaaacatgaaattgcatgtgattgatttattatgttttctattcagctaaattgaggctaaatagttagcagtagtctttcttgatggtaccgtgcaa

SEQ ID NO: 688169 - DNA, 600 bp, Homo sapiens
tgttctcactgacatgtgggagctaagctatgaggacacaaaggcataagaatgatacaatggactttggggacttgcgaggaagagtgaggtgggacgagggataaaagactacaaatagggtgctgtatatactgctycggtgatgggtgcaccaaaatctcacaaatcaccactaacaaacttattcatgtaaccaaataccacctgtaccccaataacttatggaaaaatgaaacaacgacaacaatgaaaatataataaaataaaaaataaaaacctaatgcccaggaagcttgctaccatagcaaatccaaactattcttataacttactaagacagagtcaacatcagcagattagatgataattttgaagactctcttgcccaccatagtcttgagtagtattgaactctctagttgttaccttgattttaagatctttgagcacaattatttgtgtttgcctctttaattaccttgaactgtatggagatcagaactgagtctgcctttcctaatattcacccaccattggctgccaaatgttttcttttctgaaacttcattgaatgatagaagttaagttgaaacacta

SEQ ID NO: 688170 - DNA, 613 bp, Homo sapiens
aaaccagccctttagaggattctgaaactcaytgtagcttgagaaccactagactcataggtgataaaggaagctaggagagagcttaagcagatagatgagtaccatgatctggttgacactacaaaccactcctgctgtgttgaatatatatgtaaggcagaagcaatgggacaaattaatgaaacttcttggtaatttatgacacaacatcgtgattggacttggtatgggtggagaaggtagttgaaaaacgatggaattctaaatatattttcaagatagtctcaacagaatgagtgaagtatgataaagagagaaagcaaggaagactctaaggggttttgctgaagtttcaggaagaattgagccaccattaagtacttaatctggcaaaaataatcttaataatatttataaatatattaattttgaaaaaacatcaagactttcttatccctatatgctttattctggtattcttatcagtgacaatacagatacttgagggtaaatagtattgataaagcattctaatgctgagaataaatactcttgaggccctcatagttgagttaaaagtttttacacaaattttaaacttattaatatg

SEQ ID NO: 688171 - DNA, 613 bp, Homo sapiens
aaaccagccctttagaggattctgaaactcactgtagcttgagaaccactagactcataggtgataaaggaagctaggagagagcttaagcagatagatgagtaccatgatctggttgacactacaaaccactcctgctgtgttgaatatatatgtaaggcagaagcaatgggacaaattaatgaaacttcttggtaatttatgacacaacatcgtgattggacttgrtatgggtggagaaggtagttgaaaaacgatggaattctaaatatattttcaagatagtctcaacagaatgagtgaagtatgataaagagagaaagcaaggaagactctaaggggttttgctgaagtttcaggaagaattgagccaccattaagtacttaatctggcaaaaataatcttaataatatttataaatatattaattttgaaaaaacatcaagactttcttatccctatatgctttattctggtattcttatcagtgacaatacagatacttgagggtaaatagtattgataaagcattctaatgctgagaataaatactcttgaggccctcatagttgagttaaaagtttttacacaaattttaaacttattaatatg

SEQ ID NO: 688172 - DNA, 1922 bp, Homo sapiens
atcaatgaagaaacattctataaaaataaataaaatattataaatatttaaactttatgcataattttattttaatactaaaatgccttgttctcagatctctcttctaacctaccttttcaattgtttatagtcttatttatttttaccaatacttactcagatattttatttgcattttctcaaaagaattcattctagttattttctgagtgttttaggtagtttaccctttagggagaatgtactaacagtgcagcaaggttgtgtttaataggagaatgggggtggataggagagttgggaggaatagagaagatcaggaataaattatgtaagtagaaatagtaaaggtcaacaagatgaattcatttttataaaatattttagagcagaatgataatttttaaaaaatgaccaacattgctatcattaattttgtggggacatccaatgaaaacatatactaactgttcatggtggccaaggcaagtttgcaaattgaattatgaatggaatttccaaaagggaaaatttttatgttagggtattttacaaagagagacaagtcttgtattatttccaagcatctattattatataattctatatcatttgtggagatttaatttatttgacaagaaagaagatcattttctttttgrgaacccaatcttctagtcacttgcaatgatctacaaatttaaatgcgcccaaattggtgtgttccatagttgaaatcatttcctatactagcaccagggttaattccagtgagataatatatttaaaaaacctggaggattttttttttattatcttattgttaggaagacggtataaaatattatgtctggatttagaaagccatttaacaaacatttatccttgtgaataaaatggagaaatatagatggaataataacagagttaattgaatcaataggaagtaggaggtaagagtccaaaggatattggttattatttgtttcagtaataataaattaaaattaataattattaaaataccacattttaagtgttcactatataccatatactctgctaaaccatttatgtgtgtgaggtatcacataatggcaacatgtgtggaaaagagactttagctcacatgagtcaaaaaatgtgatgagcttgccagaatatcttatggagaatgaagctctaagagtagagtatttgcttgattaaaaagagcatactaatccttggagaactggagttcaggtctgggcattctgcttttgagagattttgacacactggccagaggtgtgactgggccagtgtgggaattcacagccatgccctgtaaaaagcaagcaattgctggtagaattccgtatatgctgagttctctggcaagtattctttattttaaaaatcagttaatgggacacattgctactctccctggggcccatcccactgatgaacattacagacaagttttttcctctgagacaagcagcatatggagtgaaaacttaattaaagcagtgacagagctaagagaaggaaaacagagaaggcagaaggagatagtgatgcagaaagattgagacaagaggaataaagaaaccaggagagagaattagagacctgctgacaaggtagaaaattctggtctctcacccatatttccagtgacaatactttcagtgcctgcctaacaacattcttcttgaaaatatgttcattagtcagttattcactgatattttctgagaatcaaccacttctcatctattattctaggagcaggaatatagcagtgaatatgggagagaaagccctggctctcctggaatgtatattctagtggaatgaaataaaatacttacaattttgtttttatttatattttaaagtgttatattcaatgcctcattaaaaatgca

SEQ ID NO: 688173 - DNA, 426 bp, Homo sapiens
attctcctgccccccaagtagctggattacaggcacctgccaccatgcttggataatttttgtatttttagtaaagatgggtttttgccacgttggccaggctggtctcgaactcctgacctcaggtgaactcytgccttggcctcgcaaagtgctgggattacaggcgtgacgactgcgcctggcctaagtgagttaattcaagagctgagcacagatctccatggctactcactctctttacagttattgctggagcacaaagggctgtgagaagggcctttgagatcttggacagttctaagagccaaagggcccaaaatagacaggagcattagggtgaactggtgcccaaatgcaggctgcagaagctagggggactgctaccttgttcatcataatggggagcctggaacagagcaggca

SEQ ID NO: 688174 - DNA, 640 bp, Homo sapiens
tggaacgctaaacctctttcagtttggtgtttccaaattcatgaattgcttcttactcaaatatactctttaaaatattattgtgctcagatttttattttgtagaactaataacaatataaagaaattcaggccctttaacctgaaaatgaaaaaaatcatataataaatgacttgtgagtgaaaaagwaaattaaaattatagagtttctaaaaattaataagaaaatataataaatcagaatcaatgggacatatttaaataagaatcaatggaaaattaaaatatacacaaataaatgaattcataaccataaaagacggaaaacaatgggattaagtttctatctaaaatgctaagaaaatggtgcattcaaagcaagtgtaagaaacaaaatgattaaattaaaagcaaatgtcttgaagagcatagaaatatatgtagagcatagaaaaaacaaatagatggactgctagtcaacttaatcgagggaaaaaggaaacataaatataaaataagatatgacaaagggaaaataaccattgaaacagaatacattcaaaaatgttttaagagactacgttatagattgctgtgaccacagtagagatggaaagcttaactatgtcaatttccatt

SEQ ID NO: 688175 - DNA, 640 bp, Homo sapiens
tggaacgctaaacctctttcagtttggtgtttccaaattcatgaattgcttcttactcaaatatactctttaaaatattattgtgctcagatttttattttgtagaactaataacaatataaagaaattcaggccctttaacctgaaaatgaaaaaaatcatataataaatgacttgtgagtgaaaaagaaaattaaaattayagagtttctaaaaattaataagaaaatataataaatcagaatcaatgggacatatttaaataagaatcaatggaaaattaaaatatacacaaataaatgaattcataaccataaaagacggaaaacaatgggattaagtttctatctaaaatgctaagaaaatggtgcattcaaagcaagtgtaagaaacaaaatgattaaattaaaagcaaatgtcttgaagagcatagaaatatatgtagagcatagaaaaaacaaatagatggactgctagtcaacttaatcgagggaaaaaggaaacataaatataaaataagatatgacaaagggaaaataaccattgaaacagaatacattcaaaaatgttttaagagactacgttatagattgctgtgaccacagtagagatggaaagcttaactatgtcaatttccatt

SEQ ID NO: 688176 - DNA, 640 bp, Homo sapiens
tggaacgctaaacctctttcagtttggtgtttccaaattcatgaattgcttcttactcaaatatactctttaaaatattattgtgctcagatttttattttgtagaactaataacaatataaagaaattcaggccctttaacctgaaaatgaaaaaaatcatataataaatgacttgtgagtgaaaaagaaaattaaaattatagagtttctaaaaattaataagaaaatataataaatcagaatcaatgggacatatttaaataagaatcaatggaaaattaaaatatacacaaataaatgaattcataaccataaaagacggaaaacaatgggattaagtttctatcwaaaatgctaagaaaatggtgcattcaaagcaagtgtaagaaacaaaatgattaaattaaaagcaaatgtcttgaagagcatagaaatatatgtagagcatagaaaaaacaaatagatggactgctagtcaacttaatcgagggaaaaaggaaacataaatataaaataagatatgacaaagggaaaataaccattgaaacagaatacattcaaaaatgttttaagagactacgttatagattgctgtgaccacagtagagatggaaagcttaactatgtcaatttccatt

SEQ ID NO: 688177 - DNA, 640 bp, Homo sapiens
tggaacgctaaacctctttcagtttggtgtttccaaattcatgaattgcttcttactcaaatatactctttaaaatattattgtgctcagatttttattttgtagaactaataacaatataaagaaattcaggccctttaacctgaaaatgaaaaaaatcatataataaatgacttgtgagtgaaaaagaaaattaaaattatagagtttctaaaaattaataagaaaatataataaatcagaatcaatgggacatatttaaataagaatcaatggaaaattaaaatatacacaaataaatgaattcataaccataaaagacggaaaacaatgggattaagtttctatctaaaatgctaaraaaatggtgcattcaaagcaagtgtaagaaacaaaatgattaaattaaaagcaaatgtcttgaagagcatagaaatatatgtagagcatagaaaaaacaaatagatggactgctagtcaacttaatcgagggaaaaaggaaacataaatataaaataagatatgacaaagggaaaataaccattgaaacagaatacattcaaaaatgttttaagagactacgttatagattgctgtgaccacagtagagatggaaagcttaactatgtcaatttccatt

SEQ ID NO: 688178 - DNA, 626 bp, Homo sapiens
tgccaattttaatttgtttaagaatatggattcatcaagggcattccagattttttaaactagacacgtgaaaaaaatcaatcagcatgaaaaattagggttgctactagaatcactctagtttgaaaagttaaccrtattagtattttcctgtattagttatttccctgaacgaaaagagctgaacgaaggctttaagaaccagagacagtcagaaataaatatgaaagctatctttgtcatcttggataaacaaggacatgtttcctgcagattttgcctgagtctatgttgaaacattttaagtcgtgaggatgttctttccattgcaaataacatagcaggattcctttgaatagctcaatgggtggggtgagagagctctttgaactctagtttcctaggatgtcttgctactcagtgtgataacaagtgtttttccctgccataatatagaaactcatactcttctgaagaggattttcttttttttttctgaacgctgcaagaacacaaaaaagaatctggagatggagcacaaaataaactggataagcatgaggaatttgagaaattaagatcacgtgagagctaagagctaccacctttaaaacctccaaaatcca

SEQ ID NO: 688179 - DNA, 2212 bp, Homo sapiens
aacataatcacataacacacatccctgtatgtctagatagatacacctgtctgagaagttctaatggcagctaatatttacatttactactatgtaccagatggtattctcaactctttataggaaagctcactgaaatgcttatgatgtaactgtgagactgatgcactgaatatctttattttatggggtatagaactggagaaaagtcaagttaaagtgcttaaaggtgaaaagatggggatgctaaagattgtatttaaaatagcactggaacactgcaaccatggcagaatggaatcagagaaaggcaaagtctttctccctgcttatctaaaatcaaaggctttcccaaagacaaatgtaaaacaaagcaaaatgtacatgaatttgcttcaatagtcaatgccattattattgttactatttatatgccattgatttacaaaattagatactggttctttatgttcatgtgagaacaatctgagaagcaaaatattacgtatgttgtttatgttgacttttactgaaaatttgcctttctaattacaagagaaacaaaattataacccaggctttcttcaatttgcctagctcttacttagtattcatacacctgtaacatcttggcagttaagcattggaaaggctttcattttctcagtgcttgatatatgcacagcaaaatccacagcttcttcctcaaccctctagtttatagatagcttgattattttagcagaatggtcatattatgtcttaatttatctgaattctaccactgaaattataattcttcactctatcatctgcctgatgataggaaaacatggagtaatgacatgaagaagagaggggcaaccacaaatttagagactagtatctcatgtcgtagcacactatgaaagccccatgtgggccactccatctagttcttttctcttggcatttagttttacctggcttcctttcacatttctaacataaaaggtgggctgtaccttatttttctctgtggtatggttattctacataattacccaaattctatacatactttcaatctagcaaaactcttttcatttcataaaataagacttgtggtccttacaaaaaattctaccacctctgggattctttgtttcaatagccattaaaaatctggcaaatagttcatggtttaaaatagcactgtgtrtattttctagaaaatacactagaatgtttatgaagattacaaatcaggctggtcaaatagaagttttctaatttatatccctcctaatgcatttctcctaatgtactttttttatcctatacaggactaatatcattttgtctttccctctctggccaaaccattactgctatggatttagcatatattgtatttccagtctggatctcccaaactcaacctccctaatcctgaataagcagccaaagctgccctatacacctatcctagatacatgtacttactagctgtgatagttaatattgagtgtaaacgtcattggattgaaggataaaaaatattgttcctaggtgtgtctatgagggtgttgccaaaggagattaacatttgagtcaatggactgggagaggcagacccaccttcaatccaggtgggtaccatctaatcagctgccagcgtgactaggataaaagcaggcagaggaatgtagaaggactagactggcctgagtcttttggccttcatctttcttttgtgctggatgcttcctgccctcaaacattggactccaagttctttagcttttggactcttggacctacactagtggtttgctcagggttctcaagccttcggccacagactgaaggctgcactgttggcttccctactttttgaggttttggaactcggactggcttccttgctcctcaacttgcagatagcctatggtgggattccaccttgtgactgtgtgagtcaatactccttaataaactccctttcatatatacatctatcctattagtcccatccctctagagaaccctgattaatacactagcattgaagatatgttaagaacaccaaggcctggaatctttagttgtaattaattgcaaaatttcctaaacaagtttagtttaagaaaagttgtgaactagaattattatatgtgtgtgtgtatatatatatatttatataaacattttgtaagttaaaacttgttga

SEQ ID NO: 688180 - DNA, 651 bp, Homo sapiens
tgttcttcctcacaagattgaggttgacagtttagtcaataaaagatcattcttttggggcttatcttgctgacacagcaaaggctcattcttaatgcacaggggcataaatgggaactctgtgccttgatagattcagacatggacatcctctgcttttttattaagcatgtcgaactaatgggaggggattttatctcattggcatatccaagagtctctacttgaaaattaaggtaagtgattttggcaacctaaatctgatgactgctgtggagacagaaagtgattgaaggcagttctagctttgattaccctatagttttagaaaagagaatattgrctgggcatagtggcgtgcacctgtaatctcaggtaattaggaagctgtggtgggaggatcacttgagcccaggagttagagaccaggcctgggcaacatagcaagattttgtctcaaaaaaaaaaaaaaaaggaatgacaatattggatatgaaacaagttattattctatcatatccttcctaattataaagtaaaaagaatattttacaatggcatagcaatggtcaatattaaaaaggagagtgtccatatttgaccacaatataaagaataatcagtgattttttttcttcaagcgtttacttg

SEQ ID NO: 688181 - DNA, 651 bp, Homo sapiens
tgttcttcctcacaagattgaggttgacagtttagtcaataaaagatcattcttttggggcttatcttgctgacacagcaaaggctcattcttaatgcacaggggcataaatgggaactctgtgccttgatagattcagacatggacatcctctgcttttttattaagcatgtcgaactaatgggaggggattttatctcattggcatatccaagagtctctacttgaaaattaaggtaagtgattttggcaacctaaatctgatgactgctgtggagacagaaagtgattgaaggcagttctagctttgattaccctatagttttagaaaagagaatattggctgggcatagtggcgtgcacctgtaatmtcaggtaattaggaagctgtggtgggaggatcacttgagcccaggagttagagaccaggcctgggcaacatagcaagattttgtctcaaaaaaaaaaaaaaaaggaatgacaatattggatatgaaacaagttattattctatcatatccttcctaattataaagtaaaaagaatattttacaatggcatagcaatggtcaatattaaaaaggagagtgtccatatttgaccacaatataaagaataatcagtgattttttttcttcaagcgtttacttg

SEQ ID NO: 688182 - DNA, 1257 bp, Homo sapiens
cccaggctggagtgcagtggcgcgatctcggctcactgcagcctctacctcccgggttccagcgattctcctgcctcagcctcctgggtagctgggattacaggcgcaggccaccacgcccggctaatttttgtatttttagggggtttcgccatgtcggccaggctggtctcgagctcctgacctcaggcgatccgcccgcctcggcctcccaaagcgctgggattacaggcgtaagccaccgcgccgggctctttcattctgtctttattttctgagatagagtctcgctcggacgctcaggttggactgcaacggcgtgatctcggctcgctgaaacttccgcctcccgggttcaagcgattctcctgtctcagcctcccgagtagctgggattattgacgggcagcaccacgcccggctactttttgtggtttttgtatsttctgtcttctgctctttagtaccgcatagagccgcagaagactagcgagtcgaacaaacggcccctcttgcagcagttgttgatcacggggctgccccccggtactcatcctgtgtctctcgtccaaatccccgctcctcctcagctatcacctctgccgatgctggtggtttccctgggtaccgggaaccaaactctcattccccaggggcctaagccccccgtggccaggcccttctcaagtcagggttcctgcacattcacagttacgggtggccctgggagtaacacctggcacccaaacaggtcaccagagtccacacatagtccacctgccctccctgcgtaagatcagctcttcctcctcccgacgatagatcagggtcaatgatccctgccaagatggcgactgctccagcctgctggtccaacctgtccagccacagctgttgctcgaaggcttgaagttcaatgggaccctctcccgctttctacaaactggttcctttatttttatgtttatttatttgggacggggtctggctctgtcacccaggctggagtgcagtggtgcaatcactgctcactgcagcatccacctcccagcgtccacccatcctcctggcctcagcctccggaacagctggggtacaggtacgccccagcccgaacaggttttcactaggttgcctgggctctttctttctttgtctgtgtttgtttgttggttggttggttggttggttggtttttgtttgtttgtttcgagacggggctccggctctgccgccgggggctgcagtgcaatggcg

SEQ ID NO: 688183 - DNA, 580 bp, Homo sapiens
agtctttcggtgcccccttgctgttttagttttgtcctgcggccgagtgtttccctcgcttcacgccaacacaatctccgccgccctgtcttgtcatccccattctacagcccagcacggtgtagtatggcagccgctagccacaggtatctagggagccctggaaatgtggtcagttctaatggagctgygctgttaagtgtgaaatacacatgggattttgacggcagtgggagcaaaattctcccaattttttttttttttttttttttttttcagacggaggttccgctcttgttacccagcctggagtccaatggcgcgatctaggctctctgcaacctccgcctcccgggttcaagcgattcccctgcctcagcctcccgagcagctgggactacaggcatgtgccaccacgcccggctaactttgtatttttagtacagatggggtttctccacgttgctcaggctggtctccaactcccgacctccggtgatctgcccagctgccgcctcccaaagtgttgcttgcgattacaggcttgagccaccgctcaccctggctttttttttttttt

SEQ ID NO: 688184 - DNA, 580 bp, Homo sapiens
agtctttcggtgcccccttgctgttttagttttgtcctgcggccgagtgtttccctcgcttcacgccaacacaatctccgccgccctgtcttgtcatccccattctacagcccagcacggtgtagtatggcagccgctagccacaggtatctagggagccctggaaatgtggtcagttctaatggagctgcgctgttaagtgtgaaatacacatgggattttgacggcagtgggagcaaaattctcccaattttttttttttttttttttttttttcagacrgaggttccgctcttgttacccagcctggagtccaatggcgcgatctaggctctctgcaacctccgcctcccgggttcaagcgattcccctgcctcagcctcccgagcagctgggactacaggcatgtgccaccacgcccggctaactttgtatttttagtacagatggggtttctccacgttgctcaggctggtctccaactcccgacctccggtgatctgcccagctgccgcctcccaaagtgttgcttgcgattacaggcttgagccaccgctcaccctggctttttttttttttt

SEQ ID NO: 688185 - DNA, 580 bp, Homo sapiens
agtctttcggtgcccccttgctgttttagttttgtcctgcggccgagtgtttccctcgcttcacgccaacacaatctccgccgccctgtcttgtcatccccattctacagcccagcacggtgtagtatggcagccgctagccacaggtatctagggagccctggaaatgtggtcagttctaatggagctgcgctgttaagtgtgaaatacacatgggattttgacggcagtgggagcaaaattctcccaattttttttttttttttttttttttttcagacggaggttccgctcttgttacccagcctggagtccaatggcgcgatctaggctctctgcaacctccgcctcccgggttcaagcgattcccctgcctcagcctcccgagcagctgggactacaggcatgtgccaccacgcccgkctaactttgtatttttagtacagatggggtttctccacgttgctcaggctggtctccaactcccgacctccggtgatctgcccagctgccgcctcccaaagtgttgcttgcgattacaggcttgagccaccgctcaccctggctttttttttttttt

SEQ ID NO: 688186 - DNA, 580 bp, Homo sapiens
agtctttcggtgcccccttgctgttttagttttgtcctgcggccgagtgtttccctcgcttcacgccaacacaatctccgccgccctgtcttgtcatccccattctacagcccagcacggtgtagtatggcagccgctagccacaggtatctagggagccctggaaatgtggtcagttctaatggagctgcgctgttaagtgtgaaatacacatgggattttgacggcagtgggagcaaaattctcccaattttttttttttttttttttttttttcagacggaggttccgctcttgttacccagcctggagtccaatggcgcgatctaggctctctgcaacctccgcctcccgggttcaagcgattcccctgcctcagcctcccgagcagctgggactacaggcatgtgccaccacgcccggctaactttgtatttttagtacagatggggtttctccacgttgstcaggctggtctccaactcccgacctccggtgatctgcccagctgccgcctcccaaagtgttgcttgcgattacaggcttgagccaccgctcaccctggctttttttttttttt

SEQ ID NO: 688187 - DNA, 669 bp, Homo sapiens
tcccacaagaggtggtggagcggagcgttctctgtctcccctggagagagggagattccctttccgggtctgctaagtaacgggtgccttcccaggcactggggccaccgctagaccaaggcctgctaagtaaccagggccttcccaggcactggcattaccgctaggccaaggagccctccagcggcccttctctgggcgtgaatgagggctcacactctcgtcttctggtcacctctcactgtggcccttcagctcctaactctgtgtggcctggtttcccccaaggtaatcataatagaacagagatcattatggtaatagaacaaagagtgatgctacaaactaatgattaataatrgtcagatataatcctatccgtttcctatctctagtaaaacttttcttattctaattattttcttcgctgtactggaacagcttgtgccttcaggctcttgcctgggcacctgggtggcttgcggcccacaagataagatacattgcgttgaactataatttatgttgattgctgaatgatttagggcgggggggtgggcaccccctgaaattctgccctggaggagtggcctcaccctaaccctggccgtggctaataataaggcccacctcttagggccgtggagtgaaataagttttccaggtaat

SEQ ID NO: 688188 - DNA, 669 bp, Homo sapiens
tcccacaagaggtggtggagcggagcgttctctgtctcccctggagagagggagattccctttccgggtctgctaagtaacgggtgccttcccaggcactggggccaccgctagaccaaggcctgctaagtaaccagggccttcccaggcactggcattaccgctaggccaaggagccctccagcggcccttctctgggcgtgaatgagggctcacactctcgtcttctggtcacctctcactgtggcccttcagctcctaactctgtgtggcctggtttcccccaaggtaatcataatagaacagagatcattatggtaatagaacaaagagtgatgctacaaactaatgattaataatagtcagatataatcctatccgtttcctatctctagtaaaacttttcttattctaattattttcttygctgtactggaacagcttgtgccttcaggctcttgcctgggcacctgggtggcttgcggcccacaagataagatacattgcgttgaactataatttatgttgattgctgaatgatttagggcgggggggtgggcaccccctgaaattctgccctggaggagtggcctcaccctaaccctggccgtggctaataataaggcccacctcttagggccgtggagtgaaataagttttccaggtaat

SEQ ID NO: 688189 - DNA, 669 bp, Homo sapiens
tcccacaagaggtggtggagcggagcgttctctgtctcccctggagagagggagattccctttccgggtctgctaagtaacgggtgccttcccaggcactggggccaccgctagaccaaggcctgctaagtaaccagggccttcccaggcactggcattaccgctaggccaaggagccctccagcggcccttctctgggcgtgaatgagggctcacactctcgtcttctggtcacctctcactgtggcccttcagctcctaactctgtgtggcctggtttcccccaaggtaatcataatagaacagagatcattatggtaatagaacaaagagtgatgctacaaactaatgattaataatagtcagatataatcctatccgtttcctatctctagtaaaacttttcttattctaattattttcttcgctgtactggaacagcttgtgccttcaggctcttgcctgggcacctgggtggcttgcggcccacaagataagatayattgcgttgaactataatttatgttgattgctgaatgatttagggcgggggggtgggcaccccctgaaattctgccctggaggagtggcctcaccctaaccctggccgtggctaataataaggcccacctcttagggccgtggagtgaaataagttttccaggtaat

SEQ ID NO: 688190 - DNA, 624 bp, Homo sapiens
cctgttcgtaagcacatttctttatcaaaaacctgcttgtcttttacctcacccctttttgcagtcctaccttacattctgttcattgcgtcttgaccttcaatagctccatgaaaacttgaaataaatgtgaaastaacatcattatttgtgtttcttctgaagtttctattcctttgttcaaatattctcttaaaaaactcaaaacctaggatttgctttcagacttaaattcagtctatcactatccttacctattagtataaaaatggtaaaatgttgtttcatctatgcttttccaggataacccaagttcatagataacttaaatatttattttgagtatcccatgctctcattttctgatgtcagtttgtactcacttttttttgttgcataaacatgtaccatttctaaggagacttgaaaattaaagcagtttgatcaatttcagctgtagtatgaatcttcttgaaaaaatttgtaggattatttaattaaatcattttagtatttttaatgtgagtttcttatcatttttaagatacttaactttccagtccagaaatatcttataaatgagtttaaataaggtaatatctcctatataaagagaataggaca

SEQ ID NO: 688191 - DNA, 675 bp, Homo sapiens
gtttggctctgtgtccccacccaaatctcatctctaattgtaatcctcacatgtcaggggagggacctggtgggagatgactagatcatggggtggttcccccatgctgttctcgtgataatgagtgagttctcatgaaatctgatggcttaaaagtgtggcggtcccctgcaacccctgcctcctgctgccatgtaaaaggtgccttgcttccccttcaccttctgctatgattgtaagtttcccaagggctcctatgccatatggaactgtgagccaattaaacctctgttcttaataaattacccagtctcaggtagttctttataacagtgtgaaaaatgactaacacaggtctgaacactgttttctaggttgactgatttgagctattagtcagtcaacaattatgtattaagcatagattaaccatattgtattatagtattttcaagacttctatcacttgagtattacccttacaatttttgccacatttttgtgcctctastgctattaattatttattagtttctctctaaattaatattttaatcaaaagcaaatttattctaaaataaaactttatgccaataatgtaaatggcaagcagccatcatttgccatgaatagaaggtaaccatgagtctaaatatattactattaaattttaaa

SEQ ID NO: 688192 - DNA, 1048 bp, Homo sapiens
ttttaggcttaactataagaaatggagagtcggctgggcatggtggctcatgcctgtaatcccagcactttggaaggccaaggccagtggatcacctgaggtcaggagttcaagaccaacctggccaacatggtgaaaccctgtctctactaaaaatacaaaaaaactagccgggtgtggtggtgggtgcctgtaatcccagctacttgggaggctgaggcaggagaatcgcttgaacccaggaggcggagcttgcagtgagctgacattgcaccattgcactccagtctgggcaacaagagtgaaactcctcaaaaaaaaaaaaaaaaaaaaaaaaagagagtcttaagtcaggttgaagttgtgaacctgagtgattgggagttggggtcaggaagatggtgctttgtgcatgttgaattgaaggtctgtgtattggtagactatccttgcagaattgtgttataggaagtgtattagtctgttttcacactgctgataaagacatactccaaactgggcaatttacaaagaaagaggtttaattggaatcacagttccatgtggctgggcagcctcacaatcatggcggaacgcaaggaggagtaagtcacatcttacatggatggcagcaggccaaaaaaaaaaaaaaaatgcatgtgcagggaaattcccatttttaaaaccatcaggtctcatgagacttatcactatcatgagaacagcacaggaaagacctgctcctatgattyagtcacctcccactgggtccttcccacaacacgtgggaattcaagatgagatctgggtggggacacagcgaagccatatcaggcagctagattgatcatgggggaccaggggagaggtaagggcaggaaatagaaatttagggattctctgtctgcctgggaatagctgaagccatacaaatggaccagctcagaaactcgtgagtgaactgaggagcactttccttaagtagttcgtcagcttaatcggctttctatagttgtcacagcaaaatattacactgtctttagagact

SEQ ID NO: 688193 - DNA, 631 bp, Homo sapiens
gacaataaaaagaccagacaggttaagtgttcactgagaatgacagacattttcctggcaatttgggtgagaatgtaataatttttctacttgaaaaagtaatagtgatctcaagtcttgaagaaaagacacaaggtagatctaagctaatcttcacaactctagcacacaggatagaggactgggaaattgcataaataatttttttcccaatctcagcaacacttgaattgtagagcyctgtccatggagtgttatatgggaatactataagtacagcaatatcaagaggcaagaagaaatggtagtgtctggttagtggtaataggaggaagctgtactgctgggagacaagaaaccgttttttttttgtttttttttctgtggaaatctgcaggaagcggcaaatgattatcagacaagcacatcagccatgagagtgttagacagaattaaaaagcgagtgcacacagatgtcaagatagcagctttgtaggtcttggggccccttgtaatagagacaaagatatggagatgtttcctccaaataagtcattcgaaaacgtacactgataatacaatggagtttggtgcagtgaaaagaaaactgactagaaatcagaagacttgg

SEQ ID NO: 688194 - DNA, 1140 bp, Homo sapiens
tctctctttcctgccgccatgtaagatgtgcctttgccttccaccatggttgtgaggcctctccagccatgtggaactgtgagtccattaaacctctttttctttataaattacccagtctcaagtatatctttatcagcagcatgaaaacggactaatataccctgactctacaaagaaatacaaaaactagctgggtgggatggcaggtgcctgtagtcccagctacttgagaggctgaggtgggaagattgtctgagcccaagatgttgagcctccrgtcaaccctgtcttaaaaataacaacaacaacacaagacatttttcttctgggcaagagctttctggaattgtaaagccacgttaatatagacgataagctgtatgggtgtagaaagatttcaattcgtagtatgccttgtaggaaattgtgatcatattgtatatataattttgtatattatgttattttaatttattttatgccattttctatgttgtgtgtatctactgcaaactctataggtaaaagctatgaagtttcatgttttgaacttacctaaattgaattaatgattctactgagcccatttcagttattccttattttgacttatacagacaacagatgaatttacttgcacacaagaataattctgaatatgggattgtttcctgtagatagaaacatgtgaggtaaaatatgagataaaaggattatagccacatcttaactccaaagaggctataagtggtttgattttgtttgtttccagataaactccactcacataagtcaagccatcttagtgggtaacttcattcaagtcactatgggtatattattttttcttttattttcatccacaaaataatccagactttctgcccaatgaaggaaaaataaatacaaggcagacatttagaggtcttggcaaatatgagtttgatattctctatgactccaaatgattagaatcttaaaagctggtattattatgcaatgcttttctcagaaaacaaatatttgcattttcaatcccagtcaaaaatgatataccaaggaaatctgctgactttctccagctctcacaactcttccacaccaaaatcaaaaataaaacacctaagttttaaaaaa

SEQ ID NO: 688195 - DNA, 1140 bp, Homo sapiens
tctctctttcctgccgccatgtaagatgtgcctttgccttccaccatggttgtgaggcctctccagccatgtggaactgtgagtccattaaacctctttttctttataaattacccagtctcaagtatatctttatcagcagcatgaaaacggactaatataccctgactctacaaagaaatacaaaaactagctgggtgggatggcaggtgcctgtagtcccagctacttgagaggctgaggtgggaagattgtctgagcccaagatgttgagcctccagtcaaccctgtcttaaaaataacaacaacaacacaagacatttttcttctgggcaagagctttctggaattgtaaagccacgttaatatagacgataagctgtatgggtgtagaaagatttcaattcgtagtatgccttgtaggaaattgtgatcatattgtatatataattttgtatattatgttattttaatttattttatgccattttctatgttgtgtgtatctactgcaaactctataggtaaaagctatgaagtttcatgttttgaacttacctaaattgaattaatgattctactgagcccatttcagttattccttattttgacttatacagacaacagatgaatttacttgcacacaagaataattctgaatatgggattgtttcctgtagatagaaacatgtgaggtaaaatatgagataaaaggattatagccacatcttaactccaaagaggctataagtggtttgattttgtttgtttccagataaactccactcacataagtcaagccatcttagtgggtaacttcattcaagtcactatgggtatattattttttcttttattttcatccacaaaataatccagactttctgcccaatgaaggaaaaataaatacaaggcagacatttagaggtcttggcaaatatgagtttgatattctctatgactccaaatgattagaatcttaaaagctggtattattatgcaatgcttttctcagaaaacaaatatttgcattttcaatcccagtcaaaaatgatataccaaggaaatctgctgactttctccagctctcacaactcttccacaccaaaatcaaaaataaaacacctaagtttwaaaaaa

SEQ ID NO: 688196 - DNA, 700 bp, Homo sapiens
taatgaatcaggacacacagagctctggaaagaacttcccttgcttttcatcataggaagtgcctgtgaggtttattagggtaactgaataatgactatgctcacttgtgtgggtaacttgtactttcagctttaggtgtatgctgtttttcctgtgtaactgtttatttccagatttctgggactataggatcttccaggcaataaaacattcctgtacctaaacactatttgagttttatttagttaattctgtttatggttttcctgcctgcctaccctttcacagcctgaggttctgccttccaagatgtcatccacatcctgcttagtccttttcatagacctacgctccctcctcaatactttatgaaaagccatccattttcatctcatgcttatcatatgaatttgtcttgcttctttcagcctgtctgccttccttccytccttctttcttttcctctagttaactctcatgtatcaagaagtaaccgagtgccgggcactcttctaagtattgtgaaatagtgttgagcaatgaacctatttttctctctgtctcttagagttcatttactgagagggaggcagaaaactgacaagcaaagagcaaagaaaggccgggcacagtggctcacgcctgtaatcccagcactttgggaggatgaggcaggtggatcgtctgaggtcaggagtt

SEQ ID NO: 688197 - DNA, 676 bp, Homo sapiens
tggacatgcctgcataggttcccccaagtaaatactagtcatgataaccaaaaaatggaagcctccaaatccctatttattataaaattaaacaattatataataactatacaacttaatattacacaataataagaatgagttactgctgcatgcgaatacttggataagcatcataaacataatgctaagcaaaagaaacacacataaaacagtacatgttatatgactctatttctataaagttcaaaataatcccaaacatatctatgatgttacaagtcagggtatttgttacccttggargcaggatagtgaacgaaacggacggaaaggaggcatttggaatgctggtgatgctctgctttaggtttcatgggtgtattccctttgtgaaaattcattgagctatttatgtatttatttatttgcctattatttatttgttgacagggtctcactctgtctcccaggttggagcacagtgagaatagctcactgtagccttgaactcctaagcccaagagagcctcctgcctcaatctcctgagtagctaggactaaaggtgctgccatgcctggctaattttaaaaaactgttgtttttttttccttgtagagatggaggactggtacattgcccagggtggtcttgaactcttgggctcaagcaatc

SEQ ID NO: 688198 - DNA, 676 bp, Homo sapiens
tggacatgcctgcataggttcccccaagtaaatactagtcatgataaccaaaaaatggaagcctccaaatccctatttattataaaattaaacaattatataataactatacaacttaatattacacaataataagaatgagttactgctgcatgcgaatacttggataagcatcataaacataatgctaagcaaaagaaacacacataaaacagtacatgttatatgactctatttctataaagttcaaaataatcccaaacatatctatgatgttacaagtcagggtatttgttacccttggaagcaggatagtgaacgaaacggacggaaaggaggcatttggaatgctggtgatgctctgctttaggtttcatgggtgtattccctttgtgaaaattcattgagctatttatgtatttatttatttgcctattatttatttgttgacagggtctcactctgtctcccaggttggagcacagtgagaatagctcactgtagccttgaactcctaagcccaagagagcctcctgcctcaatctcctgagtagctaggactaaaggtgctgccatgcctggctarttttaaaaaactgttgtttttttttccttgtagagatggaggactggtacattgcccagggtggtcttgaactcttgggctcaagcaatc

SEQ ID NO: 688199 - DNA, 676 bp, Homo sapiens
tggacatgcctgcataggttcccccaagtaaatactagtcatgataaccaaaaaatggaagcctccaaatccctatttattataaaattaaacaattatataataactatacaacttaatattacacaataataagaatgagttactgctgcatgcgaatacttggataagcatcataaacataatgctaagcaaaagaaacacacataaaacagtacatgttatatgactctatttctataaagttcaaaataatcccaaacatatctatgatgttacaagtcagggtatttgttacccttggaagcaggatagtgaacgaaacggacggaaaggaggcatttggaatgctggtgatgctctgctttaggtttcatgggtgtattccctttgtgaaaattcattgagctatttatgtatttatttatttgcctattatttatttgttgacagggtctcactctgtctcccaggttggagcacagtgagaatagctcactgtagccttgaactcctaagcccaagagagcctcctgcctcaatctcctgagtagctaggactaaaggtgctgccatgcctggctaattttaaaaaactgttgtttttttttccttgtagagatggagkactggtacattgcccagggtggtcttgaactcttgggctcaagcaatc

SEQ ID NO: 688200 - DNA, 622 bp, Homo sapiens
ttggtttttcagcaactatattaaaaatctacattgggccggacgcggtggctcacgcctgtaatcccagcactttgggaggccgaggcgggcggatcacgaggtcatgagatcgagaccatcstggctaacacggtgaaaccctgtctctactaaaaataataaaaaaaaaaattagccgggtgcagtggtgggcgcctgcagtcccagctactcgggagactgaggcaggagaatggcgtgaacgtgggaggcggagcttgcagtgagccgagatagcgccactgcagtcaggcctgggcgaaagagcgagactctgtctcaaaaaaaaaaaaaaaaaattctatattaactttactttcactcttaaagtttaaaattatcatctggttgttagtcattagtattttcttctaacttgatgtttatctaactttttttttccttatagattttcttcttgtcagcctattcttcgaccaaagatgaatattttgggagagagatctctttctctctactctcaccctgctaagacacatcccatcaatccaaacagcatcagtcatcaggcaccattcatggttttggtttgttttttgtttttaaaaacaaggtctca

SEQ ID NO: 688201 - DNA, 602 bp, Homo sapiens
tgaaaaacataaaagtaataaaggcttataaatagaaatagcgtatcctctggctatatcctctatccacttgccagaaatcagaccaacaccaggtcactttttttaaaattaattaatttttatttatttttttgagacagagtctcgctctatcacccaggctggaatgcagtggcatgatctcgactcactgcagcctctgcctcctgggttcaagtgattctcatgccttagcctctcaggtagctgggattataggtatgtgccaccatgcctggccaattttttgtatttgtagtagagatggagtttcaccatgttgcccaggctggtctcgatctcctgacctcaggcgatctgcccatcttggtctcccaaagtgcttgggattacaggcatgagccactgcgactgacgaaaaacacatctttttatgatggaaaatttcaaacatatgtagcaaaagaacagatagttacycatcatctaccttcaatgattaacaattcatggcagatctcatttcatatatatcttcatccactacctttaccactacacccataggaatattttgaagctaattctggaaatcctgt

SEQ ID NO: 688202 - DNA, 436 bp, Homo sapiens
aattatttttaatggtggtattgaacttatgtttttaaggagtccttactttctatagacacatactgaactatttttgaataagatgatatactgtccagaatttgtttcaaataattcaaagcaggtataatgacaagattggcttcatgtgataattattaaagctgaacatatgggattttaaaaatcctatccgctctctagttttgtgtatatttgaagcgctccacaataaaaaasttatttagaaaagaaaaagtaccaaccatgaaagcattcttttattttcttttatttctttgtgtgatgaatgctataaatatcagtaccaattaagacctttgtgcacctagaataaattatccagtggtcatacagactgtgtgactgggagtatatgtaagaaaatgaagtgcccattctcatatcttga

SEQ ID NO: 688203 - DNA, 667 bp, Homo sapiens
gaagaaaggcctcagggaaaatacagctttcattgccagaatgaggcaatagcacttttggggtgctattttgttgggtggtgtattaattcttaagcaactccactcatggaaaactaaaaaagcgttacagtctgaatattaccacagacagcagcaatctcagtttctctcaaaaaagttaattgattccatgagactttatttaatttggggtttttcaggcactgtctgcacagtagcaagattgtggggcatgaccttaatgagtggttctaacatatgcatgttcccttctaaacagccttcccatttatagtctcaacttcacagtttaaccttaaggtcaatttttgactttcaytgatgctcttccctgcttgtattcaaaaggaacctgtgcttctcagtcttggcgtgtacatcagaattaaccagggagcttccaataaatgccaatgcccagaccctaccattagagattctaatagtggtggcatggggcagggtttgggtatcaatagttttcaaaggtccccaagatattttaatgtgcagccagtgttaagcaccgttgatctggtccatttcctttgaggtcctgagaagggaaataatttccttaaggtcattaagcaaataggtttatttttgaccacacatgttg

SEQ ID NO: 688204 - DNA, 1439 bp, Homo sapiens
  misc_feature 312, 356, 402, 403, 404, 405, 406, 407, 408, 409, 410, 411,412, 413, 414, 415, 416, 417, 418, 419, 420, 421, 422, 423,424, 425, 426, 427, 428, 429, 430, 431, 432, 433, 434, 435,436, 437, 438, 439, 440, 441, 442, 443, 444, 445, 446: n = A,T,C or G
  misc_feature 447, 448, 449, 450, 451, 452, 453, 454, 455, 456, 457, 458,459, 460, 461, 462, 463, 464, 465, 466, 467, 468, 469, 470,471, 472, 473, 474, 475, 476, 477, 478, 479, 480, 481, 482,483, 484, 485, 486, 487, 488, 489, 490, 491, 492, 493: n = A,T,C or G
  misc_feature 494, 495, 496, 497, 498, 499, 500, 501: n = A,T,C or G
cacgcccggctaattttttgtatttttagtggagacggggtttcaccatgttagccaggacggtctcgatctcctgacctcgtgatccgcccgcctcggcctcccaaagtgctgggattacaggcgtgagccrccgcgcccggccacaagcacgtaattttcttaatctcaactatttccccacaaacaattcaatcataggttctttagagacttataattcaccagatattgtaccaaatcctactgaaacaatttggtaacaataatgcttggaaattttaatcagatatttgtagagtttctaagcanttaattgaccatagtatcctaaggtgcagagagctttggtttangaagtccgtgaggaataaatttttaccaatattttctagcagtccnnnnnnnnnnnnnnnnnnnnnnnnnnnnnnnnnnnnnnnnnnnnnnnnnnnnnnnnnnnnnnnnnnnnnnnnnnnnnnnnnnnnnnnnnnnnnnnnnnnnagttaataaacaatagcagaaacctatgttttccgattctaaatctaataggttaaacattgattctggcatatttctaattatttttgttgtatctgtttcaatctcatggataaaaacatttcacaaccacattcccacataatacttgtatatttaattacctacttccttctaggtagacagtggacctatagctttcaggctgttggatcattatgtgttgtataatgattggttttgctataaacactgccattgaaaaggctgtcaaaatgcattcagaaagactcagctgccaaatacagtagtcgccccttattcatgggagatatgttttaagaccgccagtggatgcttgaaaccatggatagtatgaaagctcacatatactgtgggttttttttttttactgataacccagacaactacgaagtgactgacgggcagctaatgtatacagcgtggatacactggacaaaggaatgattcacatgctgagcaagatggagcaagatttcattatgcttttcagaatggtgcacaattaaaaacttatgaatttctggaatattccatttaatgcttttggactgtggttaaccactagtaactgaaacaatggaaagtgaaaccatggatgagaagtaggtactagtgaacaagtttccagttaaatgttcaaattcaatctgctcctcagttaaacatatgaattatttttaaatgtaaaaattttgtatatattcctctggacaatgaagattaaacagaagaaagatggtaaaaaaaaatttaaactcatggagtactgtagtatccattttttatctttttaaattattttattattcttttatacttggtcaatgtaaagttttgttaaatctgatttgattcagttaggtccatacttaacctacttttagtacaaaata

SEQ ID NO: 688205 - DNA, 685 bp, Homo sapiens
ggtgagggtttcacatacatatttggcattttagcacagtgtaactgtcattccaaggattgatgagaattgttgtcactgatgataatacatttgaacgttttcctgtgcttgacagacatagttaaatatatactggctggagattgcattgacaacaaactgtaatttttaaaggactataaagcattttgaatgctctggcaaagtattgaccaacttgaccatcttaatttgatcaggctgggagtaaactagaatgatattttttgtgtgtatcattgtccagttcttcctgaatgagtcttttttttttctaatcatcttacttctccctctgtagagttgtcacccctggacattgytctcccatccagcaggacagtcttgcctttggtgattaaagagagcatgttgatggacatatgacctgtgtagtcatagggcctctcactcagaagagcctgagtcactcttgtcactgttttaaagttcataataatttatctttgaactcgtgttttgtaaattaagtccaagggggcagtgcagcataggcttgaacagaggaaatacaatgtgtgcagttgctggcctcctcatttgcatagagtagtcatggtgccctcctggacatgttgcagggaattctcatgggcttgcaacgtgaggaagttcagtgaga

SEQ ID NO: 688206 - DNA, 685 bp, Homo sapiens
ggtgagggtttcacatacatatttggcattttagcacagtgtaactgtcattccaaggattgatgagaattgttgtcactgatgataatacatttgaacgttttcctgtgcttgacagacatagttaaatatatactggctggagattgcattgacaacaaactgtaatttttaaaggactataaagcattttgaatgctctggcaaagtattgaccaacttgaccatcttaatttgatcaggctgggagtaaactagaatgatattttttgtgtgtatcattgtccagttcttcctgaatgagtcttttttttttctaatcatcttacttctccctctgtagagttgtcacccctggacattgctytcccatccagcaggacagtcttgcctttggtgattaaagagagcatgttgatggacatatgacctgtgtagtcatagggcctctcactcagaagagcctgagtcactcttgtcactgttttaaagttcataataatttatctttgaactcgtgttttgtaaattaagtccaagggggcagtgcagcataggcttgaacagaggaaatacaatgtgtgcagttgctggcctcctcatttgcatagagtagtcatggtgccctcctggacatgttgcagggaattctcatgggcttgcaacgtgaggaagttcagtgaga

SEQ ID NO: 688207 - DNA, 926 bp, Homo sapiens
  misc_feature 634: n = A,T,C or G
ttgccataccattctgtgggtgttttttagcaggctgagctaatttatgcactcttaatatttagccctgagacctagtagaagcccccttttcatagataaagaaggaagtagatatctactctaaatgaattgcacattcacacttttagaaagttgtgaagctaagtttcaaacccagatttattttatttctcaaacttttgtcttaatttaccatctagaaacctttcaaatcttgtaatgtataaacatgggttctgccattatcaatcattctcattatagagcaaatgttacactttattaaaaaaaactttcatttcaatggaatgatgaggtattctctttagatactgaaatcaagacccactggatatcagaaggatgtcagtctaaaggtcttttcatcaaaactactttcatatcaatgtcaaggttctacttgggctgaactccctctttcattctgcctttcaccagctcaggatgccttcagactttcctcttgaagagttaaaatggaaatgaagtcttcatttatgctcagacatcttctgtgggaatcyggtataggaagagcctttgtagataatgacttacgtagggcatgaaaactatgtccaggggcttntaacccagaagtagacattgtctgtaaagtagaccattaaaggcaaacatttcaaagagccagaagtctgtctgctttcttgtgaaaagacatatagatagaattaggcatttcagagtaacttaaagtttttttgtattgacctagaaaaaagtttttaattaatttttgaaaaggaaaatataatggaaaaggaatgacatacgccttggattgttgaaatttttaaagtaaaaactaaacaaagtaaaagcaagtctttctataattgcttaaaaatcttcaatactga

SEQ ID NO: 688208 - DNA, 926 bp, Homo sapiens
  misc_feature 634: n = A,T,C or G
ttgccataccattctgtgggtgttttttagcaggctgagctaatttatgcactcttaatatttagccctgagacctagtagaagcccccttttcatagataaagaaggaagtagatatctactctaaatgaattgcacattcacacttttagaaagttgtgaagctaagtttcaaacccagatttattttatttctcaaacttttgtcttaatttaccatctagaaacctttcaaatcttgtaatgtataaacatgggttctgccattatcaatcattctcattatagagcaaatgttacactttattaaaaaaaactttcatttcaatggaatgatgaggtattctctttagatactgaaatcaagacccactggatatcagaaggatgtcagtctaaaggtcttttcatcaaaactactttcatatcaatgtcaaggttctacttgggctgaactccctctttcattctgcctttcaccagctcaggatgccttcagactttcctcttgaagagttaaaatggaaatgaagtcttcatttatgctcagacatcttctgtgggaatctggtataggaagagcctttgtagataatgacttacgtagggcatgaaaactatgtccaggggcttntaacccagaagtagacattgtctrtaaagtagaccattaaaggcaaacatttcaaagagccagaagtctgtctgctttcttgtgaaaagacatatagatagaattaggcatttcagagtaacttaaagtttttttgtattgacctagaaaaaagtttttaattaatttttgaaaaggaaaatataatggaaaaggaatgacatacgccttggattgttgaaatttttaaagtaaaaactaaacaaagtaaaagcaagtctttctataattgcttaaaaatcttcaatactga

SEQ ID NO: 688209 - DNA, 926 bp, Homo sapiens
  misc_feature 634: n = A,T,C or G
ttgccataccattctgtgggtgttttttagcaggctgagctaatttatgcactcttaatatttagccctgagacctagtagaagcccccttttcatagataaagaaggaagtagatatctactctaaatgaattgcacattcacacttttagaaagttgtgaagctaagtttcaaacccagatttattttatttctcaaacttttgtcttaatttaccatctagaaacctttcaaatcttgtaatgtataaacatgggttctgccattatcaatcattctcattatagagcaaatgttacactttattaaaaaaaactttcatttcaatggaatgatgaggtattctctttagatactgaaatcaagacccactggatatcagaaggatgtcagtctaaaggtcttttcatcaaaactactttcatatcaatgtcaaggttctacttgggctgaactccctctttcattctgcctttcaccagctcaggatgccttcagactttcctcttgaagagttaaaatggaaatgaagtcttcatttatgctcagacatcttctgtgggaatctggtataggaagagcctttgtagataatgacttacgtagggcatgaaaactatgtccaggggcttntaacccagaagtagacattgtctgtaaagtagaccattaaaggcaaacatttcaaagagccagaagtctgtctgctttcttgtgaaaagacatatagatagaattaggcatttcagagtaacttaaagtttttttgtattgacctagaaaaaagtttttaattaatttttgaaaaggaaratataatggaaaaggaatgacatacgccttggattgttgaaatttttaaagtaaaaactaaacaaagtaaaagcaagtctttctataattgcttaaaaatcttcaatactga

SEQ ID NO: 688210 - DNA, 1269 bp, Homo sapiens
tttctaataatacataatacaggagaaaattggttaatctctagattgggttcaatatattatttatattttgagaattttaattttttatgaaggtctaatatttttggaataagatcaccaacaaagttatgttctagtgtaacttcatatgttgtggataaatgtaacacatgaagttctttatcaagcttttcttttatcattctcttttcatgtccagttaacacttcatggcctgtaaagatggctacaaatgctgtgctttgttgccctcctatcgcattaagaaatttgatcataataacatgggaaataatcctgagaggccagccttcctgcacaaaagcctacaagaaagaaacaaatgagaccaaggaaaccaactgtactgatgagagaataacctgggtctccagacctgatcagaattcggaccttcagattcgtaccgtggccatcactcatgacgggtattacagatgcataatggtaacacctgatgggaatttccatcgtggatatcacctccaagtgttaggtaaggagcatcatatattgaggtatttcacatcaccagatttgtgacggaaacaaatgtctctctgaattccatatgctttatgtgaaaaccgaagcatttttttccctctttcctctctgcagttacacctgaagtgaccctgtttcaaaacaggaatagaactgcagtatgcaaggcagttgcagggaagccagctgcgcatatctcctggatcccagagggcgattgtgccactaagcaagaatactggagcaatggcacagtgactgttaagagtacatgccactgggaggtccacaatgtgtctaccgtgacctgccacgtctcccatttgactggcaacaagagtctgtacatagagctacttcctggtcagtaattcttttagttttattttttatttttttccattcttttaaargagttaagaaaaaaaaagatgtgcaaatatattttgttcgaggatgctctccccactcttcatttttatctcttccctgaccaaaataaagagatgagttgaggagaatagtacagacatttgttgtaaaaagcccttttttagaatgcagtttaattctactattaatgttcacttctatgctagtagttaattagcatgagtagtatacttttaaaaataatacttatggcttattgaaagataaagtatactttgaagcatgtaattatggttctattagaaggatacatttactcaaagt

SEQ ID NO: 688211 - DNA, 679 bp, Homo sapiens
gtgggtgagtgaccatcactgcctaagctccgcctcctgtcagataagcagcattagattttcacagaagcacaaaccctattgccaactccacctgcaagggatctaggttgtacgttccttatgagaatctaaccaatgcctgatgatgaggtgggacagtttcatcccaaaaccatcctccccactccaccctggaaaatattgtcttccacgaaaccagtctctggtgccaagaggatggggactgctgtcatatgtgactgcaacaagttgcaatttgcaatgcctttttttttttttttttttgagaccgagtctcactctttgcccaggctggagtgcagtggtgtgatctcggctcaatgcaacctctgcctctgaggctcaagcgattctcgtgccwcagcctcccgagtagctgggattacaggtgcccacgaccatgcccagataatttttgtatttttagtagagatagggtttagcagagaccatgttggccaggctggtcttgaactcctgacctcaggtgacccacctgctgcggcctcccaaagtgctgggattacaggcgtgagccactgcacctggtctgcaatgtctttagccagtcatttgcaatatctattaattttagatacgcatgccctttaactcagcaagcgcatttctggga

SEQ ID NO: 688212 - DNA, 655 bp, Homo sapiens
ttagtggaagaacaaaaatctgaatagctctcccatcttataccccttaccctccaaaatggtaaaagttccctggagtgggaatgaaaagatgtgaattctagtcgatgacctggtatgaaccatttgaagtgacacttcaagtaattgcttcacttatctaggcctgtgtttcttcatgtattaatcaagtagatttttttctaagatatctttcatttctaccatcttataattctaatggaagtgacaaatctgggaagtctgatgttaaagtagatatttttataaaattttgcacatggttgaggttaatgaacagatgaactactattgaaatctytgaaatttgctctaggtttatgtcataggagtttcttaaatagaattttaaggatatggaacatacatctccatccttagtgccagaatgggagatgggaagctataaattttacccatcatcttctgtgtggaggagacaaccagacttcactgaagacatttgtaacacagatagcattgtaactttaagccatgttgcttacataaggtgcagacaaaagtactagctgatcaaagcactcttcctacttttcaaccgatgactctactattacatagataggcctttaaaaggtgtgaacaattttga

SEQ ID NO: 688213 - DNA, 657 bp, Homo sapiens
tgcattaaattagcctaatgaaatcatattactcatgtttccctttggtttgtttttgcttgatatacctgtgtccatattgtagttttactttttagagtcgctttattttcagctctgccttttgtgtatgtagcatgtagtcaagaaatttttcttttaacaaaatatttagcctatttatgkttttttttttttttttttttgagttggagtctcactctgtcgcccaggctggagtgcagtggcaagttctcggctcactgcaagcttggccgggttcacgccattctcctgcctcagcctcccaagtagctgggactacaggcgcccaccactacgcccggctaattttttgtatttttagtagagacggggtttcaccgtgttagccaggatggtctcaatctcctgacctcgtgatccgcccgtctcggcttgccaaagtgctgggattacaggcgtgagccactgtgcccggcctagcctatttatgtttatgttaactaacatgtttgttttctttctgtcatatttttatatttgttttttattttgtctgttgctacatgaattttacatttctcaagtgattttttagtgtttttatttctacaaatggttttatttaaattttcaaaaggtagtgctgaatct

SEQ ID NO: 688214 - DNA, 640 bp, Homo sapiens
ggcatgaactgacacgaaattcagaaatgaaataaagaagagatagaaaaaggaaatggtaaactactgaattcagtacagcttgtatattgtcaggggaacacacttttctagttggataacaaggttcctggaatgctgtaggcactcaacaaatatttgctgaataaataaataaatctgaaaaacaaaatgcaaagcaccaaatgtatgttaggatttatcaagatggatcagcaatgactcctgctctgaaagactttctcacgctgctgttaacccagtatcttaaggcatggatggaatacccggtaccaacaccaccacctctccttcattttctgcacccatagcagtcattttaaattggccactatgatttttcactgttgaacctacacgcataatcagaaaatccttcagaagacaatgtcccagaaaattattgtcagttgatcagagacgacgaggtaaatgagatctaatcacctagtcacctatttctcaggcwtaccaatatgctgaatgagtttgaaaggaattaagcagcaaaacgaaacagaaaataatatattctgtgttttattcctactcaccatttaattatgtttctgtgtcctaatggaagaaaactggagca

SEQ ID NO: 688215 - DNA, 1952 bp, Homo sapiens
ttatttatgctgcacctttttaggaaaagctttcatcatttaatctgaaagtgagccatttgcccattggcaaatttgagaaacttttttttttttgggctagcaaatattaactaaggtgtcaataatatttgaaaaggggccttagtcattccaaagctatttttaaaatgaacagaacaattattccgtggaaagagtgcttgtgatacatgcaggctttaaagttctgcttttcaaactctgaagcctagttcctgcataagtagatatttgtttattctgcttatctcaagccatagcgaatactgtccctgtctctaaacggtcagatttctgcctaccatatcttaattctgccttaaagcgataattccaaaaagttagagactgtgtttactgaacttgttatactcacacaaaaggatgctaaatatttgatgataattttccctttctttgaattaatatgagtgccaatctaaacagcacatgttgaacaaaaattttattttaattgcatttcccacattcccttcccttcacataaattctaagaataaaattaaagtcagctctaaaaagtgtgtctttcctcctctaaatgacatgcagacattagttttgccttaatcacttttcatttgagcagcttaggaaggctcagcatgaattttttacgtgtcagatatactcctccacckactcaatcccttcctgctgtttcctgcatttttcccccatcatgcttttactttggaaaatctatttcctccaagatattcagtgtttttttttttaagtaattttacccctggtttgctggaacaatgctgagtgtacaggaatattggtaaactcagcaattcaacaggcaaaaatggaaaggaagtgtcaaagtcattggggaatgtgggggacacccattaggcatatccccctgggcttgaggaagccgtgaaatgcctggaaagcattttcctttccaagatgggtgaggactttgttatttcctatctgtgttcacctagaggagctaagttcaggaattaaaatttaatgaagaatcaagtttgaaattctgcaccagtgcacaatgcttataaatataccacagtgatactatccgggtattataaataatacatgtaatgttgattaaaattttgatgtaaatttctaaaaactttattaaagttgtaaaataactgacatgggttttttatagttaggtgacaacttaattaatcaacttctgtctccactgcaataaagactagaagagcatattctccactttacttttatccctgaagaatgagccagaaaacacaaaattatctccctttcaaaacaccaaattatctttctttcaaaacagtctgagtattaattgtgaagcataacagcacatagtcatttcctagactaataatcaggaaaatacacaactctgacattcaactggtgaagaactaaagtgataaccagggaacatttattcacactcagtccggaaatgatcatttttgtcttggtacagggaaaattttcaattttcaggtcactaaacaatttaattctttattagagataaaaaattaaacacacaaatcatcactacatgaaagaaaatgcatatatactcatatatattgcacgctggttgtctcaggattcttgtttaatgagacttatccctttttaaatgagaaatcccaggctgatattgaaaatgaataagatgatggctagagtaatgttttagatagccagtcttttatgactttattattgtccttttgcaagagttttattacaaatgaaatactttaggaattataaaaaaaaggtgtctgtaattattgatgcaggctgtattcattcactcatttactcaataaacttattgcctgccgtgccctatggtggcatcaggagggttgccaggg

SEQ ID NO: 688216 - DNA, 647 bp, Homo sapiens
gctcataagtgcttgttacttagttctcacctcaactttaagaggtgttggtgggtaggaaagtagtgagagtgtagtttctagggtcggtgtatctaggtttggaaattacagttaatttacttatgagctacatggttggacaaatttatacatacatcggggatagaagtagcacttgcttgatatgattgttgagaagatggagagttaataacacataaagtaaaagtacctgctacagagtaagacmctatgcttattagcatgttgacaacttgttgagaagactgggttctcagagatcaggtttccgttcatctctctggaagtgacggtggggggggcggttgcctctgcagaccatgcctcggtttcccataaatgatcccggaattgcctcttgctggtgtttgccttcctatcagactggcctccagtctttcctgttgccacctgctctgcattcactgggcctccctgctggtgagtggccttgccctgatgatctgccattgcatgctcccgatttctggctcttctggtccagctgagcttcctccaagttgtctgtgatatgtgagactggccaggggacaaagaaatacttattgcccattgtccagtcactgctccatgtagaaccc

SEQ ID NO: 688217 - DNA, 321 bp, Homo sapiens
acacaggattatcctatgcatgtgaggcagagagcaagaaatatctggcaaatattacttattatgaccacatttgcccagatagaaagcaatcacggtattccctagagttatggaggggcctatttttctgggcacatttgtgtgacatatatggacatactcggctgttccttagcaaagaagaataactgataatatacaaggtgygctgtatacaaggtatgtctctgtcacaccttgtgtcttcaactcctacagccaggttcaagggttgggggttctagaagcttcatagaacacatcctgtttctatttcta

SEQ ID NO: 688218 - DNA, 2108 bp, Homo sapiens
aactttgttcttatggtatttgagtctgtaatgtatttawaaaggatgtcagactctgacaatttgaatgacttgcttatgatcacaaaagtgacaggcagcaagatcaagactagatccacatattattctgacttggaactcctattctcggtttcaccctttcactttcttgctttccttctccccgggaaatttggaaagatttctgtttttcttgcatctgtagctgcctctctcaacactgcatacagaaataagccaaataagtaatctataataatataaatcaagtgcttatgtaattaaattttcatagagactaatatgaacaagatgaacagatttgtctctgacccatttgttctcaatcctagttcagaagtgagcgcaatacactctttatgcttacctgttttctctcagatccagggaagtttttgcctgcaaatggaaattccaagtgtttgtcataaaatgtattattttgaccctcctaactatatcttaccaatggaaaagtgatagaagattttaaaatagacacatggcagttatctttaatgaaaagagcatgtcagagcttaaggatactgactcttagctatgtactctataaagtgggtgaaatttgtcctgtttagtgatgtcagtccaggtcaaggagcagtgttataattttcagcattctcaatagcaactattccagtgccatgaatacagtatgagccgaattaattactgacttaataaaatgttgtatggcccacatgtcagagatattcagtctttctcaacaaatgacacagtaggtaatagaattgagtaaatttatcattggtatattaagtacaatgagattgcaatttctttattcacactacagcaaagatatcagtatgactcatgtgacaaacagtgcagtttcttgcccaatatcgtttttgccctctgcccttattaatataatcctaatttggtttcgaatagaaatgtgttcagtttccttggctcctttgcctctatgatggttgccatggggcaataagatgtcattagatattgatttgtgggagtgtcataacagtcactatgtttttaaaaagtaataataataataaagggacaaagcatcctggcataggcctgatgacctctacttttctttctttattttagactctgaccaatgtgtggtagcagcttgtgagtaggaagacggaagaatctccatctcttttggcatcatggaactgtcctgcatggcttacttccagactttgttatgtgagagagcaatttatttaagctggataattgggtttctttcatcctaagccaaacataattccaactatggctttcttttcaagtcaaatccagtatttgggaagagaaataaggtacaaagtaaccttattatccatgaagacttgtgcttagggatgtaggtggtcataatatgtatgataaagttccctacggctattgtccactagaaagcaccaatttctcacaaagtcaagatcaaagccagtattatactacaataagttttccctgatctgctgtttaccaagctcttttaaatctgaaatcagaagagagaatttccctgaagtaattaacaaaccatcatttggtgttatttttgaaacaatgagttatttcaaaatttgaaaagatcaatgatcagttgggtcattcaccaagaaaaaacaaaattaaattaattttgaattaaaatacctagtcaaaactattaaaaattttttaaattgtatcaaattattaaaataactctagtatgtagtaaaattatgtttaattgctatataaggtccacatataatttattatctaatacctctgaacttttaattcaattttgaaaatattttacattttatttatgtagtaaataattttatttaaagttcagccacatgcctaaaactttcattaatttagtcattaaataatcactgatggtttattatgatagaaattatgctagcaagatttggcctgcactagctcttgaaagtttttcccctctcttctcaagtctgcaataagtagcatcacaattcatcttgaaatctgcc

SEQ ID NO: 688219 - DNA, 1600 bp, Homo sapiens
agacaaggtgagagacagaggcacagaaaatttgtatagaaaacaaataatgagagatgtaatcatgaaagctcaagcatggactgtgctgctttgacatcaaggtgaggaaggttcagggagaagctcatccattccttccaacttatcgcgaccactccacagtgcagtgctgcttcaacagagggagggagttgctgctattatttctagcttccattcatttgaagcttcaaatgtttatacatattacgtcatttaaacttaacaagcctgtaaggtaagctgctatgttatccccattatttagatgatgtggtaaagacaaagaagtcttaagtaacctgcccaaagcgatgcctagaaaaatagattcaaatacagaaaatgtgactctagtgtttgcttacttaacaacgacatatcctgccatcaggaagcttgtcactagcgcatctgccagtgagcactggccaagcggtctactgatgagggaaaaagttacagataatccaggcaatgaggattcattaaactaacagagaggattcttaagggactgccacttagctgagtagcagacgacagatattaaaagtgtgttctgaatcagcctttctggtaccagcgcacatcttgacaagtatgattatgtgtgtgcatgcatgtgtggtaaaagattagattcacgagaaatctgaaaactctaggactttctttctttgagttattcattaacctcatatggctgatatgagtcctcagcccctctgacactgaaactgtctgtattagtttgctagggctgccataacaaaataccacagactgggtagcataaacaacagaaattcattttctcatggttctggaagatgaaagtccaagaccaatgcgccagcatctatggtttcttctgcggcctctccttgaattgtagatgactgccttcttgtgttctcacacgttccttcctctgcacatgtgcatgtgtgcgtatgcatctcttcttataaagccaccagtcatatcggattagggcccaccagtatgaactcattttaccttaaatacctgtttaaagatcttgtttccagtcacattctgaggtactggggattaggacttcaacatatgaatctaagggggacacaatttattccttaataccatacattccatgaacacatagagttatacaaaggattataagagtgattaactgggactattcaggctcaaactgttaagtctttaaagataaaggcaaaaactcatagtatttttgttttgttttgttttttatcagtggcaaatgtgtaggcaggagcatccatagccygggctgttctctggtggttccactgatcgaaacaactgagacaagtcaatgtgaggattataaatcaattgggagtgtattagaattaataaagaattggaattatagagtctaaacctgaaatatgtaactgattcattgctttttttttttttttttttttttggtcacgagaatcgccaggactggttctcttaacatatgtaaagaaacttgaatatgacagacttttattgccaacttaacagccattttcaa

SEQ ID NO: 688220 - DNA, 649 bp, Homo sapiens
gcagcggtgtgatctcggctcactgcaacctccacctcccgggttcaagtgactctcctgcctcagcctccaaagtagctgggactacaagttcatgccaccatgccaggctaattttttgtatttttagtacagatggggtttcaacgtgttagccgggatggtctagatctctggacctcgtggtctgcccacctcggcctcccaaagtgctgggattacaggtgtgagccaccgcgcccggctgactgattctttataagaataggaaagtgcagacacacagagacacagggagaaagcatgtgacaatcaggcagagattagtatgatgcagctgcaagttgaggaacatcaaggattaccagcaaccaccagaagccggggagaggcagggaaggattcttccctagagggagcatagccctgtcagtgacttgatttcagtcttttagcccctaaaacagtcagagaataatttttacttttttaaagacaccaagtttgtagtactttatcatggaagccccagaaaactaatacaccaaggcactcctctggtaatggtagggtgagcaatggacagaatttgtgtgcttgatgatgytagtgagtaagggataaaacaacaatacctctgttcttttta

SEQ ID NO: 688221 - DNA, 649 bp, Homo sapiens
gcagcggtgtgatctcggctcactgcaacctccacctcccgggttcaagtgactctcctgcctcagcctccaaagtagctgggactacaagttcatgccaccatgccaggctaattttttgtatttttagtacagatggggtttcaacgtgttagccgggatggtctagatctctggacctcgtggtctgcccacctcggcctcccaaagtgctgggattacaggtgtgagccaccgcgcccggctgactgattctttataagaataggaaagtgcagacacacagagacacagggagaaagcatgtgacaatcaggcagagattagtatgatgcagctgcaagttgaggaacatcaaggattaccagcaaccaccagaagccggggagaggcagggaaggattcttccctagagggagcatagccctgtcagtgacttgatttcagtcttttagcccctaaaacagtcagagaataatttttacttttttaaagacaccaagtttgtagtactttatcatggaagccccagaaaactaatacaccaaggcactcctctggtaatggtagggtgagcaatggacagaatttgtgtgcttgatgatgttagtgagtaarggataaaacaacaatacctctgttcttttta

SEQ ID NO: 688222 - DNA, 595 bp, Homo sapiens
acacatgaagacatgctagtcttctgactgtcatttaacttaaaattttaaatgtcatgaattcagagagctacttctataatagaagggtatgagtatatctttgaaaatgtgtacaatcttaggctattagagtcaggggctgggggaaacaggcaatttagatgagatggctaagacttctaaaggttrgtagtccaatctaaagtgtacatcattctgcccctgtgccgtcctcactgggcagagtacagagtgtaaggggtgaagcctctggatgatttgtcccccatcaaggccataggcatgaattggagatcaggtacagtactttagttaagcaaggtatgacaggcaaaatgaaagaaggacccttgctgtaggggaatttgggagctaggtgagactctaaaacgagatctaaagacaataataacacgaaagataatccagttgaataatctaggaatacataacaattgaaaatgtgttggaaattctgtaagagatccagcagaattacattgtattgttgattataatgcagaagtcccaagatcaaatttgatgaagtaccaatgtgatgaactgattc

SEQ ID NO: 688223 - DNA, 595 bp, Homo sapiens
acacatgaagacatgctagtcttctgactgtcatttaacttaaaattttaaatgtcatgaattcagagagctacttctataatagaagggtatgagtatatctttgaaaatgtgtacaatcttaggctattagagtcaggggctgggggaaacaggcaatttagatgagatggctaagacttctaaaggttagtagtccaatctaaagtgtacatcattctgcccctgtgccgtcctcactgggcagagtacagagtgtaaggggtgaagcctctggatgatttgtcccccatcaaggccataggcatgaattggagatcaggtacagtactttagttaagcaargtatgacaggcaaaatgaaagaaggacccttgctgtaggggaatttgggagctaggtgagactctaaaacgagatctaaagacaataataacacgaaagataatccagttgaataatctaggaatacataacaattgaaaatgtgttggaaattctgtaagagatccagcagaattacattgtattgttgattataatgcagaagtcccaagatcaaatttgatgaagtaccaatgtgatgaactgattc

SEQ ID NO: 688224 - DNA, 1482 bp, Homo sapiens
  misc_feature 521, 522, 523, 524, 525, 526, 527, 528, 529, 530, 531, 532,533, 534, 535, 536, 537, 538, 539, 540, 541, 542, 543, 544,545, 546, 547, 548, 549, 550, 551, 552, 553, 554, 555, 556,557, 558, 559, 560, 561, 562, 563, 564, 565, 566, 567: n = A,T,C or G
  misc_feature 568, 569, 570, 571, 572, 573, 574, 575, 576, 577, 578, 579,580, 581, 582, 583, 584, 585, 586, 587, 588, 589, 590, 591,592, 593, 594, 595, 596, 597, 598, 599, 600, 601, 602, 603,604, 605, 606, 607, 608, 609, 610, 611, 612, 613, 614: n = A,T,C or G
  misc_feature 615, 616, 617, 618, 619, 620: n = A,T,C or G
gaggggaggggaggggaggggaagggagaagggaaaggaaagggaaaaagaaaagggaaaggaaaggaaatcaggaagctttctgggtaaaataatttgccatattgccggaaatagaagtagaaaatggtagcatgatgccacaaatttagcaggatgtgttaaaactaagcatcccttttttcaccaaactgatgaaaaaaagaaaaagaaaagcaaactaagcatttcaaatctaaagaaaaactactacaattattcagggatttataaagtcacacaacactaatatagaatcttacaaagtatcatgaaatatagtaataaaaatgtagaagcttctttagagatttatcattttacagcaagggtaaaagcacagccacgtccattggggcacacttgttctttctgtcacggtaaaaatggctgacacaatacaacagacagagcatatgatgaagcctaaatgcattcctttgtcagcacatatgttagatgatatatagaccacatatagnnnnnnnnnnnnnnnnnnnnnnnnnnnnnnnnnnnnnnnnnnnnnnnnnnnnnnnnnnnnnnnnnnnnnnnnnnnnnnnnnnnnnnnnnnnnnnnnnnnntttttataggtacatcattgttttctggcataggagcacctttttctaatttgtctccatatacagggtgctctttttaactgttcaaaaaggaacactgcagcttatcagcagccctgcaagagtgatagcttgcttttggcaatacatctacttctcctctaaattagcaattataggatgcaaggatgttacttccttgtgacataaatatttgtctgatgggtaaagacataaactcttcagtgggatagatgtgggttcacatcctgtctgcctttccaagctctgtgacggcaggttggttacccggtctccctgcatatcagtttccttatctctgaaatgggggcggcggtcggacctatttttcagggtgttgccaagaattaaaggagattgtgcgtgttagcacctaaacctagtgcctggcacagatttagtgcacaaacaatggctgctgttgttaacaatgatcattaacattttcgagtgtatacactggactcattttttttccctttatggctcatcccattttataagtacttattttcatcaggcctttactttctggctacagaacaagagacttggaggaaaatgaaaatatcattcyagaaaggcaggaggcttggttccattagtcatggttggaatgtgcatggtgattggtgcaaatgaaccatttatttccaaactctgccagcaggccagttgattttgcaggtgctgtgattttagtggcgtcaatctttagagtttttagtctcaagtacagccttgcttcctaggctgcggtgagaagtctgggggctggatgacacagttgttgtgaggggtacgtgaaaaaataactcga

SEQ ID NO: 688225 - DNA, 1482 bp, Homo sapiens
  misc_feature 521, 522, 523, 524, 525, 526, 527, 528, 529, 530, 531, 532,533, 534, 535, 536, 537, 538, 539, 540, 541, 542, 543, 544,545, 546, 547, 548, 549, 550, 551, 552, 553, 554, 555, 556,557, 558, 559, 560, 561, 562, 563, 564, 565, 566, 567: n = A,T,C or G
  misc_feature 568, 569, 570, 571, 572, 573, 574, 575, 576, 577, 578, 579,580, 581, 582, 583, 584, 585, 586, 587, 588, 589, 590, 591,592, 593, 594, 595, 596, 597, 598, 599, 600, 601, 602, 603,604, 605, 606, 607, 608, 609, 610, 611, 612, 613, 614: n = A,T,C or G
  misc_feature 615, 616, 617, 618, 619, 620: n = A,T,C or G
gaggggaggggaggggaggggaagggagaagggaaaggaaagggaaaaagaaaagggaaaggaaaggaaatcaggaagctttctgggtaaaataatttgccatattgccggaaatagaagtagaaaatggtagcatgatgccacaaatttagcaggatgtgttaaaactaagcatcccttttttcaccaaactgatgaaaaaaagaaaaagaaaagcaaactaagcatttcaaatctaaagaaaaactactacaattattcagggatttataaagtcacacaacactaatatagaatcttacaaagtatcatgaaatatagtaataaaaatgtagaagcttctttagagatttatcattttacagcaagggtaaaagcacagccacgtccattggggcacacttgttctttctgtcacggtaaaaatggctgacacaatacaacagacagagcatatgatgaagcctaaatgcattcctttgtcagcacatatgttagatgatatatagaccacatatagnnnnnnnnnnnnnnnnnnnnnnnnnnnnnnnnnnnnnnnnnnnnnnnnnnnnnnnnnnnnnnnnnnnnnnnnnnnnnnnnnnnnnnnnnnnnnnnnnnnntttttataggtacatcattgttttctggcataggagcacctttttctaatttgtctccatatacagggtgctctttttaactgttcaaaaaggaacactgcagcttatcagcagccctgcaagagtgatagcttgcttttggcaatacatctacttctcctctaaattagcaattataggatgcaaggatgttacttccttgtgacataaatatttgtctgatgggtaaagacataaactcttcagtgggatagatgtgggttcacatcctgtctgcctttccaagctctgtgacggcaggttggttacccggtctccctgcatatcagtttccttatctctgaaatgggggcggcggtcggacctatttttcagggtgttgccaagaattaaaggagattgtgcgtgttagcacctaaacctagtgcctggcacagatttagtgcacaaacaatggctgctgttgttaacaatgatcattaacattttcgagtgtatacactggactcattttttttccctttatggctcatcccattttataagtacttattttcatcaggcctttactttctggctacagaacaagagacttggaggaaaatgaaaatatcattccagaaaggcaggaggcttggttccattagtcatggttggaatgtgcatrgtgattggtgcaaatgaaccatttatttccaaactctgccagcaggccagttgattttgcaggtgctgtgattttagtggcgtcaatctttagagtttttagtctcaagtacagccttgcttcctaggctgcggtgagaagtctgggggctggatgacacagttgttgtgaggggtacgtgaaaaaataactcga

SEQ ID NO: 688226 - DNA, 588 bp, Homo sapiens
caaaacagagaaattctttccatataagatttgtcttgggtttcaatgacagcatatcattccataatattcttttatttatgcatttatgtagatattttaaattaatttaaataatattttgcatactgaaactgggattacaaagaattcagagagcagcccagcactgtgggttcagtcgtacatatctgaaacaactgaatcaatataattttttattatacaaacaaaataaatgttaccaagacatatgtattagacatacttgtgaactcatggatttctttgtctggtccgtatcacacagaggcatgaatctgtacctcactcactttattgsacactataaaaatgtcagtattgaatatgtgcttgaccagattaaagccaagtcatttgaaaaacaatttgttaaggaaaatgaagccaattattgattatccaaggttatgtgaaatagggagaatatgaattatctgattaacctattacctaatggatttgataaatgtcttcactttcaagcagatgtttgataagtttcttttaaacacagccattttaagttacatatatacgtatacg

SEQ ID NO: 688227 - DNA, 662 bp, Homo sapiens
tttctttttcaaatgcttctggtcttactttccccactccttgaaagcacyggggtgggggtggagggcatggggaaagacttccttaaagaaaatgcaaagaaaagatacattttaagaatacacaggacagaagctgcagacaacagaaagattagtttcagaaggcactggcacattgtgaaaaacagaaccaggagttggcttagaggctgcagcagctctgggacctcagcagcggactttcttgaacttcactctgctgctctcctggttcactccccagctctccaaggtctgcttttccctgcacacttattttttctcttccagttggcttgccttcctcccccctcctcgttgtctttttgtcattgttgtttttggcttcacagcttctgcttagtcacagttcccgttcccagcatgttcctgacccttcatggcctcaatgctactgcacagcctcattcagcatcactgtttccccattcacctgccacaaaggggaagcctggtttgcccagctcctctttctctcaccacaagacaccatagaccaataggaagcctatgctttagctgcatttgagtcacgtagctatttctggtccaatcagttgcaattgggtcaggcaaacctgtagcttgcatcagactca

SEQ ID NO: 688228 - DNA, 662 bp, Homo sapiens
tttctttttcaaatgcttctggtcttactttccccactccttgaaagcactggggtgggggtggagggcatggggaaagacttccttaaagaaaatgcaaagaaaagatacattttaagaatacacaggacagaagctgcagacaacagaaagattagtttcagaaggcactggcacrttgtgaaaaacagaaccaggagttggcttagaggctgcagcagctctgggacctcagcagcggactttcttgaacttcactctgctgctctcctggttcactccccagctctccaaggtctgcttttccctgcacacttattttttctcttccagttggcttgccttcctcccccctcctcgttgtctttttgtcattgttgtttttggcttcacagcttctgcttagtcacagttcccgttcccagcatgttcctgacccttcatggcctcaatgctactgcacagcctcattcagcatcactgtttccccattcacctgccacaaaggggaagcctggtttgcccagctcctctttctctcaccacaagacaccatagaccaataggaagcctatgctttagctgcatttgagtcacgtagctatttctggtccaatcagttgcaattgggtcaggcaaacctgtagcttgcatcagactca

SEQ ID NO: 688229 - DNA, 591 bp, Homo sapiens
tcagtacttgctgcagaccagtaataaacaacttataggccagcacaatggcccacacttggagaagctcttgttgagagagtatgtaggaaggttccatcttttttacagtgtaggggaaaggttgcctaaaagtcgtaaagccctctacccttctcattccctccaagggttaggacccatatacatagagtctatcctatgcaactagtgtgtagaaagatattgtttataaacatgaaatcgagcttgaagtttcttggattctcttggaatctttcataagaacaaaaagtggtttcaccatccagagaacctttattttaagttaccgattacaatccttctggagaacctgattctttttttttcatagcctaatttccattaccttaaatwaccttacccaggacaaatggcttaggtctgagcattgaagcatcagtttagtggccacttaaatgaaggaagtgggaatgatttaagtcagcatgtgttttccaaacatgcaatgtaagaaggctgcaaacaagtaagtgttatttaaaatgtaaagagatctgtgtagaagccaggcactttgaaatggaa

SEQ ID NO: 688230 - DNA, 639 bp, Homo sapiens
ttttattacactacatctttcaattgtattttaaatatatactgttgtcagagagggctatttgtcttattggctaatctgtagctttgtgcaaagacatatttactatctgggtctggattgtgatacgtaagaatattagaaaggattatgtatgtagtttgcatttcttgtattaaaaatgatgagaaacaagatggctttatagatcttgtaactgcctaaatgctattatgttatgtaagggagaatagatttatatagtataggaccttgttaggaatattaggctgtggtaataagtaacatccaaatggcacttcagtttataatgtactttcatgagcatcataatcaactgctaacatttattgaacacatccttgggtcrgattctgtacgaagtgtttatatgcataataactcgagcttctatgcttcataactctattaggtaggcaccattactatcccgattttgctaatgaggaaaccaatgtgcataccaggttaaaaaacttgttcaaggtcacaaattagcatcacaacttgaaccttcgttgatttgacccagagctgtaaaccatagttgcaatgcctatactataaccagaaagtagaaagcagaggagtgaatcc

SEQ ID NO: 688231 - DNA, 639 bp, Homo sapiens
ttttattacactacatctttcaattgtattttaaatatatactgttgtcagagagggctatttgtcttattggctaatctgtagctttgtgcaaagacatatttactatctgggtctggattgtgatacgtaagaatattagaaaggattatgtatgtagtttgcatttcttgtattaaaaatgatgagaaacaagatggctttatagatcttgtaactgcctaaatgctattatgttatgtaagggagaatagatttatatagtataggaccttgttaggaatattaggctgtggtaataagtaacatccaaatggcacttcagtttataatgtactttcatgagcatcataatcaactgctaacatttattgaacacatccttgggtcagattctgtacgaagtgtttatatgcataataactcgagcttctatgcttcataactctattaggtaggcaccattactatcccsattttgctaatgaggaaaccaatgtgcataccaggttaaaaaacttgttcaaggtcacaaattagcatcacaacttgaaccttcgttgatttgacccagagctgtaaaccatagttgcaatgcctatactataaccagaaagtagaaagcagaggagtgaatcc

SEQ ID NO: 688232 - DNA, 2495 bp, Homo sapiens
  misc_feature 2473: n = A,T,C or G
ttccctatgactttatactcaccattaatacaacccattttatatgcatggtagttttattttagagcacggtggtgatgcagacaccattatattgcagagaatgaggctaagacaaaaaaaaaaacaatttagaccttattaatgtccaagcaagagatgaataagacctgaatgacaacaatagggtttgtggaaacacttcagaaaaaatattaaaaatataagtcagtagactggaaattccataagggcaaagattgtattctcttgatttttgtattcttaggagtatctgcacaaggtttttcactaacccatatttagaaatattggttaaatagaaataattatttagataatttattgtatttctattctctttttcycaaagaaaagtattttatggaataaccaatacaacctattgaaattttcatagttaggagctaggttgctttgactttaattttccttgtatctaggagaatacttcaaatatatatatttgaatataatatactaattgaaaataatatactaatatatacaaatgtaatatatatttgaatataatatactatttccataatatacaaagcaaacaactttatatgatgaataacataaattattataataaaaatgtttagaattatgtaaggtgctatatggaaagcaaccaaagagattgaaaataatatgaacgtcatagtaaaaaaattgagtttgcatccagtctaaaacatatgcattaaagttatttaatctctctgacaattggcttcattatctgtaaaaaagttataatataggcattaaattcctaaccaagttaatatggttctaaaatgagatatagtgcaaacattgtactactatattattggtagtgacaggagacagacaaattcttagggagacagggataggtccctggtaaaacccgaccttcaagccaagatagtataaagcctgaaaaatgagctgtccatttcagatagagtccacaaccggagtgagaacttctatccctgtcttacccactctcactgtattagttccttctgaattatgccttttaacaaattgaatggtgctttttccaagaccgactatggaccaatcagcatacactcccccataaaaatcctggattcagtctcaaagacactgacccacttttgggtcccctctagttgccaagagttttctttctgttgttcggtaaaattctgctctgccttactcactctccagtggtcttgtaccttattcctcttggccacaggacaaaaacctggaactcaccgaactgtaggagtgaaagagctgtaatgctcctgctctctgagcggtgggtggtgggagctgtagccctctcttctgctcgccaaactacaggagtgaaaaagccacaacattatatcagcaaaataatctgaatccttgaaatacgacagaatgataacactggggggaatatcatataggagaaagaaatccacccaagagctatcttgggcaatgatcttagttcaactgactattattaattaattatatattaacacataaattatgtgttaatttgattttgtttaaaaagatacaaataacttcagtccagttgaacaaatgcccttaaaattgatggcttcattggccattaaccagttttatactgaaaccagtaatctaccctaatactgtgtatgcatgggtgtgtgtgtacgtgcatagtgtatgtgacttcacaatatgctctttaaacaggtcataaaatcctgttggttcccttgctaattaatgaattgaccagaaactttgaagtgggttcatattatatacacattggagtcatggcttttaaacttttgaaaacttatagtttaacaataaaatggagtcaggctgcttgtattcaaatccctattctatcattttataactggctgacatttagtaaattatttaagcttttttaattcacctgttgttatacttaaaatgaggccaacatttctttgttgatatgacttttaaaggattaattattataatttttgtaaagttcttagaacagtacctggtaaatgagcaatcaataaatgaatgtttctccttctcctttgattttttcttcttcttcatcaccttatatgaagtttatctaaaacagtttaaaaattgttcatttaactatattgtctttagtcagaagacctttccatagatgttaataataatatattcatgtttttatttatgaattctttcttttgtcccaccaagactattaattatgtacctcctgttgattaaataaaatagaattgttacaagttttattcccttgactgttggttgtaattgctggaggaccataactactttgcttctagagtgtgatcttttgtccagcaaacaatctcttcgacactggcacatacttatatctcaaattatagtntatcaggaaataccatgcatac

SEQ ID NO: 688233 - DNA, 2495 bp, Homo sapiens
  misc_feature 2473: n = A,T,C or G
ttccctatgactttatactcaccattaatacaacccattttatatgcatggtagttttattttagagcacggtggtgatgcagacaccattatattgcagagaatgaggctaagacaaaaaaaaaaacaatttagaccttattaatgtccaagcaagagatgaataagacctgaatgacaacaatagggtttgtggaaacacttcagaaaaaatattaaaaatataagtcagtagactggaaattccataagggcaaagattgtattctcttgatttttgtattcttaggagtatctgcacaaggtttttcactaacccatatttagaaatattggttaaatagaaataattatttagataatttattgtatttctattctctttttcccaaagaaaagtattttatggaataaccaatacaacctattgaaattttcatagttaggagctaggttgctttgactttaattttccttgtatctaggagaatacttcaaatatatatatttgaatataatatactaattgaaaataatatactaatatatacaaatgtaatatatatttgaatataatatactatttccataatatacaaagcaaacaactttatatgatgaataacataaattattataataaaaatgtttagaattatgtaaggtgctatatggaaagcaaccaaagagattgaaaataatatgaacgtcataktaaaaaaattgagtttgcatccagtctaaaacatatgcattaaagttatttaatctctctgacaattggcttcattatctgtaaaaaagttataatataggcattaaattcctaaccaagttaatatggttctaaaatgagatatagtgcaaacattgtactactatattattggtagtgacaggagacagacaaattcttagggagacagggataggtccctggtaaaacccgaccttcaagccaagatagtataaagcctgaaaaatgagctgtccatttcagatagagtccacaaccggagtgagaacttctatccctgtcttacccactctcactgtattagttccttctgaattatgccttttaacaaattgaatggtgctttttccaagaccgactatggaccaatcagcatacactcccccataaaaatcctggattcagtctcaaagacactgacccacttttgggtcccctctagttgccaagagttttctttctgttgttcggtaaaattctgctctgccttactcactctccagtggtcttgtaccttattcctcttggccacaggacaaaaacctggaactcaccgaactgtaggagtgaaagagctgtaatgctcctgctctctgagcggtgggtggtgggagctgtagccctctcttctgctcgccaaactacaggagtgaaaaagccacaacattatatcagcaaaataatctgaatccttgaaatacgacagaatgataacactggggggaatatcatataggagaaagaaatccacccaagagctatcttgggcaatgatcttagttcaactgactattattaattaattatatattaacacataaattatgtgttaatttgattttgtttaaaaagatacaaataacttcagtccagttgaacaaatgcccttaaaattgatggcttcattggccattaaccagttttatactgaaaccagtaatctaccctaatactgtgtatgcatgggtgtgtgtgtacgtgcatagtgtatgtgacttcacaatatgctctttaaacaggtcataaaatcctgttggttcccttgctaattaatgaattgaccagaaactttgaagtgggttcatattatatacacattggagtcatggcttttaaacttttgaaaacttatagtttaacaataaaatggagtcaggctgcttgtattcaaatccctattctatcattttataactggctgacatttagtaaattatttaagcttttttaattcacctgttgttatacttaaaatgaggccaacatttctttgttgatatgacttttaaaggattaattattataatttttgtaaagttcttagaacagtacctggtaaatgagcaatcaataaatgaatgtttctccttctcctttgattttttcttcttcttcatcaccttatatgaagtttatctaaaacagtttaaaaattgttcatttaactatattgtctttagtcagaagacctttccatagatgttaataataatatattcatgtttttatttatgaattctttcttttgtcccaccaagactattaattatgtacctcctgttgattaaataaaatagaattgttacaagttttattcccttgactgttggttgtaattgctggaggaccataactactttgcttctagagtgtgatcttttgtccagcaaacaatctcttcgacactggcacatacttatatctcaaattatagtntatcaggaaataccatgcatac

SEQ ID NO: 688234 - DNA, 2495 bp, Homo sapiens
  misc_feature 2473: n = A,T,C or G
ttccctatgactttatactcaccattaatacaacccattttatatgcatggtagttttattttagagcacggtggtgatgcagacaccattatattgcagagaatgaggctaagacaaaaaaaaaaacaatttagaccttattaatgtccaagcaagagatgaataagacctgaatgacaacaatagggtttgtggaaacacttcagaaaaaatattaaaaatataagtcagtagactggaaattccataagggcaaagattgtattctcttgatttttgtattcttaggagtatctgcacaaggtttttcactaacccatatttagaaatattggttaaatagaaataattatttagataatttattgtatttctattctctttttcccaaagaaaagtattttatggaataaccaatacaacctattgaaattttcatagttaggagctaggttgctttgactttaattttccttgtatctaggagaatacttcaaatatatatatttgaatataatatactaattgaaaataatatactaatatatacaaatgtaatatatatttgaatataatatactatttccataatatacaaagcaaacaactttatatgatgaataacataaattattataataaaaatgtttagaattatgtaaggtgctatatggaaagcaaccaaagagattgaaaataatatgaacgtcatagtaaaaaaattgagtttgcatccagtctaaaacatatgcattaaagttatttaatctctctgacaattggcttcattatctgtaaaaaagttataatataggcattaaattcctaaccaagttaatatggttctaaaatgagatatagtgcaaacattgtactactatattattggtagtgacaggagacagacaaattcttagggagacagggataggtccctggtaaaacccgaccttcaagccaagatagtataaagcctgaaaaatgagctgtccatttcagatagagtccacaaccggagtgagaacttctatccctgtcttacccactctcactgtattagttccttctgaattatgccttttaacaaattgaatggtgctttttccaagaccgactatggaccaatcagcatacactcccccataaaaatcctggattcagtctcaaagacactgacccacttttgggtcccctctagttgccaagagttttctttctgttgttcggtaaaattctgctctgccttactcactctccagtggtcttgtaccttattcctcttggccacaggacaaaaacctggaactcaccgaactgtaggagtgaaagagctgtaatgctcctgctctctgagcggtgggtggtgggagctgtagccctctcttctgctcgccaaactacaggagtgaaaaagccacaacattatatcagcaaaataatctgaatccttgaaatacgacagaatgataacactggggggaatatcatataggagaaagaaatccacccaagagctatcttgggcaatgatcttagttcaactgactattattaattaattatatattaacacataaattatgtgttaatttgattttgtttaaaaagatacaaataacttcagtccagttgaacaaatgcccttaaaattgatggcttcattggccattaaccagttttatactgaaaccagtaatctaccctaatactgtgtatgcatgggtgtgtgtgtaygtgcatagtgtatgtgacttcacaatatgctctttaaacaggtcataaaatcctgttggttcccttgctaattaatgaattgaccagaaactttgaagtgggttcatattatatacacattggagtcatggcttttaaacttttgaaaacttatagtttaacaataaaatggagtcaggctgcttgtattcaaatccctattctatcattttataactggctgacatttagtaaattatttaagcttttttaattcacctgttgttatacttaaaatgaggccaacatttctttgttgatatgacttttaaaggattaattattataatttttgtaaagttcttagaacagtacctggtaaatgagcaatcaataaatgaatgtttctccttctcctttgattttttcttcttcttcatcaccttatatgaagtttatctaaaacagtttaaaaattgttcatttaactatattgtctttagtcagaagacctttccatagatgttaataataatatattcatgtttttatttatgaattctttcttttgtcccaccaagactattaattatgtacctcctgttgattaaataaaatagaattgttacaagttttattcccttgactgttggttgtaattgctggaggaccataactactttgcttctagagtgtgatcttttgtccagcaaacaatctcttcgacactggcacatacttatatctcaaattatagtntatcaggaaataccatgcatac

SEQ ID NO: 688235 - DNA, 2495 bp, Homo sapiens
  misc_feature 2473: n = A,T,C or G
ttccctatgactttatactcaccattaatacaacccattttatatgcatggtagttttattttagagcacggtggtgatgcagacaccattatattgcagagaatgaggctaagacaaaaaaaaaaacaatttagaccttattaatgtccaagcaagagatgaataagacctgaatgacaacaatagggtttgtggaaacacttcagaaaaaatattaaaaatataagtcagtagactggaaattccataagggcaaagattgtattctcttgatttttgtattcttaggagtatctgcacaaggtttttcactaacccatatttagaaatattggttaaatagaaataattatttagataatttattgtatttctattctctttttcccaaagaaaagtattttatggaataaccaatacaacctattgaaattttcatagttaggagctaggttgctttgactttaattttccttgtatctaggagaatacttcaaatatatatatttgaatataatatactaattgaaaataatatactaatatatacaaatgtaatatatatttgaatataatatactatttccataatatacaaagcaaacaactttatatgatgaataacataaattattataataaaaatgtttagaattatgtaaggtgctatatggaaagcaaccaaagagattgaaaataatatgaacgtcatagtaaaaaaattgagtttgcatccagtctaaaacatatgcattaaagttatttaatctctctgacaattggcttcattatctgtaaaaaagttataatataggcattaaattcctaaccaagttaatatggttctaaaatgagatatagtgcaaacattgtactactatattattggtagtgacaggagacagacaaattcttagggagacagggataggtccctggtaaaacccgaccttcaagccaagatagtataaagcctgaaaaatgagctgtccatttcagatagagtccacaaccggagtgagaacttctatccctgtcttacccactctcactgtattagttccttctgaattatgccttttaacaaattgaatggtgctttttccaagaccgactatggaccaatcagcatacactcccccataaaaatcctggattcagtctcaaagacactgacccacttttgggtcccctctagttgccaagagttttctttctgttgttcggtaaaattctgctctgccttactcactctccagtggtcttgtaccttattcctcttggccacaggacaaaaacctggaactcaccgaactgtaggagtgaaagagctgtaatgctcctgctctctgagcggtgggtggtgggagctgtagccctctcttctgctcgccaaactacaggagtgaaaaagccacaacattatatcagcaaaataatctgaatccttgaaatacgacagaatgataacactggggggaatatcatataggagaaagaaatccacccaagagctatcttgggcaatgatcttagttcaactgactattattaattaattatatattaacacataaattatgtgttaatttgattttgtttaaaaagatacaaataacttcagtccagttgaacaaatgcccttaaaattgatggcttcattggccattaaccagttttatactgaaaccagtaatctaccctaatactgtgtatgcatgggtgtgtgtgtacgtgcatagtgtatgtgacttcacaatatgctctttaaacaggtcataaaatcctgttggttcccttgctaattaatgaattgaccagaaactttgaagtgggttcatattatatacacattggagtcatggcttttaaacttttgaaaacttatagtttaacaataaaatggagtcaggctgcttgtattcaaatccctattctatcattttataactggctgacatttagtaaattatttaagcttttttaattcacctgttkttatacttaaaatgaggccaacatttctttgttgatatgacttttaaaggattaattattataatttttgtaaagttcttagaacagtacctggtaaatgagcaatcaataaatgaatgtttctccttctcctttgattttttcttcttcttcatcaccttatatgaagtttatctaaaacagtttaaaaattgttcatttaactatattgtctttagtcagaagacctttccatagatgttaataataatatattcatgtttttatttatgaattctttcttttgtcccaccaagactattaattatgtacctcctgttgattaaataaaatagaattgttacaagttttattcccttgactgttggttgtaattgctggaggaccataactactttgcttctagagtgtgatcttttgtccagcaaacaatctcttcgacactggcacatacttatatctcaaattatagtntatcaggaaataccatgcatac

SEQ ID NO: 688236 - DNA, 2478 bp, Homo sapiens
tgttcaaatgcaggtttcatacaagaaaaattttaaaaattactatttaaaaacacgacttgaaaagtaaaacaaaaattaatggaataagggatggacatggctaaatattagactaaaatgatatattggatgtgaaataaaacataaaaagacaaagaattaaatagaatggaagattaaagaaacggagagatacagaaagtcagagatgaaagaaataataaaaagaaaacacaggacaatctttctttacttgaataactttagagttcgggttgaaagttccaccaagtctcagtgagaatgatcaaaaaaccaaaccaaacaaaccaaaacaaaacaaaatctcatatgtgacatatacaggtaaaatttcttagctaaatggaaaaataaaaataaaaatctaacaaagaataagcaagttatgcattttttaaaaggtcacattatattggcagggcacatttcaactgtaacaatgtgctagaaattcatgaagacaaattcttaaaagattccaagagaaaatgagtgatgtttctaaaattctcccaatgacttaaggagttgcaaacaaggggtttgtttctagaatcaattcaccacaacaggttgcatacatttgatttttcaagaagtttgcaaattggaaaagaaaaattagaaagactaccagcaagaatcagtaatcaaagttatcaataataacttaatgttttggcttagaagrcaataccaaaagtactgcataatcaaaatgtacagtaatacatgctcattctattatattttggatctgtcaagaaaacttaaatgagttttgtgcattctttgtcaatgcattatatctctctgtatatagcaatctgaaaattttccatcaattatggttagacttctaaatcatttgaaatttcaaagtgattagtaaaatggtgagtgaaaatggtagataaatgaagtatttttggaataaatttaaacacgcttaaaatgctataacaagtttataaacttacttatctggaattgactaaatagaaaagtcctagatacagcatcaattttataaagtcaagtcaataaactagaaggacaatttttattattttttactgcattgttttattttcttagtgtacatgctatcagcaaagtctgaaggcatggtttgcacatgaaaagggttttagcaactcataaataatataaccagagataagaggggaaagtaacattatttgtttctttaatttgtgtttagcgggacaattttattaggactttctccttgtcactttatgaatgactaaaaaaagaacaaagaaaaaggagttgtgcttctgaaacaatagtttggaaacaaaggtaacatttgaacaacaaagctaggcaatattgaaaaaaattaaaaatcaacatctaagaaatagttggcagtaaatatcaaaaattttactatgaagtacactccttactgactttggaggaaaaaaagtattctgtgacatttctctctattctttaaaaattgtaaacacatcctcagtgaaatatctacaaataacaaaaagctgttaattctttccgtgtagagttgtgtgactgtctgttatgaacacagtctatacttgcagtggaggtgggaactggcttctcatttgggttctttttgtggccagtggcagtacagctcattctctctgaaagctacttttagatagggtaacatttccttaaggcaaaactattgcttgcagctcattgaaacctttcctactggctgagctaaatgggcagatgtgttaggtatatttatttttagtgataatataaaagaatgattcacgtttacatggtgatttgcagattactgtggtctactttcacatttaaacctacttccttgacataatatgcaggtgtagtaattgcttaactgatttctgagataaaacactaactccttgtgggagaaattatgcatattgtctatatcacagcactgtattctctgcatctagtcattcattcatttaattattttattatttattctattcttatcaagtacactgttaagctctgagaatataacttggaagaagatgagcacaatcccttccttcgtgattttaacattcaagtagagattatagatttttaagaaaaacatttacaagtttcagatgaatgatacatgaactaacattctgagagtcgaaggtatttggccaggctaaatttctcataaggtgactcttggaactatggtaaataactttaaaatctacattctctaaatcaagggtcgcaaccctgggccatggacaagtaccagtctgtgacctgtcaggaactaggacacacagcaggaggtgagcgtgggtgggttagcagtcagggaacctcatctgtatttacagctgctccccatcattctcattactgcctgagctccaccttctgtca

SEQ ID NO: 688237 - DNA, 2478 bp, Homo sapiens
tgttcaaatgcaggtttcatacaagaaaaattttaaaaattactatttaaaaacacgacttgaaaagtaaaacaaaaattaatggaataagggatggacatggctaaatattagactaaaatgatatattggatgtgaaataaaacataaaaagacaaagaattaaatagaatggaagattaaagaaacggagagatacagaaagtcagagatgaaagaaataataaaaagaaaacacaggacaatctttctttacttgaataactttagagttcgggttgaaagttccaccaagtctcagtgagaatgatcaaaaaaccaaaccaaacaaaccaaaacaaaacaaaatctcatatgtgacatatacaggtaaaatttcttagctaaatggaaaaataaaaataaaaatctaacaaagaataagcaagttatgcattttttaaaaggtcacattatattggcagggcacatttcaactgtaacaatgtgctagaaattcatgaagacaaattcttaaaagattccaagagaaaatgagtgatgtttctaaaattctcccaatgacttaaggagttgcaaacaaggggtttgtttctagaatcaattcaccacaacaggttgcatacatttgatttttcaagaagtttgcaaattggaaaagaaaaattagaaagactaccagcaagaatcagtaatcaaagttatcaataataacttaatgttttggcttagaaggcaataccaaaagtactgcataatcaaaatgtacagtaatacatgctcattctattatattttggatctgtcaagaaaacttaaatgagttttgtgcattctttgtcaatgcattatatctctctgtatatagcaatctgaaaattttccatcaattatggttagacttctaaatcatttgaaatttcaaagtgattagtaaaatggtgagtgaaaatggtagataaatgaagtatttttggaataaatttaaacacgcttaaaatgctataacaagtttataaacttacttatctggaattgactaaatagaaaagtcctagatacagcatcaattttataaagtcaagtcaataaactagaaggacmatttttattattttttactgcattgttttattttcttagtgtacatgctatcagcaaagtctgaaggcatggtttgcacatgaaaagggttttagcaactcataaataatataaccagagataagaggggaaagtaacattatttgtttctttaatttgtgtttagcgggacaattttattaggactttctccttgtcactttatgaatgactaaaaaaagaacaaagaaaaaggagttgtgcttctgaaacaatagtttggaaacaaaggtaacatttgaacaacaaagctaggcaatattgaaaaaaattaaaaatcaacatctaagaaatagttggcagtaaatatcaaaaattttactatgaagtacactccttactgactttggaggaaaaaaagtattctgtgacatttctctctattctttaaaaattgtaaacacatcctcagtgaaatatctacaaataacaaaaagctgttaattctttccgtgtagagttgtgtgactgtctgttatgaacacagtctatacttgcagtggaggtgggaactggcttctcatttgggttctttttgtggccagtggcagtacagctcattctctctgaaagctacttttagatagggtaacatttccttaaggcaaaactattgcttgcagctcattgaaacctttcctactggctgagctaaatgggcagatgtgttaggtatatttatttttagtgataatataaaagaatgattcacgtttacatggtgatttgcagattactgtggtctactttcacatttaaacctacttccttgacataatatgcaggtgtagtaattgcttaactgatttctgagataaaacactaactccttgtgggagaaattatgcatattgtctatatcacagcactgtattctctgcatctagtcattcattcatttaattattttattatttattctattcttatcaagtacactgttaagctctgagaatataacttggaagaagatgagcacaatcccttccttcgtgattttaacattcaagtagagattatagatttttaagaaaaacatttacaagtttcagatgaatgatacatgaactaacattctgagagtcgaaggtatttggccaggctaaatttctcataaggtgactcttggaactatggtaaataactttaaaatctacattctctaaatcaagggtcgcaaccctgggccatggacaagtaccagtctgtgacctgtcaggaactaggacacacagcaggaggtgagcgtgggtgggttagcagtcagggaacctcatctgtatttacagctgctccccatcattctcattactgcctgagctccaccttctgtca

SEQ ID NO: 688238 - DNA, 2478 bp, Homo sapiens
tgttcaaatgcaggtttcatacaagaaaaattttaaaaattactatttaaaaacacgacttgaaaagtaaaacaaaaattaatggaataagggatggacatggctaaatattagactaaaatgatatattggatgtgaaataaaacataaaaagacaaagaattaaatagaatggaagattaaagaaacggagagatacagaaagtcagagatgaaagaaataataaaaagaaaacacaggacaatctttctttacttgaataactttagagttcgggttgaaagttccaccaagtctcagtgagaatgatcaaaaaaccaaaccaaacaaaccaaaacaaaacaaaatctcatatgtgacatatacaggtaaaatttcttagctaaatggaaaaataaaaataaaaatctaacaaagaataagcaagttatgcattttttaaaaggtcacattatattggcagggcacatttcaactgtaacaatgtgctagaaattcatgaagacaaattcttaaaagattccaagagaaaatgagtgatgtttctaaaattctcccaatgacttaaggagttgcaaacaaggggtttgtttctagaatcaattcaccacaacaggttgcatacatttgatttttcaagaagtttgcaaattggaaaagaaaaattagaaagactaccagcaagaatcagtaatcaaagttatcaataataacttaatgttttggcttagaaggcaataccaaaagtactgcataatcaaaatgtacagtaatacatgctcattctattatattttggatctgtcaagaaaacttaaatgagttttgtgcattctttgtcaatgcattatatctctctgtatatagcaatctgaaaattttccatcaattatggttagacttctaaatcatttgaaatttcaaagtgattagtaaaatggtgagtgaaaatggtagataaatgaagtatttttggaataaatttaaacacgcttaaaatgctataacaagtttataaacttacttatctggaattgactaaatagaaaagtcctagatacagcatcaattttataaagtcaagtcaataaactagaaggacaatttttattattttttactgcattgttttattttcttagtgtacatgctatcagcaaagtctgaaggcatggtttgcacatgaaaagggttttagcaactcataaataatataaccagagataagaggggaaagtaacattatttgtttctttaatttgtgtttagcgggacaattttattaggactttctccttgtcactttatgaatgactaaaaaaagaacaaagaaaaaggagttgtgcttctgaaacaatagtttggaaacaaaggtaacatttgaacaacaaagctaggcaatattgaaaaaaattaaaaatcaacatctaagaaatagttggcagtaaatatcaaaaattttactatgaagtacactccttactgactttggaggaaaaaaagtattctgtgacatttctctctattctttaaaaattgtaaacacatcctcagtgaaatatctacaaataacaaaaagctgttaattctttccgtgtagagttgtgtgactgtctgttatgaacacagtctatacttgcagtggaggtgggaactggcttctcatttgggttctttttgtggccagtggcagtacagctcattctctctgaaagctacttttagatagggtaacatttccttaaggcaaaactattgcttgcagctcattgaaacctttcctactggctgagctaaatgggcagatgtgttaggtatatttatttttagtgataatataaaagaatgattcacgtttacatggtgatttgcagattactgtggtctactttcacatttaaacctacttccttgacataatatgcaggtgtagtaattgcttaactgatttctgagataaaacactaactccttgtgggagaaattatgcatattgtctatatcacagcactgtattctctgcatctagtcattcattcatttaattattttattattyattctattcttatcaagtacactgttaagctctgagaatataacttggaagaagatgagcacaatcccttccttcgtgattttaacattcaagtagagattatagatttttaagaaaaacatttacaagtttcagatgaatgatacatgaactaacattctgagagtcgaaggtatttggccaggctaaatttctcataaggtgactcttggaactatggtaaataactttaaaatctacattctctaaatcaagggtcgcaaccctgggccatggacaagtaccagtctgtgacctgtcaggaactaggacacacagcaggaggtgagcgtgggtgggttagcagtcagggaacctcatctgtatttacagctgctccccatcattctcattactgcctgagctccaccttctgtca

SEQ ID NO: 688239 - DNA, 2478 bp, Homo sapiens
tgttcaaatgcaggtttcatacaagaaaaattttaaaaattactatttaaaaacacgacttgaaaagtaaaacaaaaattaatggaataagggatggacatggctaaatattagactaaaatgatatattggatgtgaaataaaacataaaaagacaaagaattaaatagaatggaagattaaagaaacggagagatacagaaagtcagagatgaaagaaataataaaaagaaaacacaggacaatctttctttacttgaataactttagagttcgggttgaaagttccaccaagtctcagtgagaatgatcaaaaaaccaaaccaaacaaaccaaaacaaaacaaaatctcatatgtgacatatacaggtaaaatttcttagctaaatggaaaaataaaaataaaaatctaacaaagaataagcaagttatgcattttttaaaaggtcacattatattggcagggcacatttcaactgtaacaatgtgctagaaattcatgaagacaaattcttaaaagattccaagagaaaatgagtgatgtttctaaaattctcccaatgacttaaggagttgcaaacaaggggtttgtttctagaatcaattcaccacaacaggttgcatacatttgatttttcaagaagtttgcaaattggaaaagaaaaattagaaagactaccagcaagaatcagtaatcaaagttatcaataataacttaatgttttggcttagaaggcaataccaaaagtactgcataatcaaaatgtacagtaatacatgctcattctattatattttggatctgtcaagaaaacttaaatgagttttgtgcattctttgtcaatgcattatatctctctgtatatagcaatctgaaaattttccatcaattatggttagacttctaaatcatttgaaatttcaaagtgattagtaaaatggtgagtgaaaatggtagataaatgaagtatttttggaataaatttaaacacgcttaaaatgctataacaagtttataaacttacttatctggaattgactaaatagaaaagtcctagatacagcatcaattttataaagtcaagtcaataaactagaaggacaatttttattattttttactgcattgttttattttcttagtgtacatgctatcagcaaagtctgaaggcatggtttgcacatgaaaagggttttagcaactcataaataatataaccagagataagaggggaaagtaacattatttgtttctttaatttgtgtttagcgggacaattttattaggactttctccttgtcactttatgaatgactaaaaaaagaacaaagaaaaaggagttgtgcttctgaaacaatagtttggaaacaaaggtaacatttgaacaacaaagctaggcaatattgaaaaaaattaaaaatcaacatctaagaaatagttggcagtaaatatcaaaaattttactatgaagtacactccttactgactttggaggaaaaaaagtattctgtgacatttctctctattctttaaaaattgtaaacacatcctcagtgaaatatctacaaataacaaaaagctgttaattctttccgtgtagagttgtgtgactgtctgttatgaacacagtctatacttgcagtggaggtgggaactggcttctcatttgggttctttttgtggccagtggcagtacagctcattctctctgaaagctacttttagatagggtaacatttccttaaggcaaaactattgcttgcagctcattgaaacctttcctactggctgagctaaatgggcagatgtgttaggtatatttatttttagtgataatataaaagaatgattcacgtttacatggtgatttgcagattactgtggtctactttcacatttaaacctacttccttgacataatatgcaggtgtagtaattgcttaactgatttctgagataaaacactaactccttgtgggagaaattatgcatattgtctatatcacagcactgtattctctgcatctagtcattcattcatttaattattttattatttattctattcttatcaagtacactgttaagctctgagaatataacttggaagaagatgagcacaatcccttccttcgtgattttaacattcaagtagagattatasatttttaagaaaaacatttacaagtttcagatgaatgatacatgaactaacattctgagagtcgaaggtatttggccaggctaaatttctcataaggtgactcttggaactatggtaaataactttaaaatctacattctctaaatcaagggtcgcaaccctgggccatggacaagtaccagtctgtgacctgtcaggaactaggacacacagcaggaggtgagcgtgggtgggttagcagtcagggaacctcatctgtatttacagctgctccccatcattctcattactgcctgagctccaccttctgtca

SEQ ID NO: 688240 - DNA, 1511 bp, Homo sapiens
ttttttaaatactagtacatctttaaatagccatcacgcttggctatttaaccattgcctgacatagctaagatgcatgctgaaaacaaggaaatggccttggccttgtgttttgggacctgatgctcacaagttctataccaagtccctgtgctgaaaacaaagtggggtcgggtttgtgttttgggacctgatgctcacaagttctaataccaagtccctgtatactccctaataattgcagttataaaacaatggtggtcagatttttgaaggagatgacagttcattgtatatttgtctgttttaaatttgtgcctattccattttaagttctgggtttatagaatgtaaatttaatgtatgagatgtcacagtcctttgagctgcttgtccacctgcctcagtacccagatgagactactgaggcctcaagagccactcaacacatttaggtgcatggcatcctctatcaaattgaaaaacaaggctatgcacgcacccatccctctcagtgtaactccccaactcactgatagatgagtcaatttgacaaaagcctctcacttactgcattagttggactctcggacctttaaaatcacctattttcatatcctctgtacaaaaacagcaagatatattaagggcatatttgaaaaagatttttaactccaaatttctaaaattacataaatgcaatatatgtgaaataaacacgtgaaaataacatctagtacctgtcatacagtgaatataacattcattttgttgttattatgataatgaagcatcagctacttggatgtaatatttatgcagacagttttggaaaagagaaggtttctttttttgtttttatttcaaagtttctttcctaattatatgcaacttagcgtactatcaatccttaatatattcatcttggcttgcaggtttattgcctgaaaatacagtaatcatgtatttggaaaaaccatcttaggtctaaaacrtttagtatcttgaaaaatgaaggtcttttgtttgtttgtttaggttttgaagctttttaggctttatgcctttaaaaaaaaaaaaaagctcacacattttattttatagtgtcagagctaaaagtcctattagtgacacttgaaattttatagtagctgccacttgccagtgatcattaagtgaataaagcatccatcagtgatatggaaatcagccccatttataaatcattctgtacaatctgttaccagaggtgagctaaatgagcattttaggaacatctataaaaatttaagaccatgagtaggaataatttctcaatctatttagtagttggtggtgatagtagtcttacaagaaaaatattgtcgatttcttatttcattttgcacagcatactctctaaacaagtatatttctgtttgcatatgctatgccatttacacagagtaaatttttactccttaaacaggctacttttatgagtgataaaagtgttcacttggggcttaaaa

SEQ ID NO: 688241 - DNA, 1456 bp, Homo sapiens
aagcaaagaatgaagaagaaggaaaacattagtgtaggtacagatctttaagaagattcagtactatcttaggttaaaacttggacaatgtatttgaatatttatttttctgcattagtcggatttgtgacagaactcttattcattttcctaccaatgtattcattcattcatcaaatatttatggagtgtctactatatgttaagtactattctaagcccaggggatacagcacaaatagccaaaaatccttacactaatagaactrttagtagagatattgataatacactaagtaaataagtaaattaagtaatattttagatggtaataaatactacagaaaaaatatgaaacagagaaagaagaatgaggagtattgggtgaaatgggcattgcaatttcatgtagtacagttagagaaggctttaccaatatgaggacattttaaggaacacttgaagtccaggcacagtggctcatctctgtaatcccagcactttggaagcccaaggcgggtagattgcttgagttcagaagaccaacctggacaaaatggtgaaaccccatctctacaaaaaactacaaaagttagccaggcatggtggcctgtacctgcagttccagctacttaggaagctgaggtgcgaggatcgcctgagcctgagaggcagaggttacaaagagctgtgatcatgccactgcactaccccgctctgggtgacagagtgagaccctgtctcaacaacaacaacaaaaaaaaaaacaaaaaaaaaaaaagaaaagaaagaaataaagaaaaaaaaagtacttgaagaaactgagtagatattatattatattatattatattatattattattatattatattatgtagatactgggggaagagcatttttggcagagaaaacagcaattaaagattctgagggtagagggtgacttctttgaggtagaatgagaagacagtgactaatgtggctgaagaagagagagaatagaacatagatgactcaaagaagcaacaggggctagactttttgaggcatggtaggccactgtgtagactttggctgttattctggatgaacacagagtgactggaagatcttaaggcaagagataatatgatatgacttactaatgtttgaatataatcactctggatattgaagtgataatagccctagaggtacaagaatagaaagagaaaaaagtttgggttgttgctttcatccaggcgagacataacagtggtttcatccagggtggatttagtaggaagacagcctattccagatatattttgaaggtatagccaacataacttgctggcaaattagatatggtgtatgagaggaagatgaaaatcatggatgatttcaagtgttttggcccgagccactggaagtttggagttgctttaaccaagacagggaagaccatgaaaca

SEQ ID NO: 688242 - DNA, 178 bp, Homo sapiens
tgaatctgtatcatcaaaatgataaaatgggtctataataaacaataggttagtggcttgatatgcctaacagcatccactgcagtgcacaacaggcaagttatttatgaaatgggccttttgaaaatrtatagcttttataatctgaatctcatttctatgtcctttccaacaaaat

SEQ ID NO: 688243 - DNA, 1504 bp, Homo sapiens
caaaatttctttcttttaaaactccctactatctccagtccttctttaacaatctccataaataattacataaaatgtgtatagtgtattttgtctttgaaaaacccaatgggttgttgtaaaataaagtgataattcataaatacctagtacagagtaagcactctgaagacattattataattagtgttactattattataaatgatcgtatgtttacattttaccttagagtgtggtgaccaaacctgagaaatttgaaagcaaaaagcaaagaagtgctatgtgcaacaaaatctatagcgtttacttgtttacttagaaaatacacttaaatgagccttagtcaatataccaaaaaacattcagattggcctggctatctttttgcrtattagaaattacaagtgatgccaaattttgtgatgtactttttgattggacacaaggtcacctcggtgaggacagtcaacaccaagctcattttcacctggtgactggagccataatgtaaaatgttaaattgctatcatttttctttctcctaagtaacttgtaaacataataatggcttcattgttgaggcttgcagcttctttcaaaaggaaaataatttttaaaacaggctaggatcatagcgttgtgtgcatatgagcactcaaaacgcagtctttaaataataaaaagcagagccttcatttgtgctgatctttctgcctaaaagcttctacctgactttttgcctgatcagctacctcttattcattcttcaagaccacggtagtcttcctctccatactctttacttctcctcatcatagctctacgtagataccttaaaaattaattttacaaataagtttatccttaaaaattatcagcagacacgcaagtgcaggtatcacgttcttgtttcaataattcatcccccaaatctttgcactatgcctcatacgcatgccaataatattggtctaaagaatatattacactctcattcacttctgctagtagggagattcaaatggagagttaagatctggaatatataaaatgtattcacatagcaatacaaataaaatgtttagtggtgttgtgttttctcctcagtggaattcacttactaataaggtatggtataatgaaagatatgttgtttctagagctgaaacagaattgaaatatccactcccaccttctcatttaatatattttgtccttcctaagcaaataatgtgtgatatactggaagttgctctgcctagaattctctataaggttctattggttaaactttgttttcatgtcacacagtatcaataaccatttataatacaggacaaaaaataactgacttccggtcacttgaataagggaaaaatgaaacttatttttaaacaagtttcaaacaactaagttatcacagacaattctcaccccgccggcaccccccgcctcaaaatatttaaaatttgggactctctcaagagtgtttattttaaaa

SEQ ID NO: 688244 - DNA, 1504 bp, Homo sapiens
caaaatttctttcttttaaaactccctactatctccagtccttctttaacaatctccataaataattacataaaatgtgtatagtgtattttgtctttgaaaaacccaatgggttgttgtaaaataaagtgataattcataaatacctagtacagagtaagcactctgaagacattattataattagtgttactattattataaatgatcgtatgtttacattttaccttagagtgtggtgaccaaacctgagaaatttgaaagcaaaaagcaaagaagtgctatgtgcaacaaaatctatagcgtttacttgtttacttagaaaatacacttaaatgagccttagtcaatataccaaaaaacattcagattggcctggctatctttttgcatattagaaattacaagtgatgccaaattttgtgatgtactttttgattggacacaaggtcacctcggtgaggacagtcaacaccaagctcattttcacctggtgactggagccataatgtaaaatgttaaattgctatcatttttctttctcctaagtaacttgtaaacataataatggcttcattgttgaggcttgcagcttctttcaaaaggaaaataatttttaaaacaggctaggatcatagcgttgtgtgcatatgagcactcaaaacgcagtctttaaataataaaaagcagagccttcatttgtgctgatctttctgcctaaaagcttctacctgactttttgcctgatcagctacctcttattcattcttcaagaccacggtagtcttcctctccatactctttacttctcctcatcatagctctacgtagataccttaaaaattaattttacaaataagtttatccttaaaaattatcagcagacacgcaagtgcaggtatcacgttcttgtttcaataattcatcccccaaatctttgcactatgcctcatacgcatgccaataatattggtctaaagaatatattacactctcattcacttctgctagtagggagattcaaatggagagttaagatctggaatatataaaatgtattcacatagcaatacaaataaaatgtttagtggtgttgtgttttctcctcagtggaattcacttactaataaggtatggtataatgaaagatatgttgtttctagagctgaaacagaattgaaatatccactcccaccttctcatttaatatattttgtccttcctaagcaaataatgtgtgatatactggaagttgctctgcctagaattctctataaggttctattggttaaactttgttttcatgtcacacagtatcaataaccatttataatacaggacaaaaaataactgacttccggtcacttgaataagggaaaaatgaaacttatttttaaacaagtttcaaacaactaagttatcacagacaattctcaccccgccggcaccccccgcctcraaatatttaaaatttgggactctctcaagagtgtttattttaaaa

SEQ ID NO: 688245 - DNA, 301 bp, Homo sapiens
ctccattttatgaatgtttgtagtttatggacttttgctcttgggagaaaatagtaaaataactgtaggtattttatctattcactccatgcctcgggagcccccaggagagcaggaaagggaacatgtgtggccaggcaaattttattgtgtactcaaagcttacctttttttttttttctttttgcattgttcttaccacccatgattttaaaatggtatgagaatttttcaaactatgtcctcatgtcttatcrccttgcttataatgcccttcattcccctaccccccgctcccagc

SEQ ID NO: 688246 - DNA, 301 bp, Homo sapiens
ctccattttatgaatgtttgtagtttatggacttttgctcttgggagaaaatagtaaaataactgtaggtattttatctattcactccatgcctcgggagcccccaggagagcaggaaagggaacatgtgtggccaggcaaattttattgtgtactcaaagcttacctttttttttttttctttttgcattgttcttaccacccatgattttaaaatggtatgagaatttttcaaactatgtcctcatgtcttatcaccttgcttataatgcccttcattccccyaccccccgctcccagc

SEQ ID NO: 688247 - DNA, 760 bp, Homo sapiens
agaaatgaaggctcagagatagaaaatgtcttgaacaatgtcatatagattatcacctaaaatgtaagaggcagagttcaaactagaacccaaggcttctgttaataacttgggctctttgactacagaatttagcacctgtaattcagggatgagccctctcatgctggtgaggcctctgtgtactgtgggagcaactgactcacagcttcacaatctgggcataatgtacggtgttccacactccgcccatccttccttggattaagcaataaactaaagttcaaattcaaactttcatatttgaatagaacacattttctatatttttcccaactgcctcacctccatgcagctaatctagttctgatttctcagcatctctattgaggacaaggcacctgtgagcttcattccttctgcagagcacagyccctacccttgtctttttttaatcctttgttgtcataaccatgcctttctttcctcataccataggaggcacatcttgctctctaccttccaactacatttataattgtttcttttatttttttcttcatcatggtaccttatgccatgtaataaaagagcaacagatttaccctgagtggttaggtagtttcaaatatatatatgtgtgtatatatgtgtgtgtgtatatatatacatatgtgtgtgtgtgtatgtatgtatcccagtgaagcactcctcttggattttaactaccattctattattctccctaaagtagttgcac

SEQ ID NO: 688248 - DNA, 2019 bp, Homo sapiens
  misc_feature 244, 245, 246, 247, 248, 249, 250, 251, 252, 253, 254, 255,256, 257, 258, 259, 260, 261, 262, 263, 264, 265, 266, 267,268, 269, 270, 271, 272, 273, 274, 275, 276, 277, 278, 279,280, 281, 282, 283, 284, 285, 286, 287, 288, 289, 290: n = A,T,C or G
  misc_feature 291, 292, 293, 294, 295, 296, 297, 298, 299, 300, 301, 302,303, 304, 305, 306, 307, 308, 309, 310, 311, 312, 313, 314,315, 316, 317, 318, 319, 320, 321, 322, 323, 324, 325, 326,327, 328, 329, 330, 331, 332, 333, 334, 335, 336, 337: n = A,T,C or G
  misc_feature 338, 339, 340, 341, 342, 343: n = A,T,C or G
attgttaaagcaaatagttctactggtaagcagggatatttgtagaggtactctgggaattggaatggtggaggagagagatggaaaacctagaatgagaacatctaaactgccttttagggggaaaaatacggttttgatgggatatatgattccttgccatcaatttctgctgggaatataacaaaaagtatatttagatggtgtttaagtagtgaactttgtttaaatattcctgatggannnnnnnnnnnnnnnnnnnnnnnnnnnnnnnnnnnnnnnnnnnnnnnnnnnnnnnnnnnnnnnnnnnnnnnnnnnnnnnnnnnnnnnnnnnnnnnnnnnntcacatctgagtgcctatgtgcctgtcaggaatgtgtgagggtgttgtatgtattatgtactttccctgcttagctctttcaacaccctgtctttcccaaattgaccatagcaacatggttagatttcgtgtctaatttgccctattcctccctatccccaatataccctagacaaagaaaactaaaaaaaaagacacttccaaagctcttccaacagtaggattgctttggtgagacccacagggacactttcaataaaagtaactaaaaaagcaaggagaaataaattgatctactctatcttgcctgttcttcagtgggatctcaaccttcccttaaatcttaaatcaaataaagcttaatgaaaaaattactttaaggttttccgtgactgaggcatataacattgtccagtttgagctaatagtttatgactctaccaagagtaccagtgcctaatatactttgtttaaaaaatatttcatctttttcaaaacacatcaacatatattgcttcagtggattcttctgaccacctcgtatgccaagggctaatgtgcctttttaaaaaacatatttgtcctacaaatccaattactgagacacggggagttaacccctcctgtctgaagtgatatcactaactagtgggggtaactccagtgtccatgtctctattcaatacgtttcaaggagatcaaccaaacctatcctcagatcttaaattgaacaactgactttgacaacaatgtatccattaagtcaaaaatgggtacgataaaagccaaaatgctaactacaatgcccatcaaagataatccataacagtgaacaaattcaatttttttatatttactaaaatgaattaggtagatgcatatgttctgatacttagttgtctaagacataggattaagagaaaaaggcaaattacagaacaatctgaaaagtatcatcctatttgcacagaaaaaagtattagccatattctgtttaaatatacacagatatttcctggaaggatatccaataaactattttaaatgctttttctctagggtatgagtacagtatgtgacatggagaaatgggttggatttttactttttcacttacatgctcttcaatatttacttttttttttttgagacggagtctcgctctgtagcccaggctggagtgcagtggcgcgatcttggctcacggcaagctccaccctcctgggttcacgccattctcctgcctcagcctcccgagtagctgggactacaggcgcccgccaccacgcctggctaattttttttgtatttttyactagagacggggtttcaccgtgttaggcatgatggtctcgatctcctgacctcgtgatccgcccgcctcggcctcccaaagtgctgggattacaggcatgaaccactgtgcccggccaatatttacgttttcaaaaaccatgaacatatattattttcatcattaaaatatgtgatcagaatttttaacttgctgtttaacatataataaatcaagtaaatactctgggcacacctttaaatgtctgcttctctcagattactgcttgctctacaaacaactttatttgtgcacacatctctactgacttttagaataaatatttaatttctctagttataatactctactggaataaatg

SEQ ID NO: 688249 - DNA, 552 bp, Homo sapiens
aagcatgattagtgttggatgtagatgtaccctttaaaaaacgaggtaggaaatgaaataaaaacaaaattttatatatatataaaatacatattatatatatacatacacacacatatatatcttgaggggtaataaagatattcttgaacataaatgtcacacaatttttagacagtcatggtgtctccacttctcctgactagtaccttcctcatgccctccttctggtcattagtattcctcatggagtccatattgcagagtgcctcaagcctgcttaraggatcttttgagtctgttctaacacttctgatttcattgtagcccttgacatgaacattttcatgtaaagtttctggtcaagctgtttgtgctgtttccctttcacgaatgaaaaggaagtactaggactaaacgtgctatggaaagagagtaatcccctaaatatgcatatatgctttgtttattggataaactgattgaggaaatacacaatgccactgctaattatatatatatataattatatatatatatatacacacacac

SEQ ID NO: 688250 - DNA, 3309 bp, Homo sapiens
tgaaaaatataaatggtgtgttatgatcaaaaatagagtgtgtatgtttctactgaaacttcagaaacataaacttagtatgacatctgcacttcagataaagttattttaaatcacgtttgagaatatatattaatacagtaattctgttcattttaaatgctaggcaatatagcgttggatttgaggttgtaacagtttctactctaggagatcctggtccccatggctttctgaggaaatctagtggtgactataggtaatgttggcatttttattgtatctattttatactttactttttgtggcatcatcttctataaaccttattctcattttctctaaatataggtgtgggttttgctacctggaattagaaaatataccttctgggatcttcaatatcattcctagtacctttttgcctaaacaagaaggaccttttttcttggactttaatagtattatccccatcaagatcacacaacttcagtgatggagaaatctcaagttactggcttttatacttaccaaacatcagttcttcaaataaggacgcaaatcttcaggacagtaagcagaacaatcagaatggaattaaatctctaaaaacgtgttacagtggaatctggtgcttgtcagggtgtttggtaagaactgtatatagtcagaattacctaaatcacctagaggtaccgtttacatggttttgtgtatatagagttggcttgcattttaggggccattttgtataaaaagtgcatatgattaaaattagactcagtcatcactgtgagatgcctttgctaagaggataaaggaactgagaccagatgagaaaaagaaaggatatagattccttgagtggaatagtgggctagattaatataccgaaatatttccattgtttcccttttttgcagagcatgtggaagttaaacctgcttgattctactatacatcttgggcaactagttaccaaatgaattgtgccaccataactgattttaattttgcattatttatgattttaaaatatttgttgcccaggtgttatgaaagaataaagcttttaagtatagactaccttagcatgaagatgctcatgcctaagaatgaaaattgttgaggttatctcccattcaatcatgtagcaagaacttaaagaaattcactactgcagtttttatttttaaaaaacagtaattgagatattgaagacattacaatttagtttgtgtggtctttttttaaattgctgtatcgttcagtctcttgtggcaatagcactttgaagaaaatagagaatttaatatatggtgattgggatatgtagcattcaaaaaaagtgaattgccaagatactggtgtcatgtaaattcccactttacataaaaacccatcaggacagaatgatgctcaatattttaaaattctaaaaatagggtgggatttttcattgtctctactttataattatcaaaacttattttgtattgctactaccttaaattgaaataaaatgtttatacttacggatattgcatagtttaagttagatttattgaaagatttcatctgtcgtgtttcatgtaaatgagaacagattatttgcatgaaaatatatacttcaacaaaaatctgttctttaacagagtagtggtagattattacactaatgagatttcactttggtaaatacttcatgctttcagttttagcctattaattttaggtggacaaatttaacaagttttctgttactttttaaaaagaaaaaatccagaacataagaactatattatgaacacatgatttgaacctgttgtggtaaagatcttgtacaggatgcaaactaaaaacctaatccctgccatcaaatttattagaagagacctatatatgaacaacttaaaggcactgatttctataatagagctctaaaaacatgccaccagtgtatgaataagggaaagattaattttggctggaccaatataaaaaattgtatttgaagaattgatactttaacttggaccttgaaggtaaagcttcaaaagacaggttactgaccattgagtgtttactatgtacccaatgtgtatatttttctttttaatcttcccaatagctgaataaagtatagatactattatttgtacttcttacaattgaggaaataagcctaagagattaaaagattttgcccagggttcacaagccttcttccctgagccctgattgagctgctgtgtgtgtctaatggcacccacagtcacggccgtctagtcgagggagggacaagatctagacccattgtagagggaggaaaaacaatccaggccttttggaggttctaaataacagacagaccagttgaattgttagagaggatgactcaagtttctaattcagcacatggacagatgctcatagcttcagtgaaaggtaagttttgacacattaaattgcccagaaaatccagatctggaatcaacgtggtatagtaagtgagatcacccaaaaagtcaagagtcacgtgaactaaagatggttaagaactgatttgggggaagttttttagaaagtatttctaatttagaaaaaaatacatagactaacaggagatacaagaaaacgagggttgggggaggattaagaagcccagtgaacagaattcccagaagagtataattaaatgtcagatgtggtggagataaagaggccacagtgacagcagtaggggcagactacgtaaaactagaaatttgactaggtgatagtgtgagaagggagccctggtcaaaaggtggtctgcatccttttctggtgtaggagacaagcaagtggtaggctgatgggaaagggggattgaggcaggaaacamgagaaattcttaatgcccataaggaatactctagtgctactgactgactgcctaggctttgtcttttgtaaagacaagggaaagaaagccccagtgttagaaaactccttcccactttcattctctgcgagaagtacctagaaatttctagttattagactgtataacttgactctgctgtaaaaactttatcctagcttgggctattttccagatggtgtttcttctaggaggaaaaagaattgcctcaattgcagggaagtttttgctaatggtaagtcaagcaagtctcagtgtctttactacaggtaaaagggtgtaaggagattttatgagaactgaatgaaccctgaaggtcactagtcaaattcaggtatgctgttaagtgttcttgcttgagacccaaattacaagactggcca

SEQ ID NO: 688251 - DNA, 653 bp, Homo sapiens
gacagtcagcctgtccttcaaagctctgaagccaagcatttatttctcctgtctatctgtgaaacttctagatggcatcctcttccaagagaaaattatttcatctacattaaaaatatctgcaaagcacaaacaaagaggtatgcttttaagtgtcttccaaggaagtctgtgattctacctcttggaataagaccccatgtagtgaattaatatatactgcatgcctaataactgcaggtaattttcaatgagatagaatttatttctctacgtcatggtcttataactctataaactaaaaatcaaaatgaaacagaactgaaacttccttgataacttggctgtgtctgcctagtgattttttcctttttttcttttttgttttttgagacggagtcttgctctgtcacccaggctggartgcagtggagcgatctcagctcactgacagctccgcctccggggttcataccattctcctgcctcagcctcccgagtagctgggactacaggtgcctgtcactacgcccagctaattttttgtatttttagtagagacgggatttcaccatgttagccaggatggtctcgatcttctgacctcgtgatcctcccgcctcggcctcccaaagtgctgggattacaggcat

SEQ ID NO: 688252 - DNA, 653 bp, Homo sapiens
gacagtcagcctgtccttcaaagctctgaagccaagcatttatttctcctgtctatctgtgaaacttctagatggcatcctcttccaagagaaaattatttcatctacattaaaaatatctgcaaagcacaaacaaagaggtatgcttttaagtgtcttccaaggaagtctgtgattctacctcttggaataagaccccatgtagtgaattaatatatactgcatgcctaataactgcaggtaattttcaatgagatagaatttatttctctacgtcatggtcttataactctataaactaaaaatcaaaatgaaacagaactgaaacttccttgataacttggctgtgtctgcctagtgattttttcctttttttcttttttgttttttgagacggagtcttgctctgtcacccaggctggaatgcagtggagcratctcagctcactgacagctccgcctccggggttcataccattctcctgcctcagcctcccgagtagctgggactacaggtgcctgtcactacgcccagctaattttttgtatttttagtagagacgggatttcaccatgttagccaggatggtctcgatcttctgacctcgtgatcctcccgcctcggcctcccaaagtgctgggattacaggcat

SEQ ID NO: 688253 - DNA, 1443 bp, Homo sapiens
tattaaaagtaaagctcagttgcagattaatttgacgcttcatcttagttgccagacatatcaaaagaactcaccatttcagagaaaaacagaaaaagcaaagagtagtacacttcaaattccactattcctttatatacaatatcttgtttacaattaaaaatatgaaataggtcacaaatattagaattagcaggaaagatttttaaaataattacatatgttcatgtacttaacggaaaagataaagtgaatagatgaacagatatatattctcagcaaagaaagggaatctgtacaaaataatcaaatcaaaattctagaagtaaaaaaataccatatcttttatagaaaaagaaacaaaaacgaagcaaggaagaaaacaatgaacattagataaatttgatactagagtggacactgcagaagaaaggatcattgaactcaaaaacctgaaaaaggtcaataagcattaactatacagaagcatatagaaaaaaaaaagtaaaaaacyaaatagaatgtaaataactagtgaataactagtggaagagcttctaacaatctaaaatatgtgtaagtagagtccaagaaagactaaaaaatatatgaaatagttttgctgacaccttcatataaatgaatcgctgagactttaagtggaatctgttttaagagatcacccatgaagcaggcaacgctaagcaatggaaacctcagtgtccagttgaattaagaggttttgagtttttcattcctatattcaggcatcaaaatgtattttccagtctcatctgagtaaactagaaagtatttacttttgtagtaaagagaagaatttaaacattcaagatggatataaaggagatatggaaaaataacattaacgcaactgcttttttttctcaatcaggaaaaatgtaaattcagtacaatgcagtggctactcactgaacagtgagttgcgatatctagtttctagaccagagttactccctaattagtattgtgagtttgggcagagtaattctctttccctcagacccagtttccatttccaaaagatgaagtattagagattaatcttgtggtcttatagaaatctaagagtctatgaaattaatggcttaattcagggaattaaactatggcagagagccaaatctagttcactgtctccttttgtagataaagttttattagaacacagccatggtcatttgttaacatattgtctatgactgctttcaagctacaatggcagagctgagtaggtacaacaaagaccatatggcctgcaaagcataaaatatttactatctgcacctttacagaaaaaaatgcatcaaactttggcttagctgaatggaaagtacacttgttaaaaatatcctcagtgtcctaatttaatattcagagttatagccttcctaatttttctgc

SEQ ID NO: 688254 - DNA, 3256 bp, Homo sapiens
ttaaattttaatcataagaactgatatttaatgtctaccctgtgctagatacattacttattttatttagtgaaaaaattctgaggttgaaactctatttttatacttaaatcaaaatgattaactttctaaaggactcagcttgcaagtatcagagctgacatctgaactcaaggcaacctgctccagagtctgtccctgctctgcaaaacagcacactggaagagcggcattttggttcttcctatatatttaattcaattactctgcaaactaccgcagaacattatttcactttaggtccctttcttctcatctctgcttcctctttaaagtagcaggtggggactatgaagaaacattattctgattttttttcttttctctttcaggccacgtaaactagtctttgtctttgctggaataaacagtattgtacgtgattgaacatttgtaatatcaggagacctaacagtatagtgtggcatcaggctagggaacccctgccttgatgaattggataccataatatttctctgcctagggccactactacttgcataataattgccccagtaaatttgtagcagtcctatccagaaacagaatatgggtatttgtaaataaatgagtactgaccacaattagcatctcaaaaggaggcagtgacattctgaatttttttctctcttttttttttctttgagagagaaagggtcttgctttgttgcccaggctggagtgcagtgatgccatcatggctcactgcagcctctacctaccaggctcaaacgatgctcacacctcagccttccaagtagctggggctacaggtgcatgccgccacacctggctaatgtttttctctttttgtagagactgaatctcactgtgttgcccaacctggtcttgaattcctggactcaagcaatcctcccacatcagcctcccaaattgtggggattataggtgtgagccactatgctaagccctaaactttttccttgggcaatagttttcaaacaktttctgatagtaattattctaaagcaatcatcttccagctattttgccaattacccacaataaagatctgttttatattacaatctggtacacatttataaagataggaaattataggtttacgaaaacaattattttccttactacaacagatatagtctcatatttcatattcaatttcattaaaaaatttcttggttgggacccactaaatagatttcattatccacatgaaaagtgctctggtagagaataagcttgaggtaatctgtatggctcttcagatttggcttaaacctgtcttactctctcctctcctttttacttagatcttctctttgcttatctgtatttctgtagcctcatccaaatctcttttatctcctttcgttgttcttcccttcatttttcccttttctatttcaccaattcagaactgtgactacactccaccaatgcaaaactgtaaaatatttgtataagttacaatttttctcactttatgatttttttttcacccaggtgaatttaactttttgtctctcaaattccaaacaaaaataaactgtttcttacaagagtttgcatatgtaattttaccttccttgtaagttagctattttcatagtaaaaagtttcccatacctatataaattatactagcagtattataaatactatcttaatacttggaaattaagctaatatacttgttgtacctatttatgaatggaactttcaggataattagaggccacagaagcatccctcagttctctattgagtcacttagttctgttcatgttattacctcaatatctctcatggctgttccttcctctaaattctatgttcttatttttctcctaaattattgtaatgagctcctgcttaatcttcctaaactctcttaatatatcttttgtcatagtgatatttgaaatagaaattgatctgccagtaaccgttgagagtgtttcactggctttcagccacgtgggggtagtctaaattgcttggcatggctttttaaggctctttagtggatctgtatccatttcctgtttggcaactatggtattggagggaggaaagtggggtgaaaggctaataatgaaagataaacatagcaggcagctcactgtttctacaatgcaccatgtactttaggccttttgcatatgtttatctgaaagtccctttctttgcattcagttatccgtcagtcacatctgagatattattccagggatatgttccagtagttctcttggcacatatctcagtatattatgtctgcttgtatgtgagccccaccttgtactggaattgctggaaaggagggaggcgtcttcatttgggtctccttagcttggaatatgttaggtgctgcatgtgtggagaacaactagacatatataagccttgtcctcacagtgcttttagggaggcaaataagcatgtaccataaaatgataggagaagtgcaagatgttaaacgcctcctggtgaaagtggcatttaaaatgatcactaaaggataagtaggaattagctaattgttgaggaaaattgagacaccaaaataatgtctcatggcttggtgttcaaatggcaagaaatgaagctacagaatgtgcaaaagctgtcatgaagggctgtgagagtaaaatgaccatagaatttaccttctggtttgcaaagcttttgaaaaggacatgaggagctgttaataatatgccaggacaacaggcgtaagcagaccttcctaggcaaactagaatttatggtgagtgtgaagtttatgctaagcatataggaattcatggaaagacttttaaataagagagataatttgatcacatttacttttaaaaatcattatagctctggtgtggaggataaactggcagggagctattgtaataagccaaaagaacgtggtgactttacacagaagtgggagtgaatttgagggaggtttaagaagtgaatattggttcatcagatgggggtgaggcagagggaggtgttaaggttgatacctggtttctctcttagagaagaacattaccatccatctcccatgcaaaaaagctgtattggggaggtgaaatttagacattttgagttgaagaggcctttgagatactgagatggaaatattctagtagatagctggatatgaatctagaaaggtccaggttagagaaagatgtgcatttgtgta

SEQ ID NO: 688255 - DNA, 1305 bp, Homo sapiens
tttgtttgttttgggtataggaacaatatactatgattaaaccaaatcagttgaactttttcatattttacattactgataggaagtgaagagttagtcaccagagtgaaatgatctgtaaacactccactgacttacaattttgtggaatgtatcaggacttgatttttttaatgctttaacactaaaagctttataacttttcttacgtaaatcagaatattactattaagaaaattgagttttaaatggactttcctacctggaggtagacaaagggtacaaattctgtcttcaagagtgacctaaatagactctcacatgcattcttccattaagtactaggtttgtcctggtaaaacaaactacagaaatatctgtattaaaaactgtcaggatgatactcctaacaagaatcatactgttaaaaatcatattgtaaaacttaaaaagcacaattataagttttccctgcagtgttttatttttttccccagagggcttcttctgtatatagggtagcagctttttttttgagacggagtctcgctctgtcgcccaggctggagtgcagtggcacgatctcggctcactgcaagctctgcctcccaggttcacgccattctcctgcctcagcctcccgagtagctgggactataggcacccaccaccatgcccagctaattttttgtatttttagtagagacggggtttcaccatgttgcccaggctggtttcgaactcctgagcttaggcaatctgcctgcctcggcctcccaaagtgctgggattacaggcgtgagccaccgcacctggccagggtggcagctttgaaagctagccaaaagcctgctaagggaagtaaaatattcttagaaaagtaacaaacaagaaaacctactcatattacattggcctgttttttaatacttcctaaggtattcatggcaagaagagcaaagttccagacagaggttcctagattttattggacataaacattacctatggctcattccaaaaagaccaactaagaatcactgggagtatggtctaaaatttgcattttaaaaataagactttatttattttgatgtagttaccccactaatacaacygagaaccactgacttcaaatattatgagagaaaattactccaggaatttttgcagagaagataatactttatcttgaaaatattttaaatattttaaaagatggaaactacacaaaagaacaaatactcaaataaagctgcaagatctttatgtcataatttcaacaagtagagttttcactggatt

SEQ ID NO: 688256 - DNA, 623 bp, Homo sapiens
agcaatcctgaaaacagacaatttgaaatatttatgccaagaaccggtagtggtggctcatgcctgtaatcccagcactttgggaggctgagatgggaggatcacttgagcacaggaatttgagaccagcctaggcaatacagggagaccctatctctacaaaaaataaaaaataaaaatcagctgggtgtggtggtatgcccctgtggtcccagctacttgggaggctgaaggtgggtggggatcacttgagcccaggagttacaggctgcggtaagccttgactatacaactgtactccaccctgggagacagagaggggaccctgtctccaaagaraaaaaaaaaaaaaaagaaaaagaagtacttatgccaaggaaggagctttttgcctaggtactaatattcaggaagcagaaatatgaaaacagaatgcagctggctgtgagaaaaattagacaagggaggaaagtagccatttttaggcaaaaggaggaagggcaggaaagactgactacgagtaaagagaaatgctatgagaatacctgacagttaaaggaacttaaaataatttactttacttggtacgctgacttgctcgacaattttatttattcaattca

SEQ ID NO: 688257 - DNA, 369 bp, Homo sapiens
  misc_feature 335, 336: n = A,T,C or G
agaagtaaacatttttttaaagttagggaaattaacaagcctctccgtatacccatagatatagggaatctcactgagtttctcagacacatgataaaacagcatacatctctcacttacaggtggaatataacattaaccatcttgcactgaggagttacagattggtagacacagtgccaaaaacttgataagcttgtctcatttcatccttacacaaccttgtgaagtaggtattattattgtgctttttacacgataaggaaacagaagcttattctgcaattayagaggaagtaaaaagcaaaagaaagaaatcagatagcctgggcgcnnggattacgcctggtaatccgcagcatctttggg

SEQ ID NO: 688258 - DNA, 521 bp, Homo sapiens
tccttccagccccatgcatccgaacaaacagctgaaatgaattttcagctgagttttcacaacgctcattgcaagctctttgccctcattaaattatcaggaaaatgcaagtaatttattatgtgtaatcacatcattcgcggtagcacttcgcccagagaaacctagcccaatatggtaacatcagaacaatgcttcacctcacatcttcctttgaaagataaagaaaacacagaatcattctgcttctctccgggaaggaaggcaaagcgtttccccaggccctcagaacaccatctggctgcagtctttccttttagggacctggtattttctggcccagggacaaagygcatttatttcagatggatcaacactgtcacccagcgggcagacagctgggcaggctgagccttagccttgctcttggcttgacagccagatactgacagccagtatttgaataggaacctgtttgtttcgggtgatcaggattaattgttaatattctcttggaggga

SEQ ID NO: 688259 - DNA, 643 bp, Homo sapiens
ttcaggctgctctcaactcctgacatcgtgatccgcctgcctcggccttccaaagtgctgggattacaggctaataatgccttctatgtgcttttcatataataattcaaacaaattgacatagcartcctataagacagatattcttaggcccattgtacagacttaattgaggcttaaggacatctagtcacttgttctagatcatataataaattatggcaaagtcagcattcaaaaccatgggaaccttgcaacttctgcattggaatcagcttgagtatttactaaactgcagattactgagccccgctatggatttacaaaagaacctctggggagtgagtgtaggagtctgtgtttcttagcactccagatcctgtggagacactttaatgtttaataacccctcatttaactgacaatgagttctaaaacattgccatgtttagaggatggtggaaatggatataaccattactggttccttaacttgaggaagtcaaggaattttgaggcaaggtgtttaggcaactacaacacagaggctgagtagtaaagtatgctgagttgcttgagttttgtaattagattataggtacaaccatccaactctaagtttccagtagaaagttgctgcttt

SEQ ID NO: 688260 - DNA, 2928 bp, Homo sapiens
tgtgatgaaacacatcataatttttcctcttaaaattagtgtaaatgtatttttatagtataaaaatacacaacttcaaatctatactcttaaaattgaaagtgtatagcacagtagtgctaactatatgcatatttttgtatactagatctctctagaactttctcatcttgcataactgaaactttatccccattttcctctcctcccagcccctggaaaccaccatttacttactgcctctatgagttgagatatttttaatttaatgatttttaatctaatgattggattttaaaaaacaawttgaggtattatctcaatttgagaaaatgagaaaaagtcttatgaatacaacacaggtataaacatgttcttaatattaactgtaaactcagaaactaggcaataaaatatgggcatatttgccattaaaaaatttatgtttagaaaatgtaccatgcccaaagacaaaggattgattgtttaacagcatttccaacaccgatgacagaattatcttatataataaataaaacactctacaagtttactggttaaagaaaaagccacacagcagcaacaacaaacaggcagaagacaagaatatcctatttgtaggagagaaaatacaaatgttaacaaacattcccaaatatgctgaaactctagcagcagagaggaagatgcaaatcggagtaagaatgaactatcacattgtacctatcaagttgacaaaagcttaagaagtgaaaactagtgctggtgactatttggggaaatagtttttttcacatatcactggtgaaactgtgaatcactatggcctttagggaaaataattattaaaaagaaaatgcatatttcctttcacatagctatcttgggatctattccatgtaaataaaagcaccagtatgaaaggatatatgcccaaggtttatgttagctctcgtttatttagcaataaattaaaaacaaagagaatgacaatcaataggaaaatgaattttcatacccatatcataaatattattgaacctgtgttgaatttagagctatatcagttgacctgaagaaatgtccatgcagcattgtggaatgaaaaaaaaacggtgcaaaagaatgtgtatgatataatcccattttgttggtaaagccataaaacttgcatacttatttaccaatgggtatgtatgtatgtgtataaatgtgtatgtatatatgtgcatttatatgcctttgtatgtaattaagtgtatatacagaaaaatacaaaaggacacacactagatcataaaaataagttaattaaaattagggctaaatgagataagattcagaacagagaaagaaaaagagaaaggggaggaagaggaagcaaatagcaaaaagagaaaagacaatttaaaaaagtgtctatgatgttatcagccatgatgcttccagatgtaattaatagataatgcttagtcacctgacataacgagcctatgtattatttcatttaacaaaaagcactgaagtaagacagtttcagtttgatgaattccagggataaattatgtttcaagggaagagatatcttctatctttctactctctcatacccaggatgttgacttcatacttagctaccacttctcaaggtcacaagataatgattaagaccccaggtatcacagtggttatgaacacatccatgttttatcattatttttagaaatgaggaaacttgtcccagaagtctgcctcgactttaatgaccaataagggctggggaatttccagtactgattttactgtccaggtttacccttaggctgcagatggattctctatctctgaagcacaggcacctgaataaaactaggttctatcagcaaggaagcagacagaaatgtctattagcaaggcatatctagcctgccacatatgacctaatccaatatgcattgacaaaaatacatatgcttgtatattgtatgaagacattcgtataagtaaatttcagaaagaaagcataagttctcactgagaaaaatcatagcggctcttcaacctataattttagaagtgcagtagaaggatttctttttatagcttttaaacttcaatccaaatggaggacatttgctagagagcatgtagcttcaccactatgagaaataatactacattttttgtgtgtcacttagctgtttaagaggttaaccttttgctccacctccaaacaaatgagtcattaatcttcaaaaaatacaaatggttttctctttgttttccccttttaaattttattaagaaaaacgtggaagagtcttatccatccttgtgcaatgtgtaggatttcacttggtgaacttattgtgttgacttttaagatgaaagctcttaaggatttttaagccatcaagcattatccatcagaataaataaatgagagattgctttattcttttcaggcaggatacattctgtgacctatcttttccgtgacctacaaggctttaggggaagagcttccagaattttattggcaatgccactattagacggacttccctctctcttttaagctctttgggggtcagctttaaagtgagcattaagtgaatggctaatggaattaagggtataataatagaaggatatagtgagacaattgtattaacaagaaataaatcatgttgaatgtaaggtaagtgttttttaattgattgatgggaaggatgctccacaggttttgtcagggactaacagccatttaccttctcatctacagtaaaaagccaaaatgtagaaaaaaagataagaaaattatgcagcaggaagataaattattcagagaagatggccattttgtgctgacatcactaatgtgaaaaggcattaaatctttgacactagcttcattccttaggagct

SEQ ID NO: 688261 - DNA, 634 bp, Homo sapiens
cttttttcttcctgtttattctcatctgtagtaagaacctcactctgcaaaggtgcaccccaaagtggttaagagcctgaaccctggcgctagctgctgggttcgagtctcacctctgatacaggctgcttgactttaggcaagtgacttcatctctctgcctcagtttcttcctctgtaaagtggagatcataataggatctaccacgtagacttagctatgaggattaagtgccaaaacacttgcttcttctgggacttcacactgtcctccaggcgatgaaaactcacagatgttacccccagtggattctcagtgtaggtgggagtgataaagtgaactgggcagaggagggtcagtgcaaagcaaaggcccagaatggaagtgagtaaatggccagggaagakagcagtaccatgggagagttttaaatctaaattccaggtttacaaaatgccaagtagagcaaaaatatggtaggtctagagcaggggtgtccaatcttttggtttccctgggctacattggaagaagaataattgtcttgggccacacataaaatatactaactctcacgacagctgatgcactaaaaaagaaaagaaatcacaaaaaacatctgataatatttta

SEQ ID NO: 688262 - DNA, 634 bp, Homo sapiens
cttttttcttcctgtttattctcatctgtagtaagaacctcactctgcaaaggtgcaccccaaagtggttaagagcctgaaccctggcgctagctgctgggttcgagtctcacctctgatacaggctgcttgactttaggcaagtgacttcatctctctgcctcagtttcttcctctgtaaagtggagatcataataggatctaccacgtagacttagctatgaggattaagtgccaaaacacttgcttcttctgggacttcacactgtcctccaggcgatgaaaactcacagatgttacccccagtggattctcagtgtaggtgggagtgataaagtgaactgggcagaggagggtcagtgcaaagcaaaggcccagaatggaagtgagtaaatggccagggaagatagcagtaccatgggagagttttaaatctaaattccaggtttamaaaatgccaagtagagcaaaaatatggtaggtctagagcaggggtgtccaatcttttggtttccctgggctacattggaagaagaataattgtcttgggccacacataaaatatactaactctcacgacagctgatgcactaaaaaagaaaagaaatcacaaaaaacatctgataatatttta

SEQ ID NO: 688263 - DNA, 635 bp, Homo sapiens
agcccatcccagccagtagactgcttcctcctatcactggtcagggaggcagccttccctttaaggcccctctgtttgcctcctcactcagtgggtgggcttgtccagcagacatgcattgagctggaaaggagaatcgcagccaggcttgcgtgtgcaacgatgttcccatgggcacggagtgaatgcagtggtgctgcccataccagctcttccaggaccaaaacactcagcctccaggtaccaggagcttcacctactgatggcacacagctgaggcccactctggcgaatgcctcaactagaaagagccaacttgcccaaatatacttactgtccctgtgtccagtgaccagtctacacagagatacaaaggccaagcccctttacatcagttctggacctctctgaagggccatgccagcttcagagctccctgggggatgggctgagtcctctgctgtgactgcatcgtagctccacttcccccgacttaagcctgcctccctcactcscttgccagtgctgcttccgagagctctgcccagtaagcctcccacacgcaagttgccatctcagaggctgtttcccgagaatctgagctaagattggaccttcctctgtgtgggcactta

SEQ ID NO: 688264 - DNA, 1036 bp, Homo sapiens
gaaatccaggggtctatacatgaggaaggagaattcactgggcttttctacccaaacagctccccggaagttccactacactgtttcctagggcaggactggggaaggaggagcaacccaccaggtacgcatgggctccagcaccttctttgtgagtaggatgtgctcctgaccactgcaccacactgcctccctagaagggttttgaacttttataatgagaactcaacctttccttggccttctgaacagtgagaagacaccatctagaaataatactgtaagtttgaggcaaggtcagaacttgaacccaggtctctgctaactcagatcaacgttggtctcccaggctcatgggaactgtccctggtgctgaccccaggtccacactctctagcttgacttggcctcgygtctggcttgggttcccgccctaaaaggcccttaagaacctcttttggcagaggaagacaaagcccccagaggacaagtgacttgttcaaggccacataacagttccctgtggcactagagtacctcatcacttacttcattgtccatggattctgcatttctagatcaacatttgagaccaggttttaagcttatctttgtcactgactctgccaaagtcatagaaagaggtatcttacaagtgtgtagtacttgctaactttcgaagtgctctcactttgaattttcaaaataaccttttcgaacaagacagataggatggaaaataaggtaagacagaggagattcaaagagaggctaagtggttttcttaaggccacccagctagtgagtgggagaatcaggactggaatctgtttcttccagcgtcttatcctgacatcttctgcatgatccccatgtgacttatttggccaagcttagccctggaagaaatcttactgggtccatctgagtctgtgctcccatcccattcctcagcctgcttccttgcacctgttgggggttctggcacacctggcctggggcaggtgccttcttcacagccatgccaagaagggaa

SEQ ID NO: 688265 - DNA, 964 bp, Homo sapiens
tgcagacaggcagaacaaagcacagaatcaggggccactcaaaagtgccttcaccagctctacctgcacagctrtcctgtggccttttatcagacagcacacagctgttcactacagaaaagcaagaaggtgggtgtttttcagagaacaccaaataacctgggagatatgacagcaggcccagtggatttttggttgtacctgaagatgcaaatatcactggatagcttctcaatattgtcctccccctccccttcttctcacaaaactaaacattttagtgttagtttgaaaaacagaaaaactatatgcctagtgttggtcctcaccaagctgggcttcatatacacggttcatgtttgtgattggtgattgtgggaaatttcccataaagacgctcctcaacttatgatgaggttacatcttgacaaacccactgtaaactgaaaatatcactaagttgaaaatgtgtttaatacacctaaagtaccgaacaacacagcttagtccagcctactttaaacatgctcagaacacttacgttaacctacagctggaaaaatcatgtaacacaaagcttatttcataacaaagtgttgaatagctcacataatttattgaatacttagattgaaaaacagaatggttgtatggggactgtctatactgcattatgaaggtgacagattttacatttttctccaataagataatcatgttgctgagtttgtttcatttttaatcctggtataggctcatgtaaaactaaactttccagggtcatctgcttttaatgtttcaaaatgcagatcctgggggctgtgcccaggttgtggaggccatgagattagccgcttcaaacctattaatgagcatgctcaggcccactacatctgttttgaaaaaatatgatcacactccgcactttttctttaaaataactttgttttcttgtctatattta

SEQ ID NO: 688266 - DNA, 964 bp, Homo sapiens
tgcagacaggcagaacaaagcacagaatcaggggccactcaaaagtgccttcaccagctctacctgcacagctgtcctgtggccttttatcagacagcacacagctgttcactacagaaaagcaagaaggtgggtgtttttcagagaacaccaaataacctgggagatatgacagcaggcccagtggatttttggttgtacctgaagatgcaaatatcactggatagcttctcaatattgtcctccccctccccttcttctcacaaaactaaacattttagtgttagtttgaaaaacagaaaaactatatgcctagtgttggtcctcaccaagctgggcttcatatacacggttcatgtttgtgattggtgattgtgggaaatttcccataaagacgctcctcaacttatgatgaggttacatcttgacaaacccactgtaaactgaaaatatcactaagttgaaaatgtgtttaatacacctaaagtaccgaacaacacagcttagtccagcctactttaaacatgctcagaacacttacgttaacctacagctggaaaaatcatgtaacacaaagcttatttcataacaaagtgttgaatagctcacataatttattgaatacttagattgaaaaacagaatggttgtatggggactgtctataytgcattatgaaggtgacagattttacatttttctccaataagataatcatgttgctgagtttgtttcatttttaatcctggtataggctcatgtaaaactaaactttccagggtcatctgcttttaatgtttcaaaatgcagatcctgggggctgtgcccaggttgtggaggccatgagattagccgcttcaaacctattaatgagcatgctcaggcccactacatctgttttgaaaaaatatgatcacactccgcactttttctttaaaataactttgttttcttgtctatattta

SEQ ID NO: 688267 - DNA, 1600 bp, Homo sapiens
tcaagtgtcattgattactttggtaccacaacttaactggtggtgttatatttcaggtgcaccttgattttcttctgtagttctgaaaattctctataaaaccaaagatttaaaatgtcaaaaacagggccgggcgcggtggctcacgcctgtaatcccagcactttgggaggctgaggtgggcagatcacgaggtcaggagttcaagaccagcctggccaacatggtgaaaccccatctctactaaaaatacaaaaattagccaggcgtagtggcgcatgtctgtaatcccagctacttgggaggctgaggcaggagaatcgcttgaacccaggaggcggaggttgcagtgagccaagactgcgccactgtgctccagcttggcgacagagagagactctatctcaaaaaaaaaaaaaaaagccaataacaaatatgtcatttgcaaaagtatttgctataaaaatctttattagatagtcactgccctcagtctagtttgcttgagtgctattttgcatcttttaagataaatttcttacattacgcttttcagaaattctctgtttaattttagtgtctgtttgtttatgaagtttcttcattaagttttcttattgaaatttgttttacaggcagtttgaaaattgcaaggagggactttaagactacttctgatttgcaaagattgtctgtgctctgagcaggctaaagtgactggacgagacgcactgttggagaaataaaaatgacttcccattatgtgattgccatctttgccctgatgagcttctgtttagccactgcaggtaagttgcataatataaattgcatatttgttatatatttttggatatattttgtcccagtctctttagttgagatgaagtttcactctgttacccaggctggagtgcagaggcataatcatggcttactgtaggctctacctcctgggcttaagcgatcctcccacctcagcctcctaactagttgggactacaggcgtgtgccaccatgcccagctaatgttttattttttgtagagatagggtctcctatgttgctcaggctggtttcaaactcctgacctcaagtgatcctctcttcttggcctcctagcatgctggtattacaggtatgtgccactgtgcccgacctgtatttacatttttgtccctgaataaggatttcaagaaarcatttttgtcctttattagcaaataaatagatcttctagattgaggtgacactcttgacataggctgcttgggaggtatttagttttgcctatttcacatatttcaatatgtaaccttttttttttttttttttttttgtggagacagagtcttgctctgtcacccaggctggagtgcaatggcctgatctcggctcactgcaacctcctcctcttgggttcaagcaattctcgtgcctcagcctcccaagtagctgggactgcagatgcctgccactacacgtggataatatttgtatttttaatagagacagggtttcaccattttggccgtgctggtcttgaactcctgacctcaggtgatccgcctaccttggtctcccaaagtgctgggattac

SEQ ID NO: 688268 - DNA, 1600 bp, Homo sapiens
tcaagtgtcattgattactttggtaccacaacttaactggtggtgttatatttcaggtgcaccttgattttcttctgtagttctgaaaattctctataaaaccaaagatttaaaatgtcaaaaacagggccgggcgcggtggctcacgcctgtaatcccagcactttgggaggctgaggtgggcagatcacgaggtcaggagttcaagaccagcctggccaacatggtgaaaccccatctctactaaaaatacaaaaattagccaggcgtagtggcgcatgtctgtaatcccagctacttgggaggctgaggcaggagaatcgcttgaacccaggaggcggaggttgcagtgagccaagactgcgccactgtgctccagcttggcgacagagagagactctatctcaaaaaaaaaaaaaaaagccaataacaaatatgtcatttgcaaaagtatttgctataaaaatctttattagatagtcactgccctcagtctagtttgcttgagtgctattttgcatcttttaagataaatttcttacattacgcttttcagaaattctctgtttaattttagtgtctgtttgtttatgaagtttcttcattaagttttcttattgaaatttgttttacaggcagtttgaaaattgcaaggagggactttaagactacttctgatttgcaaagattgtctgtgctctgagcaggctaaagtgactggacgagacgcactgttggagaaataaaaatgacttcccattatgtgattgccatctttgccctgatgagcttctgtttagccactgcaggtaagttgcataatataaattgcatatttgttatatatttttggatatattttgtcccagtctctttagttgagatgaagtttcactctgttacccaggctggagtgcagaggcataatcatggcttactgtaggctctacctcctgggcttaagcgatcctcccacctcagcctcctaactagttgggactacaggcgtgtgccaccatgcccagctaatgttttattttttgtagagatagggtctcctatgttgctcaggctggtttcaaactcctgacctcaagtgatcctctcttcttggcctcctagcatgctggtattacaggtatgtgccactgtgcccgacctgtatttacatttttgtccctgaataaggatttcaagaaaacatttttgtcctttattagcaaataaatagatcttctagattgaggtgacactcttgacataggctgcttgggaggtatttagttttgcctatttcacatatttcaatatgtaaccttttttttttttttttttttttgtggagacagagtcttgctctgtcacccaggctggagtgcaatggcctgatctcggctcactgcaacctcctcctcttgggttcaagcaattctcgtgcctcagcctcccaagtagctgggactgcagatgcctgccactacacgtggataatatttgtatttttaatagagacagggtttcaccattttggccrtgctggtcttgaactcctgacctcaggtgatccgcctaccttggtctcccaaagtgctgggattac

SEQ ID NO: 688269 - DNA, 904 bp, Homo sapiens
ggagtttgagaccaggctggtcaacacagcgagaccgtgtctctacgaaaaactaaaacattagccaggaatggtggtgtgtgcctgtggtcccagctgctcaggaggctgaggtgagaggatctcttgagcccggaaggtcaggactgcagtgagccatgttcatgccactgcactctagcctgggtgacagagtgagaccctgtctcaaaaacaaacaaacaaacataaaaaaacttaagatttgaaacttccaactgcatatactgtatctgtgtgaggccagatttcttcatatccttcaaccagaacaatgtattgcaaaaaattgaatgcaaaagtagatgggaaaacccagtggtcttgtattaagccagacatttaaagagatttgctgtgcatgtgtctttgaaatttaacaagaaaagagatttgcggccgggcgcggtggctcacgcctgtaatcccagcactttgggaggcagaggcgggtggatcatgaggtcaggagatcaagaccatcctggctaacgcggtgaaaccctgtctctactaaaaaatacaaaaaaaaaaaaaaattagtcgggygtgatgacgggtgcctgtagtcccagctacttgggaggctgaggcaggagaatggtgtgaacccgggaggcagagcttgcagtgcgccgagttcgccccactgcactccagcctgggcgacagggcgagactccgtctcaaaaaaaaaaaaaaaaagagatttccaaaaatgtaaaacagtgctgctcatctcaccttacattttgttttagaaagtagttgtttttcatgaaagatactgtttatgttacagtttattatagttggtttttagtgaattaataaatatttaaaaatttcctcagttttaatttct

SEQ ID NO: 688270 - DNA, 904 bp, Homo sapiens
ggagtttgagaccaggctggtcaacacagcgagaccgtgtctctacgaaaaactaaaacattagccaggaatggtggtgtgtgcctgtggtcccagctgctcaggaggctgaggtgagaggatctcttgagcccggaaggtcaggactgcagtgagccatgttcatgccactgcactctagcctgggtgacagagtgagaccctgtctcaaaaacaaacaaacaaacataaaaaaacttaagatttgaaacttccaactgcatatactgtatctgtgtgaggccagatttcttcatatccttcaaccagaacaatgtattgcaaaaaattgaatgcaaaagtagatgggaaaacccagtggtcttgtattaagccagacatttaaagagatttgctgtgcatgtgtctttgaaatttaacaagaaaagagatttgcggccgggcgcggtggctcacgcctgtaatcccagcactttgggaggcagaggcgggtggatcatgaggtcaggagatcaagaccatcctggctaacgcggtgaaaccctgtctctactaaaaaatacaaaaaaaaaaaaaaattagtcgggcgtgatgacgggtgcctgtagtcccagctacttgggaggctgaggcaggagaatggtgtgaacccgggaggcagagcttgcagtgcgccgagttygccccactgcactccagcctgggcgacagggcgagactccgtctcaaaaaaaaaaaaaaaaagagatttccaaaaatgtaaaacagtgctgctcatctcaccttacattttgttttagaaagtagttgtttttcatgaaagatactgtttatgttacagtttattatagttggtttttagtgaattaataaatatttaaaaatttcctcagttttaatttct

SEQ ID NO: 688271 - DNA, 610 bp, Homo sapiens
ggtaaattataaaggaaagaggttaatttgactcacagttcagcatggctggaaaggcctcaggagacttacaatcataataaaaggggaaacaaatatgtcctttttcatatggtgacaagaagagaaaatgtgctgagcaaaagggagaaaagccccttagaaaaccatcagatcttatgtgaactcactaactatcatgagaacagaatgagagtaactgaccacatgattcaattacctcccaccagatgtctcccatgacacatagggattatgggaactacaattcaaaatgagatttgggtgcagacacagccagactacaacaatgtgacaacaaaatttattaacacrtgtacagtgttatggttagtgctcagtacaaattagctattattaactagatatttatatgctgaattatgttaatatatgctttcacacaaatatttttacattacacatgatttttccaaccattagatgaatatatatttaaattacaattttattgtaaatgtggtgtatatatttagaataatagtaaacagaatggaatattatgtagccttaaaaaggggggaatattgtcaattgaaaaaatatg

SEQ ID NO: 688272 - DNA, 1489 bp, Homo sapiens
tttaaggttagagatgacctcaacttttatttggcatacattagagggcctaaaaattgttttgtatataacaagtgctaattagtgtgcccatgttgtttatcatatacctttgtctattacaatttcataaaaacagaataaaacaaggactatctagggcaaaccaggatgtatggttacccatcaacatacattggctgattctgaactgaatcacagtctttcctatggctaattttttttccctcagaacttagtggaacagtcagcctggtcaaaagaaaaaatgtcgtacttgattgcaataataatgtgaatcaactttgattgagcccctatgttccaggttcatctcattaaatcctcaccacaacactatgagatagatgtggctatatttctcctcttattgatgaggaaactgagtctctcagatgttgagtaactctcccaagattgcaccactaggttcacagtgctggctccagattcagagtgcccaggtttgaatctgaaatacaaaatgggcatggaatcctagttcaagaaatatcatgggcatccgtgaaacaatgtatttaaaaagttttgcaaatggtaaattactcaaatgtgaattgcatgccaatgtgtagttttttgcaggatatagtgccagagcagtgggaggtgattttatccccaaggaaatttggcagagtcaggaaacattttcagctgtcacaaatgggaggggggattgttattggcatctagtgaatagaggctagggacactgttatacatcctacgatgcacaggatgccctcccataataaagaattatccagcctcaaatgtcaaccatgtcagggttgagaaactctgtgctataaaaatacagattaagaaaatgtgaaccttggcttttaaaagctcacagcttaagtggggaaatagacacataggtaratatgaaaaatacaatgcaggggctgagggcaggggctcacgcctgtaattccaacactttgagaggcctaagagggaggattgcttgaagcagggagtttgagagcagcctgggcaacaaagcaagaatcctgtctctacaaaacaaaaacaaaaaccaggcagtggtgcagcagaagtggttcagtgagatggagaaattcagatgaagagagggaagggatgtagcaccatcttgagctatttaagggctgtaatgtgaaagagggagagggctttttatgtgtaaccctaagtggtagatagatttcagcttcagaaaagatgagccaataagctccttgcaggtatgaaatgtgtgtgtctcttcaacagttacatcctcatgtctagaacagtgcctgacaatggagtaaggcttaataaatgcttgtcgaataatagtgaaatagataaatggatgaactcaagcatccaagggcaagttttgaaagttaagattgagtcccatcagaagattatctgattttatgac

SEQ ID NO: 688273 - DNA, 1489 bp, Homo sapiens
tttaaggttagagatgacctcaacttttatttggcatacattagagggcctaaaaattgttttgtatataacaagtgctaattagtgtgcccatgttgtttatcatatacctttgtctattacaatttcataaaaacagaataaaacaaggactatctagggcaaaccaggatgtatggttacccatcaacatacattggctgattctgaactgaatcacagtctttcctatggctaattttttttccctcagaacttagtggaacagtcagcctggtcaaaagaaaaaatgtcgtacttgattgcaataataatgtgaatcaactttgattgagcccctatgttccaggttcatctcattaaatcctcaccacaacactatgagatagatgtggctatatttctcctcttattgatgaggaaactgagtctctcagatgttgagtaactctcccaagattgcaccactaggttcacagtgctggctccagattcagagtgcccaggtttgaatctgaaatacaaaatgggcatggaatcctagttcaagaaatatcatgggcatccgtgaaacaatgtatttaaaaagttttgcaaatggtaaattactcaaatgtgaattgcatgccaatgtgtagttttttgcaggatatagtgccagagcagtgggaggtgattttatccccaaggaaatttggcagagtcaggaaacattttcagctgtcacaaatgggaggggggattgttattggcatctagtgaatagaggctagggacactgttatacatcctacgatgcacaggatgccctcccataataaagaattatccagcctcaaatgtcaaccatgtcagggttgagaaactctgtgctataaaaatacagattaagaaaatgtgaaccttggcttttaaaagctcacagcttaagtggggaaatagacacataggtaaatatgaaaaatacaatgcaggggctgagggcaggggctcacgcctgtaattccaacactttgagaggcctaagagggaggattgcttgaagcagggagtttgagagcagcctgggcaacaaagcaagaatcctgtctctacaaaacaaaaacaaaaaccaggcagtggtgcagcagaagtggttcagtgagatggagaaattcagatgaagagagggaagggatgtagcaccatcttgagctatttaagggctgtaatgtgaaagagggasagggctttttatgtgtaaccctaagtggtagatagatttcagcttcagaaaagatgagccaataagctccttgcaggtatgaaatgtgtgtgtctcttcaacagttacatcctcatgtctagaacagtgcctgacaatggagtaaggcttaataaatgcttgtcgaataatagtgaaatagataaatggatgaactcaagcatccaagggcaagttttgaaagttaagattgagtcccatcagaagattatctgattttatgac

SEQ ID NO: 688274 - DNA, 1489 bp, Homo sapiens
tttaaggttagagatgacctcaacttttatttggcatacattagagggcctaaaaattgttttgtatataacaagtgctaattagtgtgcccatgttgtttatcatatacctttgtctattacaatttcataaaaacagaataaaacaaggactatctagggcaaaccaggatgtatggttacccatcaacatacattggctgattctgaactgaatcacagtctttcctatggctaattttttttccctcagaacttagtggaacagtcagcctggtcaaaagaaaaaatgtcgtacttgattgcaataataatgtgaatcaactttgattgagcccctatgttccaggttcatctcattaaatcctcaccacaacactatgagatagatgtggctatatttctcctcttattgatgaggaaactgagtctctcagatgttgagtaactctcccaagattgcaccactaggttcacagtgctggctccagattcagagtgcccaggtttgaatctgaaatacaaaatgggcatggaatcctagttcaagaaatatcatgggcatccgtgaaacaatgtatttaaaaagttttgcaaatggtaaattactcaaatgtgaattgcatgccaatgtgtagttttttgcaggatatagtgccagagcagtgggaggtgattttatccccaaggaaatttggcagagtcaggaaacattttcagctgtcacaaatgggaggggggattgttattggcatctagtgaatagaggctagggacactgttatacatcctacgatgcacaggatgccctcccataataaagaattatccagcctcaaatgtcaaccatgtcagggttgagaaactctgtgctataaaaatacagattaagaaaatgtgaaccttggcttttaaaagctcacagcttaagtggggaaatagacacataggtaaatatgaaaaatacaatgcaggggctgagggcaggggctcacgcctgtaattccaacactttgagaggcctaagagggaggattgcttgaagcagggagtttgagagcagcctgggcaacaaagcaagaatcctgtctctacaaaacaaaaacaaaaaccaggcagtggtgcagcagaagtggttcagtgagatggagaaattcagatgaagagagggaagggatgtagcaccatcttgagctatttaagggctgtaatgtgaaagagggagagggctttttatgtgtaaccctaagtggtagatagatttcagcttcagaaaagatgagccrataagctccttgcaggtatgaaatgtgtgtgtctcttcaacagttacatcctcatgtctagaacagtgcctgacaatggagtaaggcttaataaatgcttgtcgaataatagtgaaatagataaatggatgaactcaagcatccaagggcaagttttgaaagttaagattgagtcccatcagaagattatctgattttatgac

SEQ ID NO: 688275 - DNA, 1489 bp, Homo sapiens
tttaaggttagagatgacctcaacttttatttggcatacattagagggcctaaaaattgttttgtatataacaagtgctaattagtgtgcccatgttgtttatcatatacctttgtctattacaatttcataaaaacagaataaaacaaggactatctagggcaaaccaggatgtatggttacccatcaacatacattggctgattctgaactgaatcacagtctttcctatggctaattttttttccctcagaacttagtggaacagtcagcctggtcaaaagaaaaaatgtcgtacttgattgcaataataatgtgaatcaactttgattgagcccctatgttccaggttcatctcattaaatcctcaccacaacactatgagatagatgtggctatatttctcctcttattgatgaggaaactgagtctctcagatgttgagtaactctcccaagattgcaccactaggttcacagtgctggctccagattcagagtgcccaggtttgaatctgaaatacaaaatgggcatggaatcctagttcaagaaatatcatgggcatccgtgaaacaatgtatttaaaaagttttgcaaatggtaaattactcaaatgtgaattgcatgccaatgtgtagttttttgcaggatatagtgccagagcagtgggaggtgattttatccccaaggaaatttggcagagtcaggaaacattttcagctgtcacaaatgggaggggggattgttattggcatctagtgaatagaggctagggacactgttatacatcctacgatgcacaggatgccctcccataataaagaattatccagcctcaaatgtcaaccatgtcagggttgagaaactctgtgctataaaaatacagattaagaaaatgtgaaccttggcttttaaaagctcacagcttaagtggggaaatagacacataggtaaatatgaaaaatacaatgcaggggctgagggcaggggctcacgcctgtaattccaacactttgagaggcctaagagggaggattgcttgaagcagggagtttgagagcagcctgggcaacaaagcaagaatcctgtctctacaaaacaaaaacaaaaaccaggcagtggtgcagcagaagtggttcagtgagatggagaaattcagatgaagagagggaagggatgtagcaccatcttgagctatttaagggctgtaatgtgaaagagggagagggctttttatgtgtaaccctaagtggtagatagatttcagcttcagaaaagatgagccaataagctccttgcaggtatgaaatgtgtgtgtctcttcaacagttacatcctcatgtctagaacagtgcctgacaatggagtaaggcttaataaatgcttgtcgaataatagtgaaatagataaatggatgaactcaagcatccaagggcaagttttgaaagttargattgagtcccatcagaagattatctgattttatgac

SEQ ID NO: 688276 - DNA, 621 bp, Homo sapiens
tgctcttgtctttctcaatgtgcagcagaagactgtattttgttaaaagatcagaaataaatgaaaattaaaatgtccaggttttgacaggtttgaacaatagtgtgattagtgattccagttctgcagaaagttgtcattttctgcrttttactacttgttccatgtaatgctaaaatactagtgccaatagtagtatttaatttaaaatggttcagaattcccaaatttagtaaatgagtgaaactaaatattaaatatatttcaaaatataaatttataagcactttgaaatgcaggtaaaatgtaaatttatgaaaatactaatgttatataagcactatacttatcatataaaatattagccatactgctttgtggcatctttcaacttcagtcctcagccattttgatttctgtctcctggttgaccttaggggtggtcttggcccttagttcttctcttcccttagccttggtggagatagctgcatgctttacaaggcttctctcaccagcttcattttcagtcttgatgatgaaaattgtgatgatgatgttgactggtgttgttgctattattattagataggacattaagggaagatggaagaaatcagg

SEQ ID NO: 688277 - DNA, 621 bp, Homo sapiens
tgctcttgtctttctcaatgtgcagcagaagactgtattttgttaaaagatcagaaataaatgaaaattaaaatgtccaggttttgacaggtttgaacaatagtgtgattagtgattccagttctgcagaaagttgtcattttctgcgttttactacttrttccatgtaatgctaaaatactagtgccaatagtagtatttaatttaaaatggttcagaattcccaaatttagtaaatgagtgaaactaaatattaaatatatttcaaaatataaatttataagcactttgaaatgcaggtaaaatgtaaatttatgaaaatactaatgttatataagcactatacttatcatataaaatattagccatactgctttgtggcatctttcaacttcagtcctcagccattttgatttctgtctcctggttgaccttaggggtggtcttggcccttagttcttctcttcccttagccttggtggagatagctgcatgctttacaaggcttctctcaccagcttcattttcagtcttgatgatgaaaattgtgatgatgatgttgactggtgttgttgctattattattagataggacattaagggaagatggaagaaatcagg

SEQ ID NO: 688278 - DNA, 621 bp, Homo sapiens
tgctcttgtctttctcaatgtgcagcagaagactgtattttgttaaaagatcagaaataaatgaaaattaaaatgtccaggttttgacaggtttgaacaatagtgtgattagtgattccagttctgcagaaagttgtcattttctgcgttttactacttgttccatgtaatgctaaaatactagtgccartagtagtatttaatttaaaatggttcagaattcccaaatttagtaaatgagtgaaactaaatattaaatatatttcaaaatataaatttataagcactttgaaatgcaggtaaaatgtaaatttatgaaaatactaatgttatataagcactatacttatcatataaaatattagccatactgctttgtggcatctttcaacttcagtcctcagccattttgatttctgtctcctggttgaccttaggggtggtcttggcccttagttcttctcttcccttagccttggtggagatagctgcatgctttacaaggcttctctcaccagcttcattttcagtcttgatgatgaaaattgtgatgatgatgttgactggtgttgttgctattattattagataggacattaagggaagatggaagaaatcagg

SEQ ID NO: 688279 - DNA, 621 bp, Homo sapiens
tgctcttgtctttctcaatgtgcagcagaagactgtattttgttaaaagatcagaaataaatgaaaattaaaatgtccaggttttgacaggtttgaacaatagtgtgattagtgattccagttctgcagaaagttgtcattttctgcgttttactacttgttccatgtaatgctaaaatactagtgccaatagtagtatttaatttaaaatggttcagaattcccaaatttagtaaatgagtgaaactaaatattaaatatatttcaaaatataaatttataagcactttgaaatgcaggtaaaatgtaaatttatgaaaatactaatgttatataagcactatacttatcatataaaatattagccatactgctttgtggcatctttcaacttcagtcctcagccattttgatttctgtctcctggttgaccttaggggtggtcttggcccttagttcttctcttcccttagccttgktggagatagctgcatgctttacaaggcttctctcaccagcttcattttcagtcttgatgatgaaaattgtgatgatgatgttgactggtgttgttgctattattattagataggacattaagggaagatggaagaaatcagg

SEQ ID NO: 688280 - DNA, 627 bp, Homo sapiens
ctttttcattttgtatgcagtttctgagagtccacactgtaacaatgaatctcatgacgaaagatgttctggggctatacagtgtaagcactgtgggaagataggtgctggctctctgtaatatgcagcaccaggatttgcacaacctcacattgtcatcactattgtacagtaaacggataaatcctcaaattaggattttattagagtataaatatgccctgggaggaaatcatagcctcgtggaatgcttggggtgagtgctgctcatrtcacactgtctatggaatcagaaaagttaccttaactgccccaaagtggcaatcttttgaatatacaaaatgaggtgaatttaaattaccataccacccaatccatctaaattagaatctgaaattggtaatgcgtctcccttaagcttctaattaatttccataatgtagtttactcataacacattctaaacagccaggtataatctgtctcatccaatttccttggggttttaaacattctatgtaaaaatatgaaatacttatcggtttccctgggcttacctttcaattttcctactatttatgtattcagaaagtttgatgaagtcaggtataagagtgacacaagaca

SEQ ID NO: 688281 - DNA, 1036 bp, Homo sapiens
aaaaaaataatgaagcgtagaaaactaacatcaaatacttaggtcaccccctggaaaaggagacatacaagcttcatttgtttgatccagctctgaaagggctctgcacacccctgggatgtgaggaatgctgtgctggataactgacccaccctctccaggaggaacgttttattccagttggggttcagtgtctgccctggggctctgacagctcatttatggaacctgcaaagattttagagggaaatatcagttaggtcaatgtttcattccctttgagaatgctcagtggggagagataagggtgtcggattaattacaccagatgctgtatcgggagacatccagcttctgtgcattgccaaaaaaaaaaaaatccttatggtggccttgaatacaaatatacaaatatcacgttcatggtaataacactgtatttacagtgcatttaagaggtgttcaaaggcttctcatagacttgagaacatttggtcttgagagaagtcattctgaacagagtccagacttaagagttcggtccaaaggaagaagctgggacacgacttcttcagtttcagttctgacaccatccctgatatgtgacccggggaaaattacttccattttctgaatttctattttctcactgctgaatagagatattgtgagcaaaagagacagtaatacacygagtgcctagcatggtggtgggaacattgtgagccctatctaaaaggccgctgttatcacaagttagtatgtcccaacctgcacagccatgcagtgagacttgctgtctgaaacccagtgcttccatcatggcaggctttcttttagaaaagtttattgtttataggtttgatggggggaaaatcacactaaagattggtaatattgcataaaacacctaatgatttggacaatgacttctcatccaggattcaaagaaaaagaaaacaaaataattttatcacatcctgatcttaactttgagttgaattaagttgaattgaccaggagcaaagtaaactac

SEQ ID NO: 688282 - DNA, 673 bp, Homo sapiens
ttcttgctctgattccagcttgttttctgtctccttggctacctctttctggaagaatcaagtcttctgatcagcaagccaggacttcyggagtaattctaaaaagccagtgggtcttgtccaaccagaccctgtacagactaggaggtctgggatattctgtgacaattccaggctgaagcagaaaagcagaggctacaggtaaacaggagcaagcagggtcaattgggcctccacctatttccagcataattcccatctatttccacatatgccacatatctggcatatgtgattccgtcaaaaccagcctctgtaacatcttcttgagctgccagtagcaaatgtagtgccattgtcgctatatcatttgccatccaaagtggcaaagtgaaagtggtgctattaataactatgttgggaaaacaggcatcaccagaccaactgggctatgtggtctccctcattaccgtctcttggtgagtgatcctactgcctggcagagtaataagttacttttccagtttaactaggaaaagaagaaattcaataaggacctgataaaggagggtaaaaccagagaaaataagcaatcattgggggaaatatattaagcacatcattaagaaggaatcacaaagctcctaaaattgttgagtgccgcacgtttgca

SEQ ID NO: 688283 - DNA, 673 bp, Homo sapiens
ttcttgctctgattccagcttgttttctgtctccttggctacctctttctggaagaatcaagtcttctgatcagcaagccaggacttccggagtaattctaaaaagccagtgggtcttgtccaaccagaccctgtacagactaggaggtctgggatattctgtgacaattccaggctgaagcagaaaagcagaggctacaggtaaacaggagcaagcagggtcaattgggcctccacctatttccagcataattcccatctatttccacatatgccacatatctggcatatgtgattcygtcaaaaccagcctctgtaacatcttcttgagctgccagtagcaaatgtagtgccattgtcgctatatcatttgccatccaaagtggcaaagtgaaagtggtgctattaataactatgttgggaaaacaggcatcaccagaccaactgggctatgtggtctccctcattaccgtctcttggtgagtgatcctactgcctggcagagtaataagttacttttccagtttaactaggaaaagaagaaattcaataaggacctgataaaggagggtaaaaccagagaaaataagcaatcattgggggaaatatattaagcacatcattaagaaggaatcacaaagctcctaaaattgttgagtgccgcacgtttgca

SEQ ID NO: 688284 - DNA, 633 bp, Homo sapiens
gatataagtagctcatccaacctagataccattaacatgattgcttaggacaaggcagcaataggtaacgctacgaggcttacgttgatttgaagatactagtaggcagttaacaggtggtagatggtaccctttggagtcatgaacatggagtgcctatgctgtgccaatcgatggtatgtgcgtattagtctgttctcaccctgctaataaagatatacctgagaccgggtaatttacaaggaaaggaggtttaatggagtcacagttccacatggctggggaggcctcatcatcatggctgaaggcaaatgaggagcaaagtcacatcttacatggcagcaggcaggagaatgtgtggaggggaactgccctttataaaaccatcagatcttgtaagactcatttactctcaygagaacagcatgggaaaaacctgcccccatgattcagttacctcctaccaggtccctcctacaacatgtagggataatgggagctacaattcaagatgagatttgggtggggacacagctaaaccatatcagtgtgtaactctgggcaagtcacaaacatactctgcatctcagctccctcctctgtgacatgcagatgataatagtgctgagatta

SEQ ID NO: 688285 - DNA, 903 bp, Homo sapiens
tttaactttttataatttgtgtatattttatagaagaaaataacaaaaaagactagyatctacatattatgcatttatgaccatctaacttttcttaattgttttgatatttctaggctactcagttcatctgtgagttttctcaaattgtcataagtgtccaaaaattattctaaaatattgtaaaaaattcacttatcagtggacttgcacagttcaaacctgttattcaactgtaatcatactaattataggcaggttaaattcctttaagttagatgtttaaaaacatatgcaattcaggaaggacataattaaatcataagggccaagaaaggtgtaaagtaagggttaggtaaacacattccaggcaaataaccaaaaggaaaacaaaaactagtgcaattatactcccagcagacaaatataactttgagaaaatagaaatggaaacaaaaagacacacaaatttcattgctaggaatacggagagttaatgataaaaagaaataattgatcaggaagtgattacaatcctgaacttgtaggcatttagcaacatggcctcataatacataaggcaaaagtgtatagaattataagatgtttaatacattgctctcaaaaactgataggtcatagagactaacatctagtaaggatagagaatattgcaacaatataactaataagccagtggccaattgaagggtcctctttcaatggttataaattaatccttgtcatgaaaattgatcaaatacaaagtctcaaatatacagaaatttcatctcaaactgagtaaactcttgattgtattgtaataaattaagaaaattcctaatttattataatcaacaactttttgtgaaaagggtaaataaagcatatattcggaaacaa

SEQ ID NO: 688286 - DNA, 593 bp, Homo sapiens
tcatagatgtagttttaaatttttaatttcgattgcatttgtaattatttctaattttctctctctgtccccctccccagttcattttaccagatttttagtggttctttgcataactttgatctcaattttatcaatttcaatctttagctttacgatattctttcttctagtttatctgagtttactatgttattcttttaaaaataatttaattttccagacagaaaaggtcatataygttatgattacatttatatgaaatgttcagaataatcaagtccattgagacagaaagtagatctgcggtttccagggactgagtagagggcttgatagtaggatatttctttttgggttgataaattgttttggaactagatagaggtagcaattgcacaatattgtgaatgactaactgccattgaattgttcattttaaaatgattttaatatttatgtaaatttaacctcaatgaaaataacttcatttgaaccattagtctatgaatcttcagtctttatgttttcttgctatccattaattctatagagttcctctaaaatactgcttttgttgtgtcacacaagtg

SEQ ID NO: 688287 - DNA, 818 bp, Homo sapiens
tttaaatgtaccatgagtacgcaatctgcaaaatccagagactgtgagaaactacagattaaacattgtgtagataaagaacaggatgtatatttaaaggatacattaaatcaaaattttaaagtggcacggataaaggatggtattttgaaagacaagtctgggctaaagcacacacacagaggaaagtgattactataaaagtgagggtactaattgcatataggaagggagagggttgaaactggaggggaccacrggaaaggggcctctgtaatggttgacaaggctgtatttcttgacctcttggcttcaccatacatctgatttgtgtgattcattttgcgttttattttgtgatttattttgtgattattgtgtgttttattttgaaatggattatttttaaaaggagctaatttctcaaaatacatgaggaatctcccaaaatatctggataagacgatgaagaaatgtgattatcaaactagaaactaatactcgttgtaatttcatactttaaatataatatgcaataactaagttatttaaataaatataagatgccaaaacaattaactaaagtattaaaactttcaccaaagaatgttttttgcagggcttcagatcttgccaagcagtaatctaagtgaatttcatcaatgaatttttttgttgagttggctgaattaactattgtctgtcatatttgagacaaagacttgaaacatctgagacaaaggacttgactaaatcgccttgataacagtatctacactgtggttttttgaagtgaataccatacagaaatggcaaga

SEQ ID NO: 688288 - DNA, 818 bp, Homo sapiens
tttaaatgtaccatgagtacgcaatctgcaaaatccagagactgtgagaaactacagattaaacattgtgtagataaagaacaggatgtatatttaaaggatacattaaatcaaaattttaaagtggcacggataaaggatggtattttgaaagacaagtctgggctaaagcacacacacagaggaaagtgattactataaaagtgagggtactaattgcatataggaagggagagggttgaaactggaggggaccacgggaaaggggcctctgtaatggttgacaaggctgtatttcttgacctcttggcttcaccatacatctgatttgtgtgattcattttgcgttttattttgtgatttattttgtgattattgtgtgttttattttgaaatggattatttttaaaaggagctaatttctcaaaatacatgaggaatctcccaaaatatctggataagacgatgaagaaatgtgattatcaaactagaaactaatactcgttgtaatttcatactttaaatataatatgcaataactaagttatttaaataaatataagatgccaaaacaattaactaaagtattaaaactttcaccaaagaatgttttttgcagggcttcagatcttgccaarcagtaatctaagtgaatttcatcaatgaatttttttgttgagttggctgaattaactattgtctgtcatatttgagacaaagacttgaaacatctgagacaaaggacttgactaaatcgccttgataacagtatctacactgtggttttttgaagtgaataccatacagaaatggcaaga

SEQ ID NO: 688289 - DNA, 637 bp, Homo sapiens
atacagaacttgcctttatccttaaactgggccaataatttcctcatcatcaagtgtgtttgcttgtggaacaatgaatgttacagggagtccagttgataacacctgcccattcaagtctttgcttatgaaagaacaggcattttcttcactcttcctagtctctttacctttacactcatcakacaagtcagtttagtatactcgttgattttcttttcattttttttctattcttattctattatctggattccaacagagaaggtcctgaaaaatatatatttttttattttattacaccaatttatctggttttgaagcacaaatatgtattaacaacaaacttagtgaagaaggcttggagctcttacacacgaacacatacttttgatatattttagttctgttaaaaatgtacatagcacctctcccacccccacacactgcttataagtatagtagagaaaatgcagtatttcctcagaagacgatggagaattttccagcctcattcccttttaggatacttacagtctgaaaaaggcatttcatcccatcttgagccattgaggacaggtaaaagttggtgtccaacattagactaagtttctttggtaatgtaagaactacgaca

SEQ ID NO: 688290 - DNA, 637 bp, Homo sapiens
atacagaacttgcctttatccttaaactgggccaataatttcctcatcatcaagtgtgtttgcttgtggaacaatgaatgttacagggagtccagttgataacacctgcccattcaagtctttgcttatgaaagaacaggcattttcttcactcttcctagtctctttacctttacactcatcatacaagtcagtttagtatactcgttgattttcttttcattttttttctattcttattctattatctggattccaacagagaaggtcctgaaaaatatatatttttttattttattacaccaatttatctggttttgaagcacaaatatgtattaacaacaaacttagtgaagaaggcttggagctcttacacaygaacacatacttttgatatattttagttctgttaaaaatgtacatagcacctctcccacccccacacactgcttataagtatagtagagaaaatgcagtatttcctcagaagacgatggagaattttccagcctcattcccttttaggatacttacagtctgaaaaaggcatttcatcccatcttgagccattgaggacaggtaaaagttggtgtccaacattagactaagtttctttggtaatgtaagaactacgaca

SEQ ID NO: 688291 - DNA, 1034 bp, Homo sapiens
tgttgaaatagagaatcaaccaatttcaataaagacagcatcattactgcagttcttataaatatgtagttcaggccgggcacagtggctcacgcttgtaatcccagsattttgggaggccgaggcgggcggatcacaaggtcaggggatcaagaccatcctggctaacacggtgaaaccccgtctctactaacaatacaaaaaaattagccgggcgtggtggcaggagcctgtagtcccagcaactcgggaggctgagacaggaatgatgtgaacctacgaggtggagcttgcagtgagctgagatcacgccactgcactccagcctgggcaacagaacgagactccgtctcagaaataaaataaaataaatgtagttcattacttcagaaaataatagatgtactgtctattttagtaatcttctataacaaacttcagtgagtgatgccaagtatactatttcccagtaccacatatggtgtaataaaggattaaatatcggaaactccattttttttgttttgttttctgaccccagcgtaaaaagggacactaaaaggagctaaacatcctactgcaattacatttttgcttaaatgaatcttcaaaaaatgtagcttcatcgtcacataggataaatatcaatatgagcaaaattctcctactttactacattcccacactaaaaattattacaaagagactaagacttatctttcataagttatcattttatggacattaaaggcagttaatataataagctatttcacagttacagtattcatagcagaaattttgagtaagcaccaagccctttgtttcatttgtttgttgctttagattcagaggtacatgtgtctttgtttacataggtaaacttgtgtcacaggagtttgatgtacagattattttgtcacccaggtactaagcttagtatccaatagtaatgttttctaagcctttccctaatttcatcctctgataggccccactgtttgtcgttcccctctctgtgtccatacatcatt

SEQ ID NO: 688292 - DNA, 1034 bp, Homo sapiens
tgttgaaatagagaatcaaccaatttcaataaagacagcatcattactgcagttcttataaatatgtagttcaggccgggcacagtggctcacgcttgtaatcccagcattttgggaggccgaggcgggcggatcacaaggtcaggggatcaagaccatcctggctaacacggtgaaaccccgtctctactaacaatacaaaaaaattagccgggcgtggtggcaggagcctgtagtcccagcaactcgggaggctgagacaggaatgatgtgaacctacgaggtggagcttgcagtgagctgagatcacgccactgcactccagcctgggcaacagaacragactccgtctcagaaataaaataaaataaatgtagttcattacttcagaaaataatagatgtactgtctattttagtaatcttctataacaaacttcagtgagtgatgccaagtatactatttcccagtaccacatatggtgtaataaaggattaaatatcggaaactccattttttttgttttgttttctgaccccagcgtaaaaagggacactaaaaggagctaaacatcctactgcaattacatttttgcttaaatgaatcttcaaaaaatgtagcttcatcgtcacataggataaatatcaatatgagcaaaattctcctactttactacattcccacactaaaaattattacaaagagactaagacttatctttcataagttatcattttatggacattaaaggcagttaatataataagctatttcacagttacagtattcatagcagaaattttgagtaagcaccaagccctttgtttcatttgtttgttgctttagattcagaggtacatgtgtctttgtttacataggtaaacttgtgtcacaggagtttgatgtacagattattttgtcacccaggtactaagcttagtatccaatagtaatgttttctaagcctttccctaatttcatcctctgataggccccactgtttgtcgttcccctctctgtgtccatacatcatt

SEQ ID NO: 688293 - DNA, 1034 bp, Homo sapiens
tgttgaaatagagaatcaaccaatttcaataaagacagcatcattactgcagttcttataaatatgtagttcaggccgggcacagtggctcacgcttgtaatcccagcattttgggaggccgaggcgggcggatcacaaggtcaggggatcaagaccatcctggctaacacggtgaaaccccgtctctactaacaatacaaaaaaattagccgggcgtggtggcaggagcctgtagtcccagcaactcgggaggctgagacaggaatgatgtgaacctacgaggtggagcttgcagtgagctgagatcacgccactgcactccagcctgggcaacagaacgagactccgtctcagaaataaaataaaataaatgtagttcattacttcagaaaataatagatgtactgtctattttagtaatcttctataacaaacttcagtgagtgatgccaagtatactatttcccagtaccacatatggtgtaataaaggattaaatatcggaaactccattttttttgttttgttttctgaccccagcgtaaaaaggracactaaaaggagctaaacatcctactgcaattacatttttgcttaaatgaatcttcaaaaaatgtagcttcatcgtcacataggataaatatcaatatgagcaaaattctcctactttactacattcccacactaaaaattattacaaagagactaagacttatctttcataagttatcattttatggacattaaaggcagttaatataataagctatttcacagttacagtattcatagcagaaattttgagtaagcaccaagccctttgtttcatttgtttgttgctttagattcagaggtacatgtgtctttgtttacataggtaaacttgtgtcacaggagtttgatgtacagattattttgtcacccaggtactaagcttagtatccaatagtaatgttttctaagcctttccctaatttcatcctctgataggccccactgtttgtcgttcccctctctgtgtccatacatcatt

SEQ ID NO: 688294 - DNA, 1034 bp, Homo sapiens
tgttgaaatagagaatcaaccaatttcaataaagacagcatcattactgcagttcttataaatatgtagttcaggccgggcacagtggctcacgcttgtaatcccagcattttgggaggccgaggcgggcggatcacaaggtcaggggatcaagaccatcctggctaacacggtgaaaccccgtctctactaacaatacaaaaaaattagccgggcgtggtggcaggagcctgtagtcccagcaactcgggaggctgagacaggaatgatgtgaacctacgaggtggagcttgcagtgagctgagatcacgccactgcactccagcctgggcaacagaacgagactccgtctcagaaataaaataaaataaatgtagttcattacttcagaaaataatagatgtactgtctattttagtaatcttctataacaaacttcagtgagtgatgccaagtatactatttcccagtaccacatatggtgtaataaaggattaaatatcggaaactccattttttttgttttgttttctgaccccagcgtaaaaagggacactaaaaggagctaaacatcctactgcaattacatttttgcttaaatgaatcttcaaaaaatgtagcttcatcgtcacataggataaatatcaatatgagcaaaattctcctactttactacattcccacactaaaaattattacaaagagactaagacttatctttcataagttatcattttatggacattaaaggcagttaatataataagctatttcacagttacagtattcatagcagaaattttgagtaagcaccaagccctttgtttcatttgtttgttgctttagattcagaggtacatgtgtctttgtttacataggtaaacttgtgtcacaggagtttgatgtacagattattttgtcacccaggtactaagcttagtatccaatagtaatgttttctaagcctttccctaatttcatcctctgataggccccactgtttgtygttcccctctctgtgtccatacatcatt

SEQ ID NO: 688295 - DNA, 1034 bp, Homo sapiens
tgttgaaatagagaatcaaccaatttcaataaagacagcatcattactgcagttcttataaatatgtagttcaggccgggcacagtggctcacgcttgtaatcccagcattttgggaggccgaggcgggcggatcacaaggtcaggggatcaagaccatcctggctaacacggtgaaaccccgtctctactaacaatacaaaaaaattagccgggcgtggtggcaggagcctgtagtcccagcaactcgggaggctgagacaggaatgatgtgaacctacgaggtggagcttgcagtgagctgagatcacgccactgcactccagcctgggcaacagaacgagactccgtctcagaaataaaataaaataaatgtagttcattacttcagaaaataatagatgtactgtctattttagtaatcttctataacaaacttcagtgagtgatgccaagtatactatttcccagtaccacatatggtgtaataaaggattaaatatcggaaactccattttttttgttttgttttctgaccccagcgtaaaaagggacactaaaaggagctaaacatcctactgcaattacatttttgcttaaatgaatcttcaaaaaatgtagcttcatcgtcacataggataaatatcaatatgagcaaaattctcctactttactacattcccacactaaaaattattacaaagagactaagacttatctttcataagttatcattttatggacattaaaggcagttaatataataagctatttcacagttacagtattcatagcagaaattttgagtaagcaccaagccctttgtttcatttgtttgttgctttagattcagaggtacatgtgtctttgtttacataggtaaacttgtgtcacaggagtttgatgtacagattattttgtcacccaggtactaagcttagtatccaatagtaatgttttctaagcctttccctaatttcatcctctgataggccccactgtttgtckttcccctctctgtgtccatacatcatt

SEQ ID NO: 688296 - DNA, 1136 bp, Homo sapiens
taggtaatttgcttaaatcaagaaaaattttaaaagtactcattcttcataaccttctctaccagtcacactagaccttggttaatatttttatgttttgtggcattttaaaaacttttataaaaaatgttttactggatataatattatttgcacttttcccacaacactgaattcttcatgaatacaaattttaactgaaaataatagttcataataatttaagtaaacaacatccccctggacttttgggtttctttttttctgctgttttaaatatcrctaggatgaacctcttacacagaaacctttgttcccacttctgatcatttccttaagatacatatcaagtggcctgttaaacatctcttctctgggaaccacctgctcctcccgcaggtgttttctatatttatattcaagctgtggaatcctgcctttctaaccatacctaatgtgtgcagtgttgtatgccagacccaaactagtctatttagttttggaatttggcattttaacccgagagacatagacactgagtgttatttctagccaagtcacatactggcaacattccagaggaagaatgatcctgctgataagatcgccaaagctgccctggttcctgaccttcccaaagcctggaattttacccattccttgtatatccccagattcaccagtatcttttcaataaatacccttatttggacacaccatgtctggttggtttcggaaactttaaattaaagagacttaattagtgaaaaagaaagtaatgtttcttgaagaggtattacttggttaaatttaaggtcattcatgcatgttgccaagttgttccctggaaatttctatagtttgcattcccatcagaaaacacaagggaggatcctattatttttaatatttttgccaaatttaaaggcagatagtaccatttcattctttacatttgaatttcattaattaccaataatgtttaacatttttatatgcttattagttatattttgtcaacctctgtgcctatttccatttgcctgctgttatctaaggctttctcttattgatctatatacatctttatatattgagaatgttaaccttgatgagaatacttctcacattttgct

SEQ ID NO: 688297 - DNA, 1136 bp, Homo sapiens
taggtaatttgcttaaatcaagaaaaattttaaaagtactcattcttcataaccttctctaccagtcacactagaccttggttaatatttttatgttttgtggcattttaaaaacttttataaaaaatgttttactggatataatattatttgcacttttcccacaacactgaattcttcatgaatacaaattttaactgaaaataatagttcataataatttaagtaaacaacatccccctggacttttgggtttctttttttctgctgttttaaatatcactaggatgaacctcttacacagaaacctttgttcccacttctgatcatttccttaagatacatatcaagtggcctgttaaacatctcttctctgggaaccacctgctcctcccgcaggtgtttyctatatttatattcaagctgtggaatcctgcctttctaaccatacctaatgtgtgcagtgttgtatgccagacccaaactagtctatttagttttggaatttggcattttaacccgagagacatagacactgagtgttatttctagccaagtcacatactggcaacattccagaggaagaatgatcctgctgataagatcgccaaagctgccctggttcctgaccttcccaaagcctggaattttacccattccttgtatatccccagattcaccagtatcttttcaataaatacccttatttggacacaccatgtctggttggtttcggaaactttaaattaaagagacttaattagtgaaaaagaaagtaatgtttcttgaagaggtattacttggttaaatttaaggtcattcatgcatgttgccaagttgttccctggaaatttctatagtttgcattcccatcagaaaacacaagggaggatcctattatttttaatatttttgccaaatttaaaggcagatagtaccatttcattctttacatttgaatttcattaattaccaataatgtttaacatttttatatgcttattagttatattttgtcaacctctgtgcctatttccatttgcctgctgttatctaaggctttctcttattgatctatatacatctttatatattgagaatgttaaccttgatgagaatacttctcacattttgct

SEQ ID NO: 688298 - DNA, 1256 bp, Homo sapiens
acctgagaaacgctctttaaactctttatattctatttctttgggtgttaaagaggcacaataacaatacctatgccacgcagttttgtaaacattaaatgtgataatatacatgaagtgcttagaatagttttaggcaaataataagcactgcgtaagaatttgctatagttattactctcctaggtcactagacaatacacaaaaggtgaaagaagatcagcaatgaagaacagtattaaaacagagttacagggatccccaatgtcaattaaagggagaagaaaagtgacagctgttgacagatctattctcataatgaagatttcagaaaagaaggtgttttctagcaaaatatgctcttcttttcccaggaaaaggggggaaagtgtttgtattattttaaatagcaggctgtcgctgaacgtggttccacagttcagcacttgaggcagatggttaaaagccacatgcttgcggattttcccactttttccacactcacaractcacaaccacttttggtgcccgtggtttaacctctgtttctctaactcctgtttatgagtcaagcggtttcatgtcatcagattgatggggaaagtgtgaacaaggataaggatgtggaaggagtttccgcactgggaagcaccacagtgtgccaatgctaaaaaggaaaaaaagaattcaaagtatttgggctttgagggattgtatttagttaactttgaaagtttgaatgcgatcaaagtagctatctgaatgtttaaaagacattatttactggaatatatataaaaatctgtgttgaaacagactgaggtgatggtgcagagaagcagggtgggtctggggtcagagacaaacaagaagattgataatctctctccctttctccttggaaaaagcataggtcaaagtttaccaatgatgccaacatcctgtctggccaagacaaagctcagtaatgagggcagtgaggacactgtgagccatacaaagctgtttgtttctgctggcatgctaatgcaacaagttgctgatgaaagtgcctggaaaaaaaaaatcctattccttattctttgctcttgcttgaccccagtaatcttaaatctcagaattccatagaaccatagctaatcaaaactctgaaagccctcagagatttccctccacccccaactcatttcagagacaaagaaacaaagcttacaggttatttgactaaccacaagctactgaaagagctgggtctg

SEQ ID NO: 688299 - DNA, 649 bp, Homo sapiens
gttttttaagagatccaaatatgttttataatttcaatgttgaaaaggtcctctatcattgcactatctttctgctattttttctatgtttcctttatggaataaaattcttgaagtttgaagtaatcaaatccaacatttgatttaccttatgaagtgtctctatattatgaagataatcggttatatcttttctctgttaacttatagttttacattttatatacagtttttaaaatttatttatactttttttgatatatggagccttgctgtgttgcccaggctgaaatgcagtggtacgatcttggctcactgcaacctccacctgccaggttccagtgattctcctgtctcagtctctagggtggcagggattacaggcacgttccatcatgtctggctaagtcttgtatttacaatagagagggggttttaccctgttggccaggctggcgtcaggctcctgacctcaagtgatctgcccgccttggcctcccaaagtgcttgggattacaggtgtgcgccactgcgcccggcctatatgcaggtcttaatacacagcaatatctctgtgctctgcatttwgaacaacttttgtgtcttgcaccaataccacacccttacaattttggttttatagaatgat

SEQ ID NO: 688300 - DNA, 1383 bp, Homo sapiens
tccatgcgtgtccattaaggttgtcttcaccattttcctccttgggactgccttgatcagcaataacartctgaaaggagaggaggtgctagtggaaagagggagcagccccagtcaaatggtggttaaaggaaatcctgatagttgttagtgattaactctgctaaagtctcttcctggagtacattgtcaccggctttgtgtagtagctcatctctgttggagaaacctgactagagcaggcaaacttaccttgctgttgctgaaacttaaaagtcttatctttttctctgttggtatatttcttatattcacagaccctcggagggagtagtttctatcgtcaaaaaccaaaaccaaacttaaaaaaacaaacctccagatgtattttagttcgtgggggtttttttgtttttgtttttgttttttgagacgagtctcgctctgttgcccaggctggagtgcagtggcgcgatctcggctcactgcaacctctgcctccagggttcaagcgattcccctgtcttagcctcctgagtagctgggattacaggcgcctgccaccacacctggctaattttttgtatttttagtagtgaccgggtttcaccgtgttagccaggatggtcttgatatcctgacctcgtgatccacccgcctcggcctcccaaagtgctgggattacaggcgtgagccaccgcgcctggcctaaatgggcattttcaacgaaacgtgtttggagcaggtttatcttaatgttgattagcaaagagctacagtaccaaaagggatgaatatttttttttttggcaacactttgataaatattaattaaaatggttcagagtttatgtaatacaggttcagtttcccacgattgttgtaactggggtccacttttgaagacagaattgatacactggagctgtcttacacttttggctagattagtgatttttttctttgcattgatttattagatctctagacaattaggagcaatttgggatgaaagcaagtattataaaaaatagggataatgggataggaaaccatttcagctgtggaaagtaatagggattacgaagcttactttaccttttttaaaaagaagatttcaaataccttagaatagacatgttactaaaaagtagattcacagtaatcctgtgtcaggttttgggtttttattactcacttgtcccttaaggctccatgagttgtatttaaattgggagggaaaggggatcccccagatgttgactagttaacttgctactgagagtgaactgttaaaaatcactgattgaagcctttacagttagctagtatataaaacagagttagctagtatataaaacaaagttagctagtatataaaac

SEQ ID NO: 688301 - DNA, 2007 bp, Homo sapiens
ttatatatatatatgaaagaaagcgttctgaaacatattacatacccactattcttactacagactgtttgctgggctgtcatttcttcattttgctggcttcctgcttttttttttttttttttttgctgttcccacctggtactcttcaaaagggccactctgggtaaacctctgtgcttttctctgcttcctttcctttacccaggtcatttattggatcagctccatgaacacattaacataaaagctgtgcagtcacacaagcgcccccctaccccgccccatactcaggagggccctacacttgctttaacactctgctgtagctgtcttgatttttttttggtttttttttttttgagacagagtctctctctgttgtccaggctgcagtgcagtgrcacagtctcggctcactgtaacctctgcctcccaagttcaagcgattctcctgccttagcctccctaatagctgggattacaggcacctgccaacacacccagctaatttttgtatttttagtagagatggggtttcaccattttggccaggctggtctcgaactcctggcctcaagtgatccacctgccttgccctcccaaagtgctgggattacactgggcagccaccgccctccactttgaaattcctaataataatctcatttttggatttgtgttttatatgtgaagtcccatgggacgacgaagcatgcacgtgagcagaggagagctgctccatgtcatctgcccttggctgccccgctcacacatagtgcctgctgtgcccactgtgctgctctcatgacacccttacgaggccctccctttgagtctcctggactcccatgcattgagcctacaggagttctgtgctcatgttccatattcgctcgtctacaactgagtgagcagggaactgacagcccagagaggccagctttccattcaaaccagagcttgcttccaatttagaaagatgacaatgacattctaagaagcacaaatgaccaaggaaccctatcatatccttttttactaacgttgcttctctatgttagccaggcacttatactgaaaacggtgacatccaaagaaaggaaaagacaggcagcccaagttccttgtcctgtaagtccttccttacttgtcagtgaactgaaggtagaggtggaatgtatcaaaacgtgaaataaacagggttgagttggttttatccagcatctcccctattgtgataagaataaaacacatatgaatatatggggtatgaaacatgaattgcataattttggtgattctaaagatgagttaaatgcctttacatttgcacttaaaaccggcatcgtttatgccaaaggaggaaaagacacaggtatccatcgagggatgagcgaggtacctagagaagtcaaactcatagacagaaagtcgcagggtggcagtcagggcccgggtggaggggagactcgggagttactgcttaatggggacagaggattcagtttggaaagatgaaaaaagttcttggggaatgatggtgccgattgcaccacaaggtgaaagtacttaatgtcatacacttgaaaccatacacttgaaaatggttaaagtggtaaattttatgttatgggcattttactgcgatcaatcaatcaatggcaccatataaagataaatggcaaaattcatgctaataatttatgttttatttttcgttacttatagtcacaatagcaacgttaaaaaaaaacataaattgggagagattacagaaggaaaaaaagctttgtatttgagtacctttaacttcacttcgcccctgggttttcattttgcaccggcaccgcccactccatagccagcagggtcctcgctgtccatcaacatctgagttcctgcgggctggttgcctccttagcctccacattcaccaccctccatacacatgctcgccccttttccctccagtttctcctccttccctgttcttcctcccgcctg

SEQ ID NO: 688302 - DNA, 2007 bp, Homo sapiens
ttatatatatatatgaaagaaagcgttctgaaacatattacatacccactattcttactacagactgtttgctgggctgtcatttcttcattttgctggcttcctgcttttttttttttttttttttgctgttcccacctggtactcttcaaaagggccactctgggtaaacctctgtgcttttctctgcttcctttcctttacccaggtcatttattggatcagctccatgaacacattaacataaaagctgtgcagtcacacaagcgcccccctaccccgccccatactcaggagggccctacacttgctttaacactctgctgtagctgtcttgatttttttttggtttttttttttttgagacagagtctctctctgttgtccaggctgcagtgcagtggcacagtctcggctcactgtaacctctgcctcccaagttcaagcgattctcctgccttagcctccctaatagctgggattacaggcacctgccaacacacccagctaatttttgtatttttagtagagatggggtttcaccattttggccaggctggtctcgaactcctggcctcaagtgatccacctgccttgccctcccaaagtgctgggattacactgggcagccaccgccctccactttgaaattcctaataataatctcatttttggatttgtgttttatatgtgaagtcccatgggacgacgaagcatgcacgtgagcagaggagagctgctccatgtcatctgcccttggctgccccgctcacacatagtgcctgctgtgcccactgtgctgctctcatgacacccttacgaggccctccctttgagtctcctggactcccatgcattgagcctacaggagttctgtgctcatgttccatattcgctcgtctacaactgagtgagcagggaactgacagcccagagaggccagctttccattcaaaccagagcttgcttccaatttagaaagatgacaatgacattctaagaagcacaaatgaccaaggaaccctatcatatccttttttactaacgttgcttctctatgttagccaggcacttatactgaaaacggtgacatccaaagaaaggaaaagacaggcagcccaagttccttgtcctgtaagtccttccttacttgtcagtgaactgaaggtagaggtggaatgtatcaaaacgtgaaataaacagggttgagttggttttatccagcatctcccctattgtgataagaataaaacacatatgaatatatggggtatgaaacatgaattgcataattttggtgattctaaagatgagttaaatgcctttacatttgcacttaaaaccggcatcgtttatgccaaaggaggaaaagacacaggtatccatcgagggatgagcgaggtacctagagaagtcaaactcatagacagaaagtcgcagggtggcagtcagggcccgggtggaggggagactcgggagttactgcttaatggggacagaggattcagtttggaaagatgaaaaaagttcttggggaatgatggtgccgattgcaccacaaggtgaaagtacttaatgtcatacacttgaaaccatacacttgaaaatggttaaagtggtaaattttatgttatgggcattttactgcgatcaatcaatcaatggcaccatataaagataaatggcaaaattcatgctaataatttatgttttatttttcgttacttatartcacaatagcaacgttaaaaaaaaacataaattgggagagattacagaaggaaaaaaagctttgtatttgagtacctttaacttcacttcgcccctgggttttcattttgcaccggcaccgcccactccatagccagcagggtcctcgctgtccatcaacatctgagttcctgcgggctggttgcctccttagcctccacattcaccaccctccatacacatgctcgccccttttccctccagtttctcctccttccctgttcttcctcccgcctg

SEQ ID NO: 688303 - DNA, 2018 bp, Homo sapiens
gtggatagatattattatatatttgtctaaatccatagaatgtacaacaccaagagtgaacctcattggaaactatggactttgggtgataatgaygtgtcaatgtaggtttataaattgtggcaaatgtaccactctgactggggatgttgacaatggtgtagcttacacatgtctgggggcaggggtaacatgagaaactctgtaccttttgatcagtgttgctcaaactttctaaaaatgaagtctatttgaaacaagaattaattttaaaatttatacttttgagatagtcaatataaatagctccccaaattaacttgactattaataaaaataacccaagagaaataagaaaaataactattttaatgtttgaaaaaccacatgaagcaggcttccgtaatacagaccacaaatcaaagatgtatataaagagaaaaatatatgtatgtatgtatgcttacaagcattttcacatatataactatgtactcagtaggtgagggggaaaggtaataaaaaatgtaaaggaacaaagattaaaagctgattgtctgaaggtatatttcagtagccagtaggaatattgttttttttctgagtatggaagaccagtatcagtaggttgttattgatataagaaaatgttctagggtcatatttttcttggtggtctagcataatttctctacctaaaaggaagaggaaattcctaggtacaatattaactctttaatgcttaaaaggaaccttattctccctgcattggcaaaatgaaaggtgtgcttttcagaaactctgtgaaataactcttgtaggattttacactgtagtcaatggcagaaggacatacacttactgtagtctggccagtatcacatatttgcattatgcattcctcccttgaggttagttaacaccaacattcttagaacatactctggataaggaaatccagagaatatggccaagttattttatttttcttaagcaaatctaactgaataaaacagtattaatcccatcatttcacctcactaataccacatactaaacacgtacattaagtgattcccaatagcataatttataatgccgagtagagtggaaaaaggggccttcaaacccaatagtcagtgaaaccaaaccccattcccagccccataaccaaaggtgtgaatcagtaaaacgaagggcttaagagtaacttaaatattcaacataaaaaaaggtgattcagaggcttccatatacactcatatatagccatattaatacttcacaaaaattgcaagtcagtccagagaggggtcctttctatctgaaagatactatattttatccaactatcctttctgtaccttcagaaaaaaaaaataatgagaaatgtttaactcttctgtcatagtttgttttcctttcacagtgaaaaatattgtgaggtaaaggggtatatacatttattttacatttaattcatttgaaaatagcatgttaataacttgcactgaaatattttcaataacaagaatttgtcatgaagagctgagtcattcaggatataatgaaagaaccattacaagaatataaagacttacatactttatatattcaataaacaattcttgtttgaagctgttattaattccccatatccaattgtagcacatattatatctgaaaatatcactttaatttacatgtttacttattcactgtcttcttacttccattagatttgatggtacaagaaagcaaaagtcttttctttgacaatcgctttattcaaagtgcttggtgtagtgactaacacatactgaatggctgaaagaatccttatgacttatgtatgcctgaatgcaacatgaagagtggatatagatctgttggccctttaatgtggttacattatttaggttttaattgtttccttctttatattttgtattttggaggattatacagatcaagggaaatgaaattactatgcgccttagagagaagtgattgagtaa

SEQ ID NO: 688304 - DNA, 2018 bp, Homo sapiens
gtggatagatattattatatatttgtctaaatccatagaatgtacaacaccaagagtgaacctcattggaaactatggactttgggtgataatgatgtgtcaatgtaggtttataaattgtggcaaatgtaccactctgactggggatgttgacaatggtgtagcttacacatgtstgggggcaggggtaacatgagaaactctgtaccttttgatcagtgttgctcaaactttctaaaaatgaagtctatttgaaacaagaattaattttaaaatttatacttttgagatagtcaatataaatagctccccaaattaacttgactattaataaaaataacccaagagaaataagaaaaataactattttaatgtttgaaaaaccacatgaagcaggcttccgtaatacagaccacaaatcaaagatgtatataaagagaaaaatatatgtatgtatgtatgcttacaagcattttcacatatataactatgtactcagtaggtgagggggaaaggtaataaaaaatgtaaaggaacaaagattaaaagctgattgtctgaaggtatatttcagtagccagtaggaatattgttttttttctgagtatggaagaccagtatcagtaggttgttattgatataagaaaatgttctagggtcatatttttcttggtggtctagcataatttctctacctaaaaggaagaggaaattcctaggtacaatattaactctttaatgcttaaaaggaaccttattctccctgcattggcaaaatgaaaggtgtgcttttcagaaactctgtgaaataactcttgtaggattttacactgtagtcaatggcagaaggacatacacttactgtagtctggccagtatcacatatttgcattatgcattcctcccttgaggttagttaacaccaacattcttagaacatactctggataaggaaatccagagaatatggccaagttattttatttttcttaagcaaatctaactgaataaaacagtattaatcccatcatttcacctcactaataccacatactaaacacgtacattaagtgattcccaatagcataatttataatgccgagtagagtggaaaaaggggccttcaaacccaatagtcagtgaaaccaaaccccattcccagccccataaccaaaggtgtgaatcagtaaaacgaagggcttaagagtaacttaaatattcaacataaaaaaaggtgattcagaggcttccatatacactcatatatagccatattaatacttcacaaaaattgcaagtcagtccagagaggggtcctttctatctgaaagatactatattttatccaactatcctttctgtaccttcagaaaaaaaaaataatgagaaatgtttaactcttctgtcatagtttgttttcctttcacagtgaaaaatattgtgaggtaaaggggtatatacatttattttacatttaattcatttgaaaatagcatgttaataacttgcactgaaatattttcaataacaagaatttgtcatgaagagctgagtcattcaggatataatgaaagaaccattacaagaatataaagacttacatactttatatattcaataaacaattcttgtttgaagctgttattaattccccatatccaattgtagcacatattatatctgaaaatatcactttaatttacatgtttacttattcactgtcttcttacttccattagatttgatggtacaagaaagcaaaagtcttttctttgacaatcgctttattcaaagtgcttggtgtagtgactaacacatactgaatggctgaaagaatccttatgacttatgtatgcctgaatgcaacatgaagagtggatatagatctgttggccctttaatgtggttacattatttaggttttaattgtttccttctttatattttgtattttggaggattatacagatcaagggaaatgaaattactatgcgccttagagagaagtgattgagtaa

SEQ ID NO: 688305 - DNA, 2018 bp, Homo sapiens
gtggatagatattattatatatttgtctaaatccatagaatgtacaacaccaagagtgaacctcattggaaactatggactttgggtgataatgatgtgtcaatgtaggtttataaattgtggcaaatgtaccactctgactggggatgttgacaatggtgtagcttacacatgtctgggggcaggggtaacatgagaaactctgtaccttttgatcagtgttgctcaaactttctaaaaatgaagtctatttgaaacaagaattaattttaaaatttatacttttgagatagtcaatataaatagctccccaaattaacttgactattaataaaaataacccaagagaaataagaaaaataactattttaatgtttgaaaaacyacatgaagcaggcttccgtaatacagaccacaaatcaaagatgtatataaagagaaaaatatatgtatgtatgtatgcttacaagcattttcacatatataactatgtactcagtaggtgagggggaaaggtaataaaaaatgtaaaggaacaaagattaaaagctgattgtctgaaggtatatttcagtagccagtaggaatattgttttttttctgagtatggaagaccagtatcagtaggttgttattgatataagaaaatgttctagggtcatatttttcttggtggtctagcataatttctctacctaaaaggaagaggaaattcctaggtacaatattaactctttaatgcttaaaaggaaccttattctccctgcattggcaaaatgaaaggtgtgcttttcagaaactctgtgaaataactcttgtaggattttacactgtagtcaatggcagaaggacatacacttactgtagtctggccagtatcacatatttgcattatgcattcctcccttgaggttagttaacaccaacattcttagaacatactctggataaggaaatccagagaatatggccaagttattttatttttcttaagcaaatctaactgaataaaacagtattaatcccatcatttcacctcactaataccacatactaaacacgtacattaagtgattcccaatagcataatttataatgccgagtagagtggaaaaaggggccttcaaacccaatagtcagtgaaaccaaaccccattcccagccccataaccaaaggtgtgaatcagtaaaacgaagggcttaagagtaacttaaatattcaacataaaaaaaggtgattcagaggcttccatatacactcatatatagccatattaatacttcacaaaaattgcaagtcagtccagagaggggtcctttctatctgaaagatactatattttatccaactatcctttctgtaccttcagaaaaaaaaaataatgagaaatgtttaactcttctgtcatagtttgttttcctttcacagtgaaaaatattgtgaggtaaaggggtatatacatttattttacatttaattcatttgaaaatagcatgttaataacttgcactgaaatattttcaataacaagaatttgtcatgaagagctgagtcattcaggatataatgaaagaaccattacaagaatataaagacttacatactttatatattcaataaacaattcttgtttgaagctgttattaattccccatatccaattgtagcacatattatatctgaaaatatcactttaatttacatgtttacttattcactgtcttcttacttccattagatttgatggtacaagaaagcaaaagtcttttctttgacaatcgctttattcaaagtgcttggtgtagtgactaacacatactgaatggctgaaagaatccttatgacttatgtatgcctgaatgcaacatgaagagtggatatagatctgttggccctttaatgtggttacattatttaggttttaattgtttccttctttatattttgtattttggaggattatacagatcaagggaaatgaaattactatgcgccttagagagaagtgattgagtaa

SEQ ID NO: 688306 - DNA, 2018 bp, Homo sapiens
gtggatagatattattatatatttgtctaaatccatagaatgtacaacaccaagagtgaacctcattggaaactatggactttgggtgataatgatgtgtcaatgtaggtttataaattgtggcaaatgtaccactctgactggggatgttgacaatggtgtagcttacacatgtctgggggcaggggtaacatgagaaactctgtaccttttgatcagtgttgctcaaactttctaaaaatgaagtctatttgaaacaagaattaattttaaaatttatacttttgagatagtcaatataaatagctccccaaattaacttgactattaataaaaataacccaagagaaataagaaaaataactattttaatgtttgaaaaaccacatgaagcaggcttccgtaatacagaccacaaatcaaagatgtatataaagagaaaaatatatgtatgtatgtatgcttacaagcattttcacatatataactatgtactcagtaggtgagggggaaaggtaataaaaaatgtaaaggaacaaagattaaaagctgattgtctgaaggtatatttcagtagccagtaggaatattgttttttttctgagtatggaagaccagtatcagtaggttgttattgatataagaaaatgttctagggtcatatttttcttggtggtctagcataatttctctacctaaaaggaagaggaaattcctaggtacaatattaactctttaatgcttaaaaggaaccttattctccctgcattggcaaaatgaaaggtgtgcttttcagaaactctgtgaaataactcttgtaggattttacactgtagtcaatggcagaaggacatacacttactgtagtctggccagtatcacatatttgcattatgcattcctcccttgaggttagttaacaccaacattcttagaacatactctggataaggaaatccagagaatatggccaagttattttatttttcttaagcaaatctaactgaataaaacagtattaatcccatcatttcacctcactaataccacatactaaacacgtacattaagtgattcccaatagcataatttataatgccgagtagagtggaaaaaggggccttcaaacccaatagtcagtgaaaccaaaccccattcccagccccataaccaaaggtgtgaatcagtaaaacgaagggcttaagagtaacttaaatattcaacataaaaaaaggtgattcagaggcttccatatacactcatatatagccatattaatacttcacaaaaattgcaagtcagtccagagaggggtcctttctatctgaaagatactatattttatccaactatcctttctgtaccttcagaaaaaaaaaataatgagaaatgtttaactcttctgtcatagtttgttttcctttcacagtgaaaaatattgtgaggtaaaggggtatatacatttattttacatttaattcatttgaaaatagcatgttaataacttgcactgaaatattttcaataacaagaatttgtcatgaagagctgagtcattcaggatataatgaaagaaccattacaagaatataaagacttacatactttatatattcaataaacaattcttgtttgaagctgttattaattccccatatccaattgtagcacatattatatctgaaaatatcactttaatttacatgtttacttattcactgtcttcttacttccattagatttgatggtacaagaaagcaaaagtcttttctttgacaatcgctttattcaaagtgcttggtgtagtgactaacacatactgaatggctgaaagaatccttatgacttatgtatgcctgaatgcaacatgaagagtggatatagatctgttggccctttaatgtggttacattatttaggttttaattgtttccttctttatattttgtattttggaggattayacagatcaagggaaatgaaattactatgcgccttagagagaagtgattgagtaa

SEQ ID NO: 688307 - DNA, 607 bp, Homo sapiens
agctcacgcctgtaatcccagcactttgggaggctgaggcaggtggatcacgaggtcaggagttcgagaccagcctgaccaacatggtgaatccctgtctctactaaaaatacagaaattagccggggtggtggcatgcacctgtaatcccagctactcgggaggctgaggcaggaaaatcacttgaacgcagaaggcagaggttgcagtgagccgagatcgtgccactgcactccagcctgtgcaacaagagcgaaactccgtctcaaaaacaaaaaaaaagaaaacagcgggctgggcgtggtgtctcacgcctgtaatcccagcactttgggaggctgmggtgggcagatcacaaggccaggagatcaagaccattctggctaacacggtgaaaccccgtctctactaaaaatacaaaaaaattagctgggcgtggtggcgggctcctgtagtcccagctactcgggaggctgaggcgagactccatctcaaaataaaaaaaaaaaaaaaagaaagaaaacattgtggaaatgagtaagatgctccctattttcaggattatctcattactaccttgattcaattagggcgtactgagtaatgg

SEQ ID NO: 688308 - DNA, 1482 bp, Homo sapiens
  misc_feature 809, 909, 910, 911, 912, 913, 914, 915, 916, 917, 918, 919,920, 921, 922, 923, 924, 925, 926, 927, 928, 929, 930, 931,932, 933, 934, 935, 936, 937, 938, 939, 940, 941, 942, 943,944, 945, 946, 947, 948, 949, 950, 951, 952, 953, 954: n = A,T,C or G
  misc_feature 955, 956, 957, 958, 959, 960, 961, 962, 963, 964, 965, 966,967, 968, 969, 970, 971, 972, 973, 974, 975, 976, 977, 978,979, 980, 981, 982, 983, 984, 985, 986, 987, 988, 989, 990,991, 992, 993, 994, 995, 996, 997, 998, 999, 1000: n = A,T,C or G
  misc_feature 1001, 1002, 1003, 1004, 1005, 1006, 1007, 1008: n = A,T,C or G
tgacccgagagaaaagcaaactacgcctggtgagattcaagttcctagtgcctctaggatctgcagcgattaggcaatgaggatcttttccacttcttcttcttcttcttcttttttttttaaggttttttggctataagtttattcaatgcaaaagaatcctctccaattttactgaggtggctgaccacgtccacgaccaaatccgcctctaaactggaattcggttgctgacccagccccagcctcggctttcttgtcggcaccaggtggcacagcactccgtctgtaggtatctctgtcagcttcccctcttgtgagtctcgcaggtcgctcaccctccagacctttaggccgaggcctgccagtctctggacggctacggcgtaggatggcaggcacaatctctgggggcagatgaaggtaatcacggagatactggataccctcattggtaaggtaccagtagaaatgtctccaggcaaactgttccttcacgtagcctcgggacttgagagactgcatggccttcatgacatgaaggttgggcacattcttgtctgccagctccgggtgcttaggcatgtggacatccttcttggccaccatgactccctccttaaaaaggagttcataaatggcaatccggttcttcttaggcatcaacatctggcaggtctccgccacgcactggcttcatcctccccctctccctcggacaatcttcgcctaccagcggccccctaccccataaaataagcctccagcccctatcgctactcagaaatcggtgtgtggggagtgggaanaaagaggccccctgcccgcatcctggggaggagcacccgctaacgtggcaggatagcccggatgggagccgatggaactcgaactccacagaaaaacctnnnnnnnnnnnnnnnnnnnnnnnnnnnnnnnnnnnnnnnnnnnnnnnnnnnnnnnnnnnnnnnnnnnnnnnnnnnnnnnnnnnnnnnnnnnnnnnnnnnnggtttcatcagtaattttgtatttttgttattatgctttcacttggttacaaccaaagttattatactgtgcaagttgccactattttagaaaattaattgcagttctctgttacaatactgtgcctggttccaattagaaaatgaaagccgagagggaacacaggcagtttagtgttttgagaattcagcaaaacttcagctcagcagtctctaaaagcttaacctaaaaacaaaacaaaaattaacaaaaagccctctctggctcaagcagaagggaatcagacagaaaataagattctgagtcatagagagtagcatatccartctggaggaatcgcaaatggacagtgggaagggagagagaaaatatgtgcccagtcttactttcctgacttacccatcattaaaactgggaggactagcacgataaacagagaagggaaagatcaaaaggaccctagatcctagaaat

SEQ ID NO: 688309 - DNA, 585 bp, Homo sapiens
taggccgccgtggcccatggaggtgagtatgggtgaccccttccacctttgggctgtgctcccaggcaccatgggcccagggcccactcaccaacgacgtcatggtgaagccaatgacctcgaggtagccgtcgtcatgccgctggggctcaaagtcgtggtgctccccagggtggccccagggcatggtgcccgcacagtacctgcraaggcgggcgatgacatgggcctcaaaacacagtctctgcaggacaaggacagcagggctccccccagctccggtagccccctcctcacctggggatgttcaggaaaacaacacactggggtttcaggtcctggatcttgggagtcaagtccattccatcacactggaggcgggcggggagggtgttgaggtgcatgtgccaggtggcctccgcctccctcccttccggcccacccacccacggcagcctggccccgctcaccaccactcggatgtgcttggccaggtccttggagctgcccatcaggaagtcagagaaagctgtctgtgggagacagagggcgtcaccatctgctgacagagatctttcctcacca

SEQ ID NO: 688310 - DNA, 1475 bp, Homo sapiens
ggtaacatttcctacactcctctctatttctttctctttttttcttctccttatcctcccacttgaagttggcagaaaaaactaggagtggagaaattcccccctaagtaatcaaacatgtgaattagaaaggaaaggctgccaggtcctaggagctgggtggcaatttgtaagaaccagttgtatcaatgcacatgtgatgttgctgaaagtctggcatcctcagagaaggacagtttgatgtgttctccaattcgtatgcatgaatgcctatcctgctgagtctggttttcctctgtagacactcaaggagagtaaagtacagaaagctaagtgtctaccatgctgattttagccaaatgtttgcagactgtggcttccattaatgggaagcttgttgtagcaggaagagaactactcagaaatcctcttagtatgaagtatgatgcttggtggggtggaggactagagcctgatagacttgggttcacatattctttctaccagtcaagagctatatgacactggttaatttccgaatcacattgagcttctcttacctcactggtgaaatggcaacaacattgcctctttcataaggttgttataagaattatgtcacttttttttgcttataaccctccagtgatttctcaccgaactttgcataaaatcccaactcctagtcttggattatgtattatctgtgatctggcccttgcctaattctgacatgattacccaccgctctcccttttactcattatcatctgaacactcgagtcttttcttccttcctttaagatgctgaatttcttttagtttatccaggcctttgtatctgctgttccctctgcatggagtgttcttcctccaaatttttgcatgctactttcttgtcaaacatgtcttagcttaattcaccaccacccctgtcatcatcatcactgtcatcttcatcaccaccagcaccagcatcatcaccatcaccatcatcgtcatcatcatcacaattacagcgtcatcatcaccactatcattacactaccaccatcaccaccctttcaccatcatcatccccattgtcataattattgttattaacatttactaaatacttacgtgccccaaactattctttagcattgcatgtgtatcaattcattccattttcacatcaacactatgagggtagttaaattattatccccattttacagctgaggaacagaggcatgagaaagttcagtaagttgcacaaggtcccagctargcagagatggagctgggatgtgaatctaagcaaatactagaagccattatttaataattgtgccactctagctccctaaagccatccagttaccttttcttccatcactcagcttaaattctttgcatagcaaagaagagaaaacaaacaaacaaaaaattctttgcatagcaattatctctatttttttcttgtttaatca

SEQ ID NO: 688311 - DNA, 635 bp, Homo sapiens
aaaaaaaaaaaaaaaaacactattatagagtcacttaaggatgattttaaaaattaaaaaactagtgttttaatgtataaactcgtgttttttatagatgtgatattgatttctaatttaactccagtgtggttgaagaaaatatttctgtataatttcaataatttaaacatctattgggacttgttttgacgtccaatacatggcctattttggtgaatgtaccatgtgttcttggaaataatatatattctacagttcttgaatataatcttctagaaatgtcattaagtcagagtagttgatagctaaaattaatttttatttgcaacaatagatacttattttaaggacacctaggaacatgaggtaggaggagacttccctcaaccatctttctttgctctctgattttgtatgcttaaattctaggaagcactttaggatcaaaactgagaagaaattgtatttacattccagtagaatggcaaatcaatagaggcactatccttatttggattgatctatataaacatcctcaacagtgtattatactatggtttttaaaaattacagattgaatggcttccaattktaacaaatctcaacccaaatacaaaagtatattatgagcc

SEQ ID NO: 688312 - DNA, 607 bp, Homo sapiens
tgagcaataaatatgtgtaaactrtagcaaaaatcatgattgggaaacatagttgctaccttccaagagcttgctctcctgatggggctgtatagcatacacattcgagaaggtggcaaacaacacaaggtgtacatggtaagcagcacgtgctgccctagaacggtgtccagcagtggcacaatggcaggacatggaaggcatagcagtaaagagaccatatcactttgaccagagtgtagagctgcacctgtcaatttattcttttgtcttggtccatccacagatggagctgagtccgaagtaggcttgtggaaattgtcatactatccactgtaaggagttggtaggggcattctttattatgtccacacggttgccttttgtaagaatccccctggaaaattcttacctgatattagtgctgagaataaatagctgtttatctcatagacattctgaaatgtgtcattcacacttgctcctaggaatcttggaatataatttgtgccccattttagtctctttcttgtttttctttcctttttaccaaattttgatttatatgatcatattgtattatctttacccttataaaatacctcaa

SEQ ID NO: 688313 - DNA, 619 bp, Homo sapiens
aacaagtaagcaaaaaaactcatgtctggtaactttctttttaaatttgcaactgtcttttgaactctataatgagtattgcaactactartaatcacagaaatattattttcttgtgaatattttttattttgctcacttatgagaattctgatcttgcctccttagtttgtttcacatctatccctttcagatggtttctctttaccagttttctcagatgctggggagacactatctggaggaaaggaaagggtggaggatgcagcggtgtgaatctaggactgggtgggacagatttttaggaagtttggaggagtatctggtgtgtcaactgggctgctctgcttcctgaatgtattcagaaactgaatcaggtttttccatgtctttgctccatgaatcttgtgggtataaattttatccatgttgtcaaaaagggctcaccatcatcacatctggttccagatgtagggctggcagaaaatgacagtggaaggtgtgtaatctcactttgaagatattacacagaagtcacatatctcacttctgctcacattttctttgatggaatttagtcacatggttatacagagctttaagagttgctatttggccg

SEQ ID NO: 688314 - DNA, 619 bp, Homo sapiens
aacaagtaagcaaaaaaactcatgtctggtaactttctttttaaatttgcaactgtcttttgaactctataatgagtattgcaactactaataatcacagaaatattattttcttgtgaatattttttattttgctcacttatgagaattctgatyttgcctccttagtttgtttcacatctatccctttcagatggtttctctttaccagttttctcagatgctggggagacactatctggaggaaaggaaagggtggaggatgcagcggtgtgaatctaggactgggtgggacagatttttaggaagtttggaggagtatctggtgtgtcaactgggctgctctgcttcctgaatgtattcagaaactgaatcaggtttttccatgtctttgctccatgaatcttgtgggtataaattttatccatgttgtcaaaaagggctcaccatcatcacatctggttccagatgtagggctggcagaaaatgacagtggaaggtgtgtaatctcactttgaagatattacacagaagtcacatatctcacttctgctcacattttctttgatggaatttagtcacatggttatacagagctttaagagttgctatttggccg

SEQ ID NO: 688315 - DNA, 1824 bp, Homo sapiens
attgaccattctcacacagcattgcatattttaggctcagtaacgttgttttaggtgactgctgtatattcatactttctgatgtataataatgcattatgaatatctattccattaatacagttattcattatccgactaataaaaatttgtttatatgtattcattattctaagtaatacttctaaatacactctcacatatgccttctgtatttgcacaaaaatgtctttacattttttttttttttttgagacagagtctcgctctgtcgccaggctggtgtccagtggcgcaatcacgactcactgcaacctccacctcctgggttcaagtgattctcctgcctcagcttcctgagcagatgggactataggggtgtgccaccatgccaaggtaatttttgtatttttagtagagacggggtttcaccatgttggccaggatggtttcgatctcctgacctcatgatctgcctgccttggtctcccaaagtgctgggattacaggtgtgaaccaccatgcctggtcatgtctttaaaatttattaatgactatggattatcttgtgcatagggtttacatgtttccaactttataatacaaaaatattttccaaatcgttttatcaattatacattcctgacaacatgcatatgcttttataatttcttatctataccaacatttgttaataacaaatttctcaaatttgccaatctggagagaataacattgtatccaaatgtttccaaagtttgcatatttcccaatacttacaacattttaacagcttgccatttctgtttcctcctcagtgcagtatcagtttctatcttctgaccacattttcctgagttgaatttctattactgaaatayagtttttgtatattttctgtattagtctttcactagtatatttttcaaatatcttctttcaagtactgtattgtctgtatattaccagtaggagttacctattgctaaacattcaaaattattcacttttatcttcttgatgtatttatttgtgtatttttgcagaagtccttttcatgaaattgagatgtaaatatattctcctacagtttcttcaccatattttagcattaagctcttaatttcttgggaattggtttttttgtgtcatgtaaagtgaggatccaaatttatttttatttcttaagggatatctaagcaattgttactgaagaatcattttagttttgtaatattatcactattacatagcaatattcactatatctattggcctatttttgggatttccataatgacccatatattactggataaattcatgaggtgacgccacaaagataaatacaatagttttgtaatatatattaatgtctggtaaggttagccatgtcaacatattattcttcttcaaactattttggggttttgattttttcattaaaattttagaactgttttcaggaatattcacgcagagttatcattttgctttgcactggatctataaaataatttgggaaataattaacatatttacaatattgagttatccctggtgaaacatttgactaactcttattgattgtatcaatgaagacagaatacacaccttgcatactgtaatgttaatagggaggttaaagtaagttttaaaacttggtatgtttttgttgtttctttctactttaagcaaaatttttgcaagagaaatgtaaacagtctaaacctatgctgtctgcaaattgcaatagatgtagacagaattttgctaaagctgcttatggactgccagctactttgatggagaatttggagattt

SEQ ID NO: 688316 - DNA, 1824 bp, Homo sapiens
attgaccattctcacacagcattgcatattttaggctcagtaacgttgttttaggtgactgctgtatattcatactttctgatgtataataatgcattatgaatatctattccattaatacagttattcattatccgactaataaaaatttgtttatatgtattcattattctaagtaatacttctaaatacactctcacatatgccttctgtatttgcacaaaaatgtctttacattttttttttttttttgagacagagtctcgctctgtcgccaggctggtgtccagtggcgcaatcacgactcactgcaacctccacctcctgggttcaagtgattctcctgcctcagcttcctgagcagatgggactataggggtgtgccaccatgccaaggtaatttttgtatttttagtagagacggggtttcaccatgttggccaggatggtttcgatctcctgacctcatgatctgcctgccttggtctcccaaagtgctgggattacaggtgtgaaccaccatgcctggtcatgtctttaaaatttattaatgactatggattatcttgtgcatagggtttacatgtttccaactttataatacaaaaatattttccaaatcgttttatcaattatacattcctgacaacatgcatatgcttttataatttcttatctataccaacatttgttaataacaaatttctcaaatttgccaatctggagagaataacattgtatccaaatgtttccaaagtttgcatatttcccaatacttacaacattttaacagcttgccatttctgtttcctcctcagtgcagtatcagtttctatcttctgaccacattttcctgagttgaatttctattactgaaatacagtttttgtatattttctgyattagtctttcactagtatatttttcaaatatcttctttcaagtactgtattgtctgtatattaccagtaggagttacctattgctaaacattcaaaattattcacttttatcttcttgatgtatttatttgtgtatttttgcagaagtccttttcatgaaattgagatgtaaatatattctcctacagtttcttcaccatattttagcattaagctcttaatttcttgggaattggtttttttgtgtcatgtaaagtgaggatccaaatttatttttatttcttaagggatatctaagcaattgttactgaagaatcattttagttttgtaatattatcactattacatagcaatattcactatatctattggcctatttttgggatttccataatgacccatatattactggataaattcatgaggtgacgccacaaagataaatacaatagttttgtaatatatattaatgtctggtaaggttagccatgtcaacatattattcttcttcaaactattttggggttttgattttttcattaaaattttagaactgttttcaggaatattcacgcagagttatcattttgctttgcactggatctataaaataatttgggaaataattaacatatttacaatattgagttatccctggtgaaacatttgactaactcttattgattgtatcaatgaagacagaatacacaccttgcatactgtaatgttaatagggaggttaaagtaagttttaaaacttggtatgtttttgttgtttctttctactttaagcaaaatttttgcaagagaaatgtaaacagtctaaacctatgctgtctgcaaattgcaatagatgtagacagaattttgctaaagctgcttatggactgccagctactttgatggagaatttggagattt

SEQ ID NO: 688317 - DNA, 1824 bp, Homo sapiens
attgaccattctcacacagcattgcatattttaggctcagtaacgttgttttaggtgactgctgtatattcatactttctgatgtataataatgcattatgaatatctattccattaatacagttattcattatccgactaataaaaatttgtttatatgtattcattattctaagtaatacttctaaatacactctcacatatgccttctgtatttgcacaaaaatgtctttacattttttttttttttttgagacagagtctcgctctgtcgccaggctggtgtccagtggcgcaatcacgactcactgcaacctccacctcctgggttcaagtgattctcctgcctcagcttcctgagcagatgggactataggggtgtgccaccatgccaaggtaatttttgtatttttagtagagacggggtttcaccatgttggccaggatggtttcgatctcctgacctcatgatctgcctgccttggtctcccaaagtgctgggattacaggtgtgaaccaccatgcctggtcatgtctttaaaatttattaatgactatggattatcttgtgcatagggtttacatgtttccaactttataatacaaaaatattttccaaatcgttttatcaattatacattcctgacaacatgcatatgcttttataatttcttatctataccaacatttgttaataacaaatttctcaaatttgccaatctggagagaataacattgtatccaaatgtttccaaagtttgcatatttcccaatacttacaacattttaacagcttgccatttctgtttcctcctcagtgcagtatcagtttctatcttctgaccacattttcctgagttgaatttctattactgaaatacagtttttgtatattttctgtattagtctttcactagtatatttttcaaayatcttctttcaagtactgtattgtctgtatattaccagtaggagttacctattgctaaacattcaaaattattcacttttatcttcttgatgtatttatttgtgtatttttgcagaagtccttttcatgaaattgagatgtaaatatattctcctacagtttcttcaccatattttagcattaagctcttaatttcttgggaattggtttttttgtgtcatgtaaagtgaggatccaaatttatttttatttcttaagggatatctaagcaattgttactgaagaatcattttagttttgtaatattatcactattacatagcaatattcactatatctattggcctatttttgggatttccataatgacccatatattactggataaattcatgaggtgacgccacaaagataaatacaatagttttgtaatatatattaatgtctggtaaggttagccatgtcaacatattattcttcttcaaactattttggggttttgattttttcattaaaattttagaactgttttcaggaatattcacgcagagttatcattttgctttgcactggatctataaaataatttgggaaataattaacatatttacaatattgagttatccctggtgaaacatttgactaactcttattgattgtatcaatgaagacagaatacacaccttgcatactgtaatgttaatagggaggttaaagtaagttttaaaacttggtatgtttttgttgtttctttctactttaagcaaaatttttgcaagagaaatgtaaacagtctaaacctatgctgtctgcaaattgcaatagatgtagacagaattttgctaaagctgcttatggactgccagctactttgatggagaatttggagattt

SEQ ID NO: 688318 - DNA, 1480 bp, Homo sapiens
catgcctatagaatgaggtctccatcaaaacccaaaaggactgggttcagagagcttctggataacrcttcctggaaggtagtgcacccctccccgcatgccgggccccacatttatttctgaactttgtgcaatgtccgctaaaatacaacggcaaatgtaagtgtttccctgcgtgctgtgagctcttccagcaaatgaatgcaactaaatctgggagtggtggcaacctgatttatagccagttgctgagaagcacaggtaaaacaacgtagggcttcccattgttattggtgtgggaggcctgtctggcgggactcggccctttggaatctaatgctatgtcccggtagatagcgtcaccattgaattagaagacacacatatgtggagaataatctttctggtcatttactgcatgtcatatttacaatatgtaatcaaattctttatcctgaccttatggcacctgggtttaggaccatgatttgaaccaaacgttggtctgtcactttctgagtttgaaactttattttgcctttagcgttttgctattgctttttcgttttcttttgtttcgtttcgtttctaagttctggggtatatgtgcaggatgtgcagatttgttactaaggtaaacgtgtgccatggtggtttgctgcacctgtcaacccgtcacctaggtattaagcccagcatgcagtagctgtttttcttaacgctctgcctcccgaaaggccccagtgtgtgttgttccccttcctgtgtccatgggatctcacttttcagctcccattataagtgagaaggtggcgtttggttttctttccctggattagtttgctgacgataatgaccacacatcaccactgtttttgttttttagtataaagagtagtattttattgaataagatttgctcacagaaaaataagcttaaatctacaatgaatgccagaccctacagcagaaagcaattttctcacttttccacacacaatggttcctactaagtgaaaaaaaagccataaaatttcattcacaaatgtactactctgtctcaaaacatctcacgtaatcatgcactgtactaaagccatcagatcagttcttcagtcaggttaaagaagtatccctctaataactgacttttataatgctatcaatatccactcccaatcagtctgccattgttaatggtgtacagcattactgaatacaacggaattgatgacgcccatatccacagacaaaccgtgacttatgatggtttgacttatgatttttcaacgttatgatgggtttattggaatattagattcgtttctgagttacactgggtttatgagtatgcgaccctacactccagaaacagctgtataaggaaaaacaggagtacctaataaaaatatgcttagtgacttgggataaagcaatagatgttcacaagtgatggagagccgtgaaagagagatagcgg

SEQ ID NO: 688319 - DNA, 1480 bp, Homo sapiens
catgcctatagaatgaggtctccatcaaaacccaaaaggactgggttcagagagcttctggataacacttcctggaaggtagtgcacccctccccgcatgccgggccccacatttatttctgaactttgtgcaatgtccgctaaaatacaacggsaaatgtaagtgtttccctgcgtgctgtgagctcttccagcaaatgaatgcaactaaatctgggagtggtggcaacctgatttatagccagttgctgagaagcacaggtaaaacaacgtagggcttcccattgttattggtgtgggaggcctgtctggcgggactcggccctttggaatctaatgctatgtcccggtagatagcgtcaccattgaattagaagacacacatatgtggagaataatctttctggtcatttactgcatgtcatatttacaatatgtaatcaaattctttatcctgaccttatggcacctgggtttaggaccatgatttgaaccaaacgttggtctgtcactttctgagtttgaaactttattttgcctttagcgttttgctattgctttttcgttttcttttgtttcgtttcgtttctaagttctggggtatatgtgcaggatgtgcagatttgttactaaggtaaacgtgtgccatggtggtttgctgcacctgtcaacccgtcacctaggtattaagcccagcatgcagtagctgtttttcttaacgctctgcctcccgaaaggccccagtgtgtgttgttccccttcctgtgtccatgggatctcacttttcagctcccattataagtgagaaggtggcgtttggttttctttccctggattagtttgctgacgataatgaccacacatcaccactgtttttgttttttagtataaagagtagtattttattgaataagatttgctcacagaaaaataagcttaaatctacaatgaatgccagaccctacagcagaaagcaattttctcacttttccacacacaatggttcctactaagtgaaaaaaaagccataaaatttcattcacaaatgtactactctgtctcaaaacatctcacgtaatcatgcactgtactaaagccatcagatcagttcttcagtcaggttaaagaagtatccctctaataactgacttttataatgctatcaatatccactcccaatcagtctgccattgttaatggtgtacagcattactgaatacaacggaattgatgacgcccatatccacagacaaaccgtgacttatgatggtttgacttatgatttttcaacgttatgatgggtttattggaatattagattcgtttctgagttacactgggtttatgagtatgcgaccctacactccagaaacagctgtataaggaaaaacaggagtacctaataaaaatatgcttagtgacttgggataaagcaatagatgttcacaagtgatggagagccgtgaaagagagatagcgg

SEQ ID NO: 688320 - DNA, 1480 bp, Homo sapiens
catgcctatagaatgaggtctccatcaaaacccaaaaggactgggttcagagagcttctggataacacttcctggaaggtagtgcacccctccccgcatgccgggccccacatttatttctgaactttgtgcaatgtccgctaaaatacaacggcaaatgtaagtgtttccctgcgtgctgtgagctcttccagcaaatgaatgcaactaaatctgggagtggtggcaacctgatttatagccagttgctgagaagcacaggtaaaacaacgtagggcttcccattgttattggtgtgggaggcctgtctggcgggactcggccctttggaatctaatgctatgtcccggtagatagcgtcaccattgaattagaagacacacatatgtggagaataatctttctggtcatttactgcatgtcatatttacaatatgtaatcaaattctttatcctgaccttatggcacctgggtttaggaccatgatttgaaccaaacgttggtctgtcactttctgagtttgaaactttattttgcctttagcgttttgctattgctttttcgttttcttttgtttcgtttcgtttctaagttctggggtatatgtgcaggatgtgcagatttgttactaaggtaaacgtgtgccatggtggtttgctgcacctgtcaacccgtcacctaggtattaagcccagcatgcagtagctgtttttcttaacgctctgcctcccgaaaggccccagtgtgtgttgttccccttcctgtgtccatgggatctcacttttcagctcccattataagtgagaaggtggcgtttggttttctttccctggattagtttgctgacgataatgaccacacatcaccactgtttttgttttttagtataaagagtagtattttattgaataagatttgctcacagaaaaataagcttaaatctacaatgaatgccagaccctacagcagaaagcaattttctcacttttccacacacaatggttcctactaagtgaaaaaaaagccataraatttcattcacaaatgtactactctgtctcaaaacatctcacgtaatcatgcactgtactaaagccatcagatcagttcttcagtcaggttaaagaagtatccctctaataactgacttttataatgctatcaatatccactcccaatcagtctgccattgttaatggtgtacagcattactgaatacaacggaattgatgacgcccatatccacagacaaaccgtgacttatgatggtttgacttatgatttttcaacgttatgatgggtttattggaatattagattcgtttctgagttacactgggtttatgagtatgcgaccctacactccagaaacagctgtataaggaaaaacaggagtacctaataaaaatatgcttagtgacttgggataaagcaatagatgttcacaagtgatggagagccgtgaaagagagatagcgg

SEQ ID NO: 688321 - DNA, 643 bp, Homo sapiens
taggaatacaaagcaacttcttaaatacaaaaatattatccattttattttgttaattctaagatgcatcttacaattgtttgcatctcagatatgattacataaatcatttcgtttaagatcatctacaatgctagtcccttgaattaagaaatgaaagacaaatgtcattattattattagtgacaacttctgaaarttcttgccaagaaaataagacaaaaacagatataaaactttaggaaggatacaaattcatccctattagcagattatgtgattatttttcccaaaaacccaagggtcagctgataaactactagaactgataagatgattcattaagtggcaggatataaaataaatatgagatattaatgaccagttagagctttgttacatcctctaacaaatcattgctttgtttaccaagcagagagataatgcttctattgaaaaaatataaagaaagataatttcaactatgattataaaaattacttttgttaagacaccataagcataataaaagggcaaataacaacttgaaaaatattagcaatatatgtataacaggcaaaaatgtagaatcctaaaatataaagaactgttaaaaattagaaggggaacacttctatagaaa

SEQ ID NO: 688322 - DNA, 647 bp, Homo sapiens
atgtattcaagttgttattaaaaagttactgaatgttatctgaagatgtgaaatgtgtagtcaagtaaaaagttggcgtatactttcttgggctgcatatccaatttaattaaaaaattaaatctcagtttccttctaaattttgatagaactatattaaaagcttgtatacacagcattctaggaaatttctcttaactatcttttttttgttttttttkttttttttttttttttttgagaaagagtcttgctctcttgcccagtgcagtggtgccatcttggctcactgcaacctccacctccgggttcaagcaattctcctgcttcagcctcctgagtagctaggattacaggcatgcctacctaatatttacatttttagtagaaaccaggtttcaccatgttggccaggctgggcctcagcctcccaaagtgccaggattacaggtatgagccaccatagccggcctcttgtatcctttttgtccaatttcaaataatgtgtgaatcttgcctaactgctgttgcccacgttgaagctaaagagtaaaaacctattcatgaacaaagaaggcaggtgagacccggtaacaaactgtctctcttcccactttctctttcttattaatttggcaggatctccc

SEQ ID NO: 688323 - DNA, 647 bp, Homo sapiens
atgtattcaagttgttattaaaaagttactgaatgttatctgaagatgtgaaatgtgtagtcaagtaaaaagttggcgtatactttcttgggctgcatatccaatttaattaaaaaattaaatctcagtttccttctaaattttgatagaactatattaaaagcttgtatacacagcattctaggaaatttctcttaactatcttttttttgttttttttgttttttttttttttttttgaraaagagtcttgctctcttgcccagtgcagtggtgccatcttggctcactgcaacctccacctccgggttcaagcaattctcctgcttcagcctcctgagtagctaggattacaggcatgcctacctaatatttacatttttagtagaaaccaggtttcaccatgttggccaggctgggcctcagcctcccaaagtgccaggattacaggtatgagccaccatagccggcctcttgtatcctttttgtccaatttcaaataatgtgtgaatcttgcctaactgctgttgcccacgttgaagctaaagagtaaaaacctattcatgaacaaagaaggcaggtgagacccggtaacaaactgtctctcttcccactttctctttcttattaatttggcaggatctccc

SEQ ID NO: 688324 - DNA, 606 bp, Homo sapiens
cctgttgtatgcacagcattttaagtgcagccatgaaataagttagttgaaacaaaataaaatatctccttccagtatgctctgatattgtgtcaatgtaaatgccaaggcatgacagactgttttccatttataataagcggaatcttgagttgcattggaaagctaaaagatttgcgttgacttaaatgaaagtgtcctttttaaagcaaaaacaattcattttctctgtgcttatcacaggagatgagatttgaatgttatcagttgtgcatgaattcaacctcaaaaacaggaagcacacagctgtgattttggcctttttccatgaatctccacagcactgttccttttgatggtgagagtttgtataacatcatgaaccatctgagcatcagtgcaggttggaggcatgaccctcctcagggtgaacaagcctttgtgttgagagtttgagcrtttggcctgctcactcttccttctgttcaacagcagtttcatttgtgtaacccaggacatggcaaatcggattcattggatcctcctttttgtaccacaaaattaacttcctatcttccttaaagagcaagagtgcagaaataattg

SEQ ID NO: 688325 - DNA, 630 bp, Homo sapiens
attatggtgcaaaatagaccatttctaaatgtgcgtctagctctcactgatctctaaggggtattaaacacacagtgtgttcttgattttctcattggaacaggcaggtgatattgccaagcacttggtgtttggggccaaatgatcaagagaacagtcaaggtttagaacaaaatttaaaggaaatttcctgggaagcagaagacagataaggtaataattttgtttgctcagaatagtgtactttttggcagtcataacaaattctatttattcaataaagaaaaaatataaatatatatatgattgtaggacttcaaatatggttcactaaaaacttggtrtacccaaacaaataatcaggctcttattcacccccaaaagtcccaggcttaaagccctttcatgcagttgtggctttgttgagtgatgaaataactgggaatatagctagttgatgaaaaatttattcctatgttagaaaaaagaaagtcagcatagatcttgtcattctctagacaaatgcaaacctagtttaacatttgttttgtgtccagtgagtattataaaaatgcatagtggtataatagaacatagaaaataaaaagtcactttgacatctttaacatg

SEQ ID NO: 688326 - DNA, 659 bp, Homo sapiens
tggattctggagaatgtaggtagtacaaatgagctctcttcaacgttaaggtttatagcaactgattcttcagagaacatgaagccttatgcttgagataaatttcctcatctgctgtcatgattgacaggtccrtttggtttgttttatgggggaagggaacaggactggggcctgactcagggcacagtcctcaggtttggggctcttttgtatgactgcccacaagtgctatctactgtcacacctctttaaacctgcattttcggattttaacatcagcaaccaatgctcttctctgagcctcaacacagttattctttaaatacagttctatttccttggtgaagtctcctttgaggtactaaatttagcactgtcaatcagaagaacaggtggtatgtgacactaccaaataggtcctctcccatcatgctttcctaagacagccaatcacccagggccctgcctaaggatgtggggctgtcagcagatctggtgaatataagggcaggccagaccctggctcttgagcagtcgtgcattcccagcctcgcctcgggtgtagggattgcatagaaaagcaaaactacacagtcttgactgtgtagttttgtttttaggattagaggctcaccgattcatgtcggagatggtca

SEQ ID NO: 688327 - DNA, 1149 bp, Homo sapiens
ttttattttttgagacggagtcttgctctgtcacccaggctggaggcactatctcggctcactgcaacctccacctccctggttcaagcaattcccctgcctcagccccccacgagtagctgggattacaggcacataccaccacgcccggctaatttttttgtattttttagtagagatggggtttcaccatgttggccagactggtctcaaactcctgacctcaggcaatctgcccgccttggcctcccaaagtgctgggattacagacgtgagccacggcacctggccagagctgacaattattttaacaggatgccctaacttctgtgctgaaaacagactgaaagagacgcagaactcctcagattccctcccctcaccatagtgaacacatactgatgcacataagcaacttgcagaaagagcccctgctcgaaatcccacaccatatattttgaaggcatttgtgactttaactttcctcttaagaacaacatatttcagatataacatacsggaaagcacaaaatatgattcccttccagcctcctctgggaaatgcaccaccccagcatgcttactatgggcagaagttgtgggtagaagaaaagctgagagtcagccacacccatggtcatgaccagctgtctctggtatgctcgttcatcagttgagatctctggtctgctgagtagtacacagtttttcaacaagcaattcatgtacactggcaatactttcatggaatctggtagaataagctgaaaaagacaattttttgtttcatacgcttgatctttactgagaacaattccctgagcttcatctgtaagactgaaacattatttgcttctgaacttgtaaggatgtaaggattaactggtaacccatgtaaaacacctagagcacacagtaactggcacagagtaggcattcaaagagcagcagttgtttttattttatctagtgctacagcagtctggtgtagctgttatcagcactacccactcactgcttaggatgcaatcccagctctgtcttttagcaggtgtgtgaccctgggcaaattacttaccctgtctttttctcagtgttttttttttttagctgaatatggaataatagtatatctacttcataattggg

SEQ ID NO: 688328 - DNA, 1357 bp, Homo sapiens
gtttgttttcctgccaagtttctatccaaattcattattcaaattgtaaactttaaaaggagatatatcattcttggggtgttggttgtcttttcatttcagattctttgtattggtattgcaggctggccacaaagtacagttcaacattattttacccatgacagttctccatattacccgaggtaatagccaaggaagaaaaagatgaatgatctaaaaggaaagaygtaggacttctctagatttctttctagaaacatgcttcatgtctgtttcaaacagaactcaactccaacaatataaaggatatagtgaaaggtttttcacaaatctcaaggcgaaggactgggaaaagttgcttagaaggcctcatggactaagtcaaatttccactttcaagctttttatattccaggggaaaatagtggtcactgtgtggtatccacttcatggtcaaactttcaggatgactttctcccatctagcaattaaagccaactatttaatatttggtgattttaacctttgtggttcattttacagttattacttctctaaaacctttgtgctgggaattaacaagagttcttcaatctaatcacgctctttggcatcaaggtctcccaattctaaagttaccattgcataggctgttgcataattttagacgtcatggagagtcccactgatgaaatctgagaaggctcatgtcagaccactgactgctaaagacatcactacatgaaagatcagtagtgtgaaactttaaaaacatcgatccaaatgaatcaattaaatcaacattcatccctcttaagtgtgtggtttaaaactatcattgttgcttttttaaaaaaaccttacatagattttgagataaatgctggaatgctttgatggctacttctattctcgaatctccgttaatcgactttgtgctattcccctcttttcaacatcttccacttggtgtacattctttacttttagtacagtgcatgacagttgcaatgctttaaatctaaaaccgcctaacaaagctgacgctttaggtagggtagctttaagctctgtgaagtgttgattaaaaaccctttcccagactcaaactgatctttttggagattaatagaatattagataaaaggaagacgaacaattcaagagactcccactcagtcattctatataaggaaggaaggaaagtattcaatttttgaaagggagtacctcctggagtcttttattttatattattatggccactaataagtaataataaaataaccaccaccatcatccccctttttgccacccatatttcaaagatgagagtgtctcacatttaaagaca

SEQ ID NO: 688329 - DNA, 674 bp, Homo sapiens
cctgtgtagctcacatttttatatggtatcattttccttctgcctgaggaacttcccttaacatttcttgtagttgagttctgatggaaatgaaatcttcacatttgtgttgatttaaaaagggtttctggcctggcatggtggctccagcctataatgccagcactttggtaggccgaggtgggcggatcacttgaggtcaggagttcacgaccagcttggagaacrtggcaaaaccccgtctctccaaaaaatataaaaattagccaggcatggtggtgcatgcctgtagaccagctacttgggaggctgaggcatcagaattgcttgaacccaggaggcagaggttgcagagagctgagatcatgccactgcactccagcttgggtgacaaagtgagactctgtctcaaaaataaataaataaaatgaataaatagataaagctttcttttgctttcattgttgaaagataggcatttttaattgttatcctgaatggtgtttgttgagcttataggagtggtgggcttatattcttcatcgaatttgggaaattttcagctattgagtttcagatattttctttttactactcttaccccttcacccactccattctgggactacagttgcataaacactagaccagcattttaccacatattatgttca

SEQ ID NO: 688330 - DNA, 674 bp, Homo sapiens
cctgtgtagctcacatttttatatggtatcattttccttctgcctgaggaacttcccttaacatttcttgtagttgagttctgatggaaatgaaatcttcacatttgtgttgatttaaaaagggtttctggcctggcatggtggctccagcctataatgccagcactttggtaggccgaggtgggcggatcacttgaggtcaggagttcacgaccagcttggagaacgtggcaaaaccccgtctctccaaaaaatataaaaattagccaggcatggtggtgcatgcctgtagaccagctacttgggaggctgaggcatcagaattgcttgaacccaggaggcagaggttgcagagagctgagatcatgccactgcactccagcttgggtgacaaagtgagactctgtctcaaaaataaataaataaaatgaataaatagataaagctttcttttgctttcattgttgaaagataggcatttttaattgttatcctgaatggtgtttgttgagcttataggagtggtgggcttatattcttcatcgaatttgggaaattttcagctattragtttcagatattttctttttactactcttaccccttcacccactccattctgggactacagttgcataaacactagaccagcattttaccacatattatgttca

SEQ ID NO: 688331 - DNA, 506 bp, Homo sapiens
cctcacataacacacagtccaactgacagatccaagaactgagtaacagcttgggaaacaaaggaaaagacagcacagcagagcctcaaaaggaatggagtgacacatgcggagtacttaagaaagaggaaattcatgtcagggaacgatattgtggcactttctttaaatcaagagaactttccatgatcaaattccacacacaattatttggctcctctggaaaatgcaggcagcactgtctggtgaccacattgtgtctttaacagctgtattattttattaattacacaagatgggagaagctttttgtagttcattgtctgcagtgacatgataataaaacaatttggtattccaaattttatatattctttattctttgaatcttttcgaacttctgaaattcatactgcagacttcaaaccatgactttatcactaattattatgattttaagagacataaaaactcraagtaatagtctcaaattcaaagaaacattt

SEQ ID NO: 688332 - DNA, 912 bp, Homo sapiens
tgacaggaagactgttttcatctatactttgctgttgctatactaaaagattttcatatgtgatgaaatttcartgagaagcattataacataatatgtagagcataatagttaatgcatcatgaggaaagtctgccagcattcaaattacagtctgccatttactctctttgtgaccttggacaggtaacttaacctctttcctgattatatttatgaggccagaaaaagatcagaataagagaatgtgctccacagccatcaattcccccaggattccttgtgttctcttctctattctgaacataatctgtggcaatacagttgggataggaccagtgaacaaaagagcaagatgtggttgcagccaatcaactcctgcccactgtgcttgaagctgtgtcttatggtgggcattgttcatttggtaaaatcacttgctttcacactctgtatgaattcataccaggcttctcactgggcatgtttttatgttaatccgctgtcctttctgtgaaaaaggaagaaaactgggctcactatgttaacaatcttcatgctacctacccagatctcatgtatgtgaatagtagaaaaaagtctttccccagaagttttattttggcagttttctttcaagtacatcacagagtacctacttaaatataatctaggtaaacattagtgtttcatcttctgccaattgaaattcagagcagttgtaataggaactgaaggaccaaatgctcagtgtgtcttgagcaccctactgagaggatccaagcacacagtgacttttgaagtcactgtgggctctaggctctaatcattaccttgggaggtgttaaagagatgagaatgggccccatggatgcttttaactggtgttattatcattcataggagaaatca

SEQ ID NO: 688333 - DNA, 912 bp, Homo sapiens
tgacaggaagactgttttcatctatactttgctgttgctatactaaaagattttcatatgtgatgaaatttcagtgagaagcattataacataatatgtagagcataatagttaatgcatcatgaggaaagtctgccagcattcaaattacagtctgccatttactctctttgtgaccttggacaggtaacttaacctctttcctgattatatttatgaggccagaaaaagatcagaataagagaatgtgctccacagccatcaattcccccaggattccttgtgttctcttctctattctgaacataatctgtggcaatacagttgggataggaccagtgaacaaaagagcaagatgtggttgcagccaatcaactcctgcccactgtgcttgaagctgtgtcttatggtgggcattgttcatttggtaaaatcacttgctttcacactctgtatgaattcataccaggcttctcactgggcatgtttttatgttaatcygctgtcctttctgtgaaaaaggaagaaaactgggctcactatgttaacaatcttcatgctacctacccagatctcatgtatgtgaatagtagaaaaaagtctttccccagaagttttattttggcagttttctttcaagtacatcacagagtacctacttaaatataatctaggtaaacattagtgtttcatcttctgccaattgaaattcagagcagttgtaataggaactgaaggaccaaatgctcagtgtgtcttgagcaccctactgagaggatccaagcacacagtgacttttgaagtcactgtgggctctaggctctaatcattaccttgggaggtgttaaagagatgagaatgggccccatggatgcttttaactggtgttattatcattcataggagaaatca

SEQ ID NO: 688334 - DNA, 651 bp, Homo sapiens
attctcctgcctcggcctcctgtgctgaggattacaggtgggattacaggtgcatgccaccatgcccagctaatttttgtatttttartagagatggggtttcaccatgttggtcaggctggcctcgaactcctgacctcaagcaatccatccgtcttggcctcccaatgtgctgggattacaggcataagccaccgcacctggcccattttctttttgctctacttctaattatactccctctccacatgttaacccccaaattaaggctttagttaatagaatttatattaactgttagtcaaagcttctatttaactgatacacacatagcattgtatgtgtcaagaaactaaaggattaattagtttcttgaacagtcccaggatcgagaaactaaaatatcaatgcctggctcatgtaccagcacatgacctgtcatggcttgcttttgttatagttcagtgctcatgctaatcttctcaaaagacatattccaaggccactgtgatatttccctccaaggatctcagaagtttggactatgccccagttaatttgctactctgacactgaaaattgaggaagacaccaaaagttctctgcaattataaataaaactactgcaataataataatacaacaaataag

SEQ ID NO: 688335 - DNA, 2143 bp, Homo sapiens
caatgtgtataaagcatgcaaaatggaagtcaataaatattagttattagtattccttttgttgttgctgctgttttaaatagcttggaaagatcatgccactcaagagacttgaatttttgaaatggttatatcataagtaaaatagaggggtaattctatccagtttgaaaatcctacaattccagactcttacatcttcttccatatataaaaatgataaaatgacatcaatcctcccatctgctcattcttttaccccacaaacatttagcacatgcttacaatgcactaactattgcagaaataaatggagatacaagtacagcaaatgtggttgacagtgcactgctcttaaggagggcagggcccatcgtggtgacagaccgaccctgcaggcacaatgacatcactgcgtagtaggccctgagactctgtgcttggggctgtaactattctgtgatctgtaaatgcctgtcgaagataagttactttcaaatccaagcttttattactgacaagagtagaaataatgttttcctgacatttctcctttaattgactggttcatgaaagggttgaaatcaagtgttccattctggctctcccttcccagtaatcaggccagataagcattatggtgtttaaacatttcaaggcacttgtgtttccaattgctttcacttttaaaccagttaatggattcggtagctgttacaatcccaaaatagcaagtggacttgtgggtggatcagatgccactgggcacaactctaaatggttcccgtaaaagccacgaagcttgttccccacgcctctgaggaatgtgatcctcagggttttagcgacccagtggtgcccagcagcctcctcctgacatgatgggaacataataacagtggtatggaagggcactgggctggctgagctgggacatagacctcccaccaccccaggaagactcatccgtctctttgcatcctctgatattcctgggggcttttgtctgttaatttccaggggaaaagggggtttggatggggcagtgcagcaggatagcagagagatggagggccacattgggccttggactagatttgaggtctgaagttgatgggactgttttcacaggcggctttctagggtctaacacagtggggctcctttggtgctcagtccccactgctgcacactggtacgggaggatgagccactacaggatagtgtcctttcgtgcgaatacatgaaagatacagagacagtgtcctttccatggtccatggcattctcacgatgagattccagtggttcaaggtagaacttttccgcagtgggatccagggcaggggataaagtcaggggtggcatgaggtagcaatagctaagagggtgacttgcaggtgtacatgaggcctgccttgaggactcccacaaataagtggaggatgcctcatggtggggcagcaagctgtgtgagaaatagaacagcagaatagaacatctgacggagggtttgtgcccgaaaaatggtgcttttttccctcatctctctagaactcagacagaactttccctcacatgcaccacctcacgggttcctaacgcaaccctgtgaggttaatattatgatctgcactttgtggaggaggaactggaaacgcagagggatgaaggtcaatggtggaccctaactgagatcagggcagtgaagatggcccaataaagtggcacactggagctccatatgctcactgcgtagcagtgsctcttggctttcttctctgagtggtcctggagagcctaagaaagagtgagaaaattctaagctaattctatattggctttgtgttgactcccacgttaagagaacctccaaatacctcccccagggcctgccatacattatgaaattttattcagagattcatgtacttgaatcttaaagactcataagcctcctcctcaattgtactgaagaccagaccggagtgggaaccagtttttggcctccattcccaaccgactctggagactgttacagtgagactttgtgctattggagttggcatcaagcctacttgtgtctgagtgctgattctgctattataatctctttgagactcattttccttatgtgcaagta

SEQ ID NO: 688336 - DNA, 2143 bp, Homo sapiens
caatgtgtataaagcatgcaaaatggaagtcaataaatattagttattagtattccttttgttgttgctgctgttttaaatagcttggaaagatcatgccactcaagagacttgaatttttgaaatggttatatcataagtaaaatagaggggtaattctatccagtttgaaaatcctacaattccagactcttacatcttcttccatatataaaaatgataaaatgacatcaatcctcccatctgctcattcttttaccccacaaacatttagcacatgcttacaatgcactaactattgcagaaataaatggagatacaagtacagcaaatgtggttgacagtgcactgctcttaaggagggcagggcccatcgtggtgacagaccgaccctgcaggcacaatgacatcactgcgtagtaggccctgagactctgtgcttggggctgtaactattctgtgatctgtaaatgcctgtcgaagataagttactttcaaatccaagcttttattactgacaagagtagaaataatgttttcctgacatttctcctttaattgactggttcatgaaagggttgaaatcaagtgttccattctggctctcccttcccagtaatcaggccagataagcattatggtgtttaaacatttcaaggcacttgtgtttccaattgctttcacttttaaaccagttaatggattcggtagctgttacaatcccaaaatagcaagtggacttgtgggtggatcagatgccactgggcacaactctaaatggttcccgtaaaagccacgaagcttgttccccacgcctctgaggaatgtgatcctcagggttttagcgacccagtggtgcccagcagcctcctcctgacatgatgggaacataataacagtggtatggaagggcactgggctggctgagctgggacatagacctcccaccaccccaggaagactcatccgtctctttgcatcctctgatattcctgggggcttttgtctgttaatttccaggggaaaagggggtttggatggggcagtgcagcaggatagcagagagatggagggccacattgggccttggactagatttgaggtctgaagttgatgggactgttttcacaggcggctttctagggtctaacacagtggggctcctttggtgctcagtccccactgctgcacactggtacgggaggatgagccactacaggatagtgtcctttcgtgcgaatacatgaaagatacagagacagtgtcctttccatggtccatggcattctcacgatgagattccagtggttcaaggtagaacttttccgcagtgggatccagggcaggggataaagtcaggggtggcatgaggtagcaatagctaagagggtgacttgcaggtgtacatgaggcctgccttgaggactcccacaaataagtggaggatgcctcatggtggggcagcaagctgtgtgagaaatagaacagcagaatagaacatctgacggagggtttgtgcccgaaaaatggtgcttttttccctcatctctctagaactcagacagaactttccctcacatgcaccacctcacgggttcctaacgcaaccctgtgaggttaatattatgatctgcactttgtggaggaggaactggaaacgcagagggatgaaggtcaatggtggaccctaactgagatcagggcagtgaagatggcccaataaagtggcacactggagctccatatgctcactgcgtagcagtgcctcttggctttcttctctgagtggtcctggagagcctaagaaagagtgagaaaattctaagctaattctatattggctttgtgttgactcccacgttaagagaacctccaaatacctcccccagggcctgccatacattatgaaattttattcagagattcatgtacttgaatcttaaagactcataagcctcctcctcaattgtactgaagaccagaccggagtgggaaccagtttttggcctccattcccaaccgactctggagaytgttacagtgagactttgtgctattggagttggcatcaagcctacttgtgtctgagtgctgattctgctattataatctctttgagactcattttccttatgtgcaagta

SEQ ID NO: 688337 - DNA, 1665 bp, Homo sapiens
caccctcttctagcctataggatctgtgagggaggaagcacattctcctttgctcagcactgtctcctatgctcactgctctgccttcagagtctaatagagagtatgaactgtagtagatgtttgaacagagatttgcaatttaaatgttaaatctggataaagctgaatttattttggaatgatgtggtaactttaaggaaatagaggagagagcttgagattcctttataataaaaaggaagaaaaatgcagatgttcatggtctgaacatcttagatacgtgaaatgcaaactgggagttgtggaaggagtgagtggcagctgggtaggagagaacataagtagtcctagatgttttgcattcgaagtttcacaagagtttaattaaaatatattgatatttatattgytaatcttactctgcagtatgcctaaaggtattctgagaattgtttttcaaaggcataatgaaatcagagaaatatgtaaaatttggttaaaattttcaattggttgaaaatctgctcagagttccttaaaactttttaatatccacttccaccatatacaaaatgatttattatgcatttgtaaccaaattgactaggcagtttttggatgttctacatcattcctggctcatagtttataaaactgttactattattatttaacacttatagtccagtggaagaactgtagtacacatgcttggtcagttaaccaaaaaagctattaaagaggaaaaccataaaaatgttacatatatggactttacacattttatttttaactcaaaatttaaatgtaatctaggctaaggttttagaggagaggcttacttattaagaacatagactccaaagaaagactgccttggccaggcgctgtggctcacacctataatcccagcactttgggaggcagaggtagaaggatggcttgaatccaggagttcaagaccagcctgtgcaacatggcaagaccctgtctctacaataaatacaaaaaaacgtagctgggagtggtggcacatgcctgtagtcccagctactctggaggctgaggaaggaggattgcctgagtctgggagacagaggtttcagtgagccaagatgaggctaccacactccagcctggctgacagagtgagaccctgtccccactccaaaaaaacaaaacaaaacaaaacaaacaaacaaacaaaaaacgactgcctgtttgtttctcttattagctacgtaatctcaggcagattacattttctgtacctcaatttcctcatctgtaaaacagggatgaaaagatatttacctcacagggctgtcatgaagattaacgaatacaaacaaattaatcaggccaggtcctggcacatggtcacctctcaataagtgtaagttatcactgcataaatcatgaaatatagaaaatatttagttgtgatttaaagtgaaacaagaatttaaagttatttaaaagcaaaagaagtacataatcctttacatttaaaaaatattttccatcttttgtagtgtttgcagcacctagtttgtcatcaattttaaaagcaactcagcttttttaaagcaatcaacttagtttttatagaaataatgcatttttagactcctcaacttctatgtacactctctactgtgt

SEQ ID NO: 688338 - DNA, 607 bp, Homo sapiens
catagctagtaagtggagaactacgaattgaaactaggcagtctggtttcacaaaccatcttcttcacacacttaacaatatatcataaagcattctataagtttgtagataaaagtttttccctttattattaatgtttgtgtgtgtgtaagtatagatatactagagatatatgtgggtgtcttatgtgtttatacatacatgtataatatatacatgcatattgtattcatgtatatacgtatatgtgtaagtgtatttgttatatgtgtgtgtatatcattttacatamatgaaaatgtattctacttgtatatgtgtgcaaaggcataaagaatatttttctgtcattattttataaaaatggtatcaatcatttagtcaacacacttaaaaaaaaatactttctgtataccaagccctgataatacagtagtgaataaaacagaatcccttctgcccttatgaacctagagttcctggagtttatatgccactgggctgagatagatattaaatatataataattcatgtagtgattagggctataaataaaactaaagcaggtttggggtagactatatatccttctctcattaatgcct

SEQ ID NO: 688339 - DNA, 607 bp, Homo sapiens
catagctagtaagtggagaactacgaattgaaactaggcagtctggtttcacaaaccatcttcttcacacacttaacaatatatcataaagcattctataagtttgtagataaaagtttttccctttattattaatgtttgtgtgtgtgtaagtatagatatactagagatatatgtgggtgtcttatgtgtttatacatacatgtataatatatacatgcatattgtattcatgtatatacgtatatgtgtaagtgtatttgttatatgtgtgtgtatatcattttacataaatgaaaatgtattctacttgtatatgtgtgcaaaggcataaagaatatttttctgtcattattttataaaaatggtatcaatcatttagtcaacacacttaaaaaaaaatactttctrtataccaagccctgataatacagtagtgaataaaacagaatcccttctgcccttatgaacctagagttcctggagtttatatgccactgggctgagatagatattaaatatataataattcatgtagtgattagggctataaataaaactaaagcaggtttggggtagactatatatccttctctcattaatgcct

SEQ ID NO: 688340 - DNA, 1169 bp, Homo sapiens
gaaggaaggaaggaaagaaggatgaaaggaaggagaaaacaccggtgttactaaaaccccccaaaaaatggtttccccctgtgggtaagcctacaatgtggatgaatcttgaaaatattgtgctacgtgttatgtcagtcatagcagctcacctattgtgcaattccgtttataggaaatgtccacaatatggaaatctatgcatatgggattgatcgcactaggtagttgctacctagggctgagggtcagggagagggtttgagacagaatgaggagtgactaatgtctacagggtctttctctggtcgggggtgataagacgttttacaatggattgcgaattaaaattgaatgtgcacaaccacaggtatactaaaagccactcaattcatgacctttaatgggggaatcttacgtggcgtagtctcatggagaccacggcagacatagtgagagagaaaaaggtgagtaaatatctgaaacggaggcagaaacagagagaatgaaaagycctgtgaatggaagggagagcgaaaagggaaaatggtcctatttacaaatgacagatgtgaaactggggttcacatcaacagtgtcactgccaggaaggagggtcatgctagccatgtcaccggtagtgtggcccgcagggacgccgacctgctggagcgtcgtgccagcatgggctgtggcaaccacgtgggccagcaggaggttcccgctgcacagctgtggggtgaggatagactgggtggtgatatcggccattacaggggcctcttctgctggcaagagtgtgacagtagcaagtagatggacaggcctgcgtgtgaggacggaatgcaggaggggttcttgtgcgcctgggtgtggggccctcacgggaaccgtggagaaatggccaggtaactgcgtcatgtgggctagtagattggccagggcttcgaactgaaggacgataatggggagtagctgtcaggccctgggagtgcctgagtgtaagtggagatgggtttggggtcactgagggatgcgtgggagccatccctgtataggtacaggtcatagggagatagtctcgtgaggcctgtgagtgtctagggttgtcctgggtgcctggggctgactgtggcagaaatctggggaaggctggagagaagctggga

SEQ ID NO: 688341 - DNA, 1169 bp, Homo sapiens
gaaggaaggaaggaaagaaggatgaaaggaaggagaaaacaccggtgttactaaaaccccccaaaaaatggtttccccctgtgggtaagcctacaatgtggatgaatcttgaaaatattgtgctacgtgttatgtcagtcatagcagctcacctattgtgcaattccgtttataggaaatgtccacaatatggaaatctatgcatatgggattgatcgcactaggtagttgctacctagggctgagggtcagggagagggtttgagacagaatgaggagtgactaatgtctacagggtctttctctggtcgggggtgataagacgttttacaatggattgcgaattaaaattgaatgtgcacaaccacaggtatactaaaagccactcaattcatgacctttaatgggggaatcttacgtggcgtagtctcatggagaccacggcagacatagtgagagagaaaaaggtgagtaaatatctgaaacggaggcagaaacagagagaatgaaaagccctgtgaatggaagggagagcgaaaagggaaaatggtcctatttacaaatgacagatgtgaaactggggttcacatcaacagtgtcactgccaggaaggagggtcatgctagccatgtcaccggtagtgtggcccgcagggacgccgacctgctggagcgtcgtgccagcatgggctgtggcaascacgtgggccagcaggaggttcccgctgcacagctgtggggtgaggatagactgggtggtgatatcggccattacaggggcctcttctgctggcaagagtgtgacagtagcaagtagatggacaggcctgcgtgtgaggacggaatgcaggaggggttcttgtgcgcctgggtgtggggccctcacgggaaccgtggagaaatggccaggtaactgcgtcatgtgggctagtagattggccagggcttcgaactgaaggacgataatggggagtagctgtcaggccctgggagtgcctgagtgtaagtggagatgggtttggggtcactgagggatgcgtgggagccatccctgtataggtacaggtcatagggagatagtctcgtgaggcctgtgagtgtctagggttgtcctgggtgcctggggctgactgtggcagaaatctggggaaggctggagagaagctggga

SEQ ID NO: 688342 - DNA, 1169 bp, Homo sapiens
gaaggaaggaaggaaagaaggatgaaaggaaggagaaaacaccggtgttactaaaaccccccaaaaaatggtttccccctgtgggtaagcctacaatgtggatgaatcttgaaaatattgtgctacgtgttatgtcagtcatagcagctcacctattgtgcaattccgtttataggaaatgtccacaatatggaaatctatgcatatgggattgatcgcactaggtagttgctacctagggctgagggtcagggagagggtttgagacagaatgaggagtgactaatgtctacagggtctttctctggtcgggggtgataagacgttttacaatggattgcgaattaaaattgaatgtgcacaaccacaggtatactaaaagccactcaattcatgacctttaatgggggaatcttacgtggcgtagtctcatggagaccacggcagacatagtgagagagaaaaaggtgagtaaatatctgaaacggaggcagaaacagagagaatgaaaagccctgtgaatggaagggagagcgaaaagggaaaatggtcctatttacaaatgacagatgtgaaactggggttcacatcaacagtgtcactgccaggaaggagggtcatgctagccatgtcaccggtagtgtggcccgcagggacgccgacctgctggagcgtcgtgccagcatgggctgtggcaaccacgtgggccagcaggaggttcccgctgcacagctgtggggtgaggatagactgggtggtgatatcggccattacaggggcctcttctgctggcaagagtgtgacagtagcaagtagatggacaggcctgcgtgtgaggayggaatgcaggaggggttcttgtgcgcctgggtgtggggccctcacgggaaccgtggagaaatggccaggtaactgcgtcatgtgggctagtagattggccagggcttcgaactgaaggacgataatggggagtagctgtcaggccctgggagtgcctgagtgtaagtggagatgggtttggggtcactgagggatgcgtgggagccatccctgtataggtacaggtcatagggagatagtctcgtgaggcctgtgagtgtctagggttgtcctgggtgcctggggctgactgtggcagaaatctggggaaggctggagagaagctggga

SEQ ID NO: 688343 - DNA, 1169 bp, Homo sapiens
gaaggaaggaaggaaagaaggatgaaaggaaggagaaaacaccggtgttactaaaaccccccaaaaaatggtttccccctgtgggtaagcctacaatgtggatgaatcttgaaaatattgtgctacgtgttatgtcagtcatagcagctcacctattgtgcaattccgtttataggaaatgtccacaatatggaaatctatgcatatgggattgatcgcactaggtagttgctacctagggctgagggtcagggagagggtttgagacagaatgaggagtgactaatgtctacagggtctttctctggtcgggggtgataagacgttttacaatggattgcgaattaaaattgaatgtgcacaaccacaggtatactaaaagccactcaattcatgacctttaatgggggaatcttacgtggcgtagtctcatggagaccacggcagacatagtgagagagaaaaaggtgagtaaatatctgaaacggaggcagaaacagagagaatgaaaagccctgtgaatggaagggagagcgaaaagggaaaatggtcctatttacaaatgacagatgtgaaactggggttcacatcaacagtgtcactgccaggaaggagggtcatgctagccatgtcaccggtagtgtggcccgcagggacgccgacctgctggagcgtcgtgccagcatgggctgtggcaaccacgtgggccagcaggaggttcccgctgcacagctgtggggtgaggatagactgggtggtgatatcggccattacaggggcctcttctgctggcaagagtgtgacagtagcaagtagatggacaggcctgcgtgtgaggacggaatgcaggaggggttcttgtgcrcctgggtgtggggccctcacgggaaccgtggagaaatggccaggtaactgcgtcatgtgggctagtagattggccagggcttcgaactgaaggacgataatggggagtagctgtcaggccctgggagtgcctgagtgtaagtggagatgggtttggggtcactgagggatgcgtgggagccatccctgtataggtacaggtcatagggagatagtctcgtgaggcctgtgagtgtctagggttgtcctgggtgcctggggctgactgtggcagaaatctggggaaggctggagagaagctggga

SEQ ID NO: 688344 - DNA, 623 bp, Homo sapiens
tctactcactgcttcctctccacaactttatgactcagtgaaaccctcactctctctcacctgaaatatttccattttccatcatgtttccatcagmctgcactcctcttacttcccgttatcttgttcacttccagactaacatctctagacaggtaactgtgttcctcaaggacttaaaagcacttaacaacagcttaaaacttaggttctcactctttagcaaggacttgaagacttttaatgattcagctcctgctcacaaatctaacctcactttttcccacatcaacactgaacagaagctaagttccactcatatataaaatctttcaattttcttgaataaaaaagattatgtggctgtcacccataatctgactccagaactctgtttctgcaccttcctgtcaaactcataataagtctccgtattagtctgttctcatgctgctaatatggacatgcccaagcctgggtgatttataaagaaaaataagtttaatggactcacagtgccacgttgctggggagacctcacaatcatggcagaaggcaaaggtcaggtcatacacagcagcagacaagagagagcatgggcaggggaacttccctccatacaa

SEQ ID NO: 688345 - DNA, 352 bp, Homo sapiens
  misc_feature 3, 4, 5, 6, 7, 8, 9, 10, 11, 12, 13, 14, 15, 16, 17, 18,19, 20, 21, 22, 23, 24, 25, 26, 27, 28, 29, 30, 31, 32,33, 34, 35, 36, 37, 38, 39, 40, 41, 42, 43, 44, 45, 46,47, 48, 49, 50, 51, 52, 53, 54, 55, 56, 57, 58, 59, 60,61, 62: n = A,T,C or G
  misc_feature 63, 64, 65, 66, 67, 68, 69, 70, 71, 72, 73, 74, 75, 76, 77,78, 79, 80, 81, 82, 83, 84, 85, 86, 87, 88, 89, 90, 91,92, 93, 94, 95, 96, 97, 98, 99, 100, 101, 102: n = A,T,C or G
gannnnnnnnnnnnnnnnnnnnnnnnnnnnnnnnnnnnnnnnnnnnnnnnnnnnnnnnnnnnnnnnnnnnnnnnnnnnnnnnnnnnnnnnnnnnnnnnnnnntgaaaccccgtctctactaaaatacaaaaattagccaggcatggtggcatgcacctgtaatcccagctactcaggaggctgaagcagagaattgcttaaacctgggygacagagtgagactctgtcaaaaaaaaaaaaaaaaaagaatgaagcaaactccctggggttagccactccatggagggaagggaagtaggggcgggggggcgggggtgaaaagaaggtcattaattccaagaacaaacaacag

SEQ ID NO: 688346 - DNA, 629 bp, Homo sapiens
tccacaaaagataaaagactttttttataaaaccataaccacagatcatttcttcttttggctagtttatgaattgtcctttagacatggacaattaaactttttttttctttttgacagagtaagttgtagatagataaactttgtttttctctttttgtgcttttaaaaaaattgcttcttatctggaactttagcattcctttttttttttctttttgcttttttgtttaatgttttggatatgttaaaatggatgctaaaaagtatagtctgtttgggtttttagcctcagagttttgtgagtagctcattttccttttccataaatttcacgaagaatgtgtaatatgttttcatgagcctcaccttgaaaatgaatttttatgtacattaatggaatttttgaaagaaaataaaaacattttctttctttctttcttttttttttttttttttttttttttgaggcggagtcttttttttgcccaggctggagcgaagtggcgtgatcttggctcactgcaacctccgcccccccrggttcaagcaattctcctgcctcagcctcctgagtagctggaattacaggcacccaccaccacacctggctaatttttgtattttta

SEQ ID NO: 688347 - DNA, 602 bp, Homo sapiens
ttcatgctgtgagtgtagggagaactcaaggaatgatacatttgggattcattgtgacaacgatggttgagacataaaaagaggttctggaaaatcttttgtcctctcagtctctctgggctttcatttsttcttttaccacaggtaggatttgagttgtggacacccataattccatgaaagctcaaatactcaactctacagccagggaatttacattaccagaaccccttccctccagaaacccctagaagatggcccttaccctccctacctccatcccacgccagttcctcagactccaaacacaaaagtagcaaccacagagatgcacatgcctccatttcctgggacttttctttggatctttcttatatcacatccctttagtgatggtgccctttcatctgcattcacaatgccctggagtcaggtaatttagatagaaagaaatggaagaatttcaaatttggactttttcttttctagtgagctgttcaagtgtttaaggctacaagaaaacatggcctaagtccccaggcttggcaaagggcatcctactgtcattcacacctaaaacaagagatctcaagttaaacacg

SEQ ID NO: 688348 - DNA, 602 bp, Homo sapiens
ttcatgctgtgagtgtagggagaactcaaggaatgatacatttgggattcattgtgacaacgatggttgagacataaaaagaggttctggaaaatcttttgtcctctcagtctctctgggctttcatttgttcttttaccacaggtaggatttgagttgtggacacccataattccatgaaagctcaaatactcaactctacagccagggaatttacattaccagaaccccttccctccagaaacccctagaagatggcccttaccctccctacctccatcccacgccagttcctcagactccaaacacaaaagtagcaaccacagagatgcacaygcctccatttcctgggacttttctttggatctttcttatatcacatccctttagtgatggtgccctttcatctgcattcacaatgccctggagtcaggtaatttagatagaaagaaatggaagaatttcaaatttggactttttcttttctagtgagctgttcaagtgtttaaggctacaagaaaacatggcctaagtccccaggcttggcaaagggcatcctactgtcattcacacctaaaacaagagatctcaagttaaacacg

SEQ ID NO: 688349 - DNA, 619 bp, Homo sapiens
tgaccatcrttaatgatcacagctaagtcagggctgtttgcgttatgtggaaccagggctttttctagcagtagaacttcatagaccatgttattctgagacgtttctggtgtcatgtatatgcctaagggccacaattctatgtagttaaagacttcacagaagggcacgtgtgatggctcatgcctgtaatctcagcactttgggaggccgaggcaggtggattgcttgagctcaggggtttgagaccaggctgggcagcatggtgcaatcctgtctctaccaaaaatacaaaaattagcagggcatggtgacgggtgcctgtagtccagctactcaggaggctgaggcagaaggatcacttgaacctggaaggtggaagttgcagtaagccgagatagcaccactgcactccagcctgggcgacagggtgagaccctgtctcaaaaacgaaaagcaaaaaaaaaaaacaaaacaaaaccttcacagaggctaggacaaggagcactaaacagtcattagcaaaatgatgagtgagttctctttttaggtctgttaggacagaaacaagtaggggtgccagaattcattgattcattcggcagacattgctgagcag

SEQ ID NO: 688350 - DNA, 638 bp, Homo sapiens
tgcaatgagctgtgatcataccactgtattcccatcctacctgggtgacagagtgacatcctgcctcaaaaaaaaaacaacaacaacaaaaaaaccttaactcacataaaccatgcaagtgttaagcctttggaaatatgccagaatatgaaatgtgttccctcttgggtgggggagtatggttgttcaatttttgttaactactttatacttgtatttttccattcttgaccataaacacatgactctgggagtcaggaaagcaagttgctacctctscctccttcctttgcttttatcagggtgtcccgtgtccctgcctctgttttctgtgttgggccctaggcctctgggctccggtctgagtggctggggtggccagcgtctgcagcagtggaagaccttgtactccatgtaggattcagtgacttgagtccgctcctcctgcaaacaccacctccctcctgagggcggggagaatgtggagagagagcctgaggcaatgatttggatcatcataactttcagactttgatcctagtttgacttgttttccaactggagttctaatggcttagccttctggagcagactctccttgctaccagatgattggttatgtcaatattcataataat

SEQ ID NO: 688351 - DNA, 1100 bp, Homo sapiens
gcctgcctcagcctcccaaagtgctrggattacacgtgtgagccaccacacccagcttggtactcattttcctctgtacctttttgtatggccgagaaggtttgtaatttgaagaggttttagaatgcgcgtcaggcagccagcctgttcatctgactccccacacacagaactcccggtgcaaggcctctgccctggggcccctgctgggggacggggatctcccagggctacgagatggcaatcgggatctaaattgaagggtgcaaggaacaggacaatcacagcccgaggttacaggggaggcagggaagaggagcaaggctctggagcagaggagctggcccttgaagccagtgtgctggcaggagcattcactgctcttaaaggccaagagccggggatccttgacagggccggctgccttggtaggtggcctggcctcccagaccagagcctcaggcccttcattgtcacaggccacctgaaagcctgcacagatgactctggaaatacctggagtctggcggcagcccctatgggcatgggctctgagaaacaggaagggtgaccctgccagcatgccagcatgctgtgagatcgtgtctgggcctgagggctcccacttccagtcttctggccaataggactcagagatgcttagactcctggccccaagaattcctgagttgctagagacagtggccccagtggtcctgtgttgagacttgcttgggaggctgtgtcccattaggactttgtgatattggaagtgaaatggaccttgtaggatagtttccaccactctgctttactatcaggcagcacgtcagagccagggacaccctgtgccagctgtggtgacggaggcccaggagggcttggtctctcaggaatttgataagcgggagctaaagcccaggcccctacactccctgcaccccgaggccccctgaggccttagcctggaggggtgtggaaggggcaggagggaagggcaggcagccaggagttaggaaatctcagggagtgtccttggttccccagccctcagctgctgccatggaccccaggtgcaggccaccaggcccggggcctct

SEQ ID NO: 688352 - DNA, 1100 bp, Homo sapiens
gcctgcctcagcctcccaaagtgctaggattacacgtgtgagccaccacacccagcttggtactcattttcctctgtacctttttgtatggccgagaaggtttgtaatttgaagaggttttagaatgcgcgtcaggcagccagcctgttcatctgactccccacacacagaactcccggtgcaaggcctctgccctggggcccctgctgggggacggggatctcccagggctacgagatggcaatcgggatctaaattgaagggtgcaaggaacaggacaatcacagcccgaggttacaggggaggcagggaagaggagcaaggctctggagcagaggagctggcccttgaagccrgtgtgctggcaggagcattcactgctcttaaaggccaagagccggggatccttgacagggccggctgccttggtaggtggcctggcctcccagaccagagcctcaggcccttcattgtcacaggccacctgaaagcctgcacagatgactctggaaatacctggagtctggcggcagcccctatgggcatgggctctgagaaacaggaagggtgaccctgccagcatgccagcatgctgtgagatcgtgtctgggcctgagggctcccacttccagtcttctggccaataggactcagagatgcttagactcctggccccaagaattcctgagttgctagagacagtggccccagtggtcctgtgttgagacttgcttgggaggctgtgtcccattaggactttgtgatattggaagtgaaatggaccttgtaggatagtttccaccactctgctttactatcaggcagcacgtcagagccagggacaccctgtgccagctgtggtgacggaggcccaggagggcttggtctctcaggaatttgataagcgggagctaaagcccaggcccctacactccctgcaccccgaggccccctgaggccttagcctggaggggtgtggaaggggcaggagggaagggcaggcagccaggagttaggaaatctcagggagtgtccttggttccccagccctcagctgctgccatggaccccaggtgcaggccaccaggcccggggcctct

SEQ ID NO: 688353 - DNA, 716 bp, Homo sapiens
cgagcccagccacggagcccccgtagtggggttctcggagcccctctggtctggtctgtttccctttagggaggaaacaacagctgataatatacaagtttatatagggggtttttcaccctcctcctccgaaatagcacagggcgctcacacacgtgtgtgtgtgtgtgygcgcgcacgtgcatgtatgagtgtgtgtgtggacctgtgtgtgcacagcaagtgagacacacctcagagccagacgctgctgggctccggctgagcctgcggggagggtgtcgcctcctgaggacgaggagccgagctggagctggggacccccagccctttggatgctccagtcttcagagcagggcccacagacccagacaccaggcaggaaagattttccccagtgaaagctgagctccaaagtgttttcttccttaggctcagctcacctgaaaccctcgctacctgggcacgccctggctgttctcttcagccaggctttttcccagctcgattcagtcctggtcccaaccccctgcgcagtatctctggacggggctagaccgtggcagcctccacaccagggaggccctgctgggggacaggtggcgaagcagggcctttggcacccacctgggcactggcccaggcctgccagacccccggggaacagggtgacacacaggagcctgccgcctgccacgtggggctcaggttgccag

SEQ ID NO: 688354 - DNA, 716 bp, Homo sapiens
cgagcccagccacggagcccccgtagtggggttctcggagcccctctggtctggtctgtttccctttagggaggaaacaacagctgataatatacaagtttatatagggggtttttcaccctcctcctccgaaatagcacagggcgctcacacacgtgtgtgtgtgtgtgcgcgcgcacgtgcatgtatgagtgtgtgtgtggacctgtgtgtgcacagcaagtgagacacacctcagagccagacgctgctgggctccggctgagcctgcggggagggtgtcgcctcctgaggacgaggagccgagctggagctggggacccccrgccctttggatgctccagtcttcagagcagggcccacagacccagacaccaggcaggaaagattttccccagtgaaagctgagctccaaagtgttttcttccttaggctcagctcacctgaaaccctcgctacctgggcacgccctggctgttctcttcagccaggctttttcccagctcgattcagtcctggtcccaaccccctgcgcagtatctctggacggggctagaccgtggcagcctccacaccagggaggccctgctgggggacaggtggcgaagcagggcctttggcacccacctgggcactggcccaggcctgccagacccccggggaacagggtgacacacaggagcctgccgcctgccacgtggggctcaggttgccag

SEQ ID NO: 688355 - DNA, 716 bp, Homo sapiens
cgagcccagccacggagcccccgtagtggggttctcggagcccctctggtctggtctgtttccctttagggaggaaacaacagctgataatatacaagtttatatagggggtttttcaccctcctcctccgaaatagcacagggcgctcacacacgtgtgtgtgtgtgtgcgcgcgcacgtgcatgtatgagtgtgtgtgtggacctgtgtgtgcacagcaagtgagacacacctcagagccagacgctgctgggctccggctgagcctgcggggagggtgtcgcctcctgaggacgaggagccgagctggagctggggacccccagccctttggatgctccagtcttcagagcagggcccacagacccagacaccaggcaggaaagattttccccagtgaaagctgagctccaaagtgttttcttccttagrctcagctcacctgaaaccctcgctacctgggcacgccctggctgttctcttcagccaggctttttcccagctcgattcagtcctggtcccaaccccctgcgcagtatctctggacggggctagaccgtggcagcctccacaccagggaggccctgctgggggacaggtggcgaagcagggcctttggcacccacctgggcactggcccaggcctgccagacccccggggaacagggtgacacacaggagcctgccgcctgccacgtggggctcaggttgccag

SEQ ID NO: 688356 - DNA, 716 bp, Homo sapiens
cgagcccagccacggagcccccgtagtggggttctcggagcccctctggtctggtctgtttccctttagggaggaaacaacagctgataatatacaagtttatatagggggtttttcaccctcctcctccgaaatagcacagggcgctcacacacgtgtgtgtgtgtgtgcgcgcgcacgtgcatgtatgagtgtgtgtgtggacctgtgtgtgcacagcaagtgagacacacctcagagccagacgctgctgggctccggctgagcctgcggggagggtgtcgcctcctgaggacgaggagccgagctggagctggggacccccagccctttggatgctccagtcttcagagcagggcccacagacccagacaccaggcaggaaagattttccccagtgaaagctgagctccaaagtgttttcttccttaggctcagctcacctgaaaccctcgctacctgggcacgccctggctgttctcttcagccaggctttttcccagctcgattcagtcctggtcccaaccccctgygcagtatctctggacggggctagaccgtggcagcctccacaccagggaggccctgctgggggacaggtggcgaagcagggcctttggcacccacctgggcactggcccaggcctgccagacccccggggaacagggtgacacacaggagcctgccgcctgccacgtggggctcaggttgccag

SEQ ID NO: 688357 - DNA, 633 bp, Homo sapiens
tgtaaataaagaaagagtgtgactaaaattgcccacaacttcctcttcctcaattttagggtcttctgaattttgggkgaagtcatttcaagtgaaactatgagtagttaaattttgagaaaatacttggtgaaatataaactgagaagttggatagatttgtaaaagcttattttttaatcaaaaattcttctttttaaaactaataattcttaaatgaacagactatctttgccagtgtctgctgttcaccaagaaattccaaaccacatttctgaatcaacagacagacattagtacagttggcctcctgtatccattggttctgcattcatgaattcaaccaaccacaggtcaaaaatattcagaagaaaacttccacaaagttccaaaaagcaaaacttgtatttgtcatgtgcaaagtactacactgaattcaaatgaatgaagtgatgtgtaggtattttattaggtactataaataatctagacatgatttaaagcatatgggaggatatgcacaggttaaacctacatatatgtagtatatgcaaacactaaatcattttatataagggacttgagcactgcagaatttggtattggggcagggggtcctggaaccaatcccct

SEQ ID NO: 688358 - DNA, 641 bp, Homo sapiens
ttttttttctttttaacaaattacccagtcttgtgcagatttttacagcagtgctaaacagactaaaacaccagaaagccattgggataatctttttagcatttttaaaagtggttactaggctatataaggctatataagacctaattggtaaaggtaaagggtgccttgtgcctggtggtatgcactttcacatttaaagtaaygaatgacgcaatgtggtaaaattgaaaatgactgagaccataaaatcaaaaactcacagatttgaatcccagcatcataacctagtgtatgattttaacaaaattacctaatctgtcttaatttatttcatttatttatttttaatggacaaaaattgtatatatatatggtgtggaacatgaaatatgtatacattatggaatggctacatcaagctaattaacatatgtattacctcatataatattcatttgtgttaagaactcttaaaatctctcttagcaattttcaagtatagaatatattgttattatctattgtcaccatgttatacaatagagctcttgaacttattcctcttatccaactcatatttttgtaatctatgaccaactatcattctccagcccctggtaaccaacattctactctgc

SEQ ID NO: 688359 - DNA, 641 bp, Homo sapiens
ttttttttctttttaacaaattacccagtcttgtgcagatttttacagcagtgctaaacagactaaaacaccagaaagccattgggataatctttttagcatttttaaaagtggttactaggctatataaggctatataagacctaattggtaaaggtaaagggtgccttgtgcctggtggtatgcactttcacatttaaagtaacgaatgacgcaatgtggtaaaattgaaaatgactgagaccataaaatcaaaaactcacagatttgaatcccarcatcataacctagtgtatgattttaacaaaattacctaatctgtcttaatttatttcatttatttatttttaatggacaaaaattgtatatatatatggtgtggaacatgaaatatgtatacattatggaatggctacatcaagctaattaacatatgtattacctcatataatattcatttgtgttaagaactcttaaaatctctcttagcaattttcaagtatagaatatattgttattatctattgtcaccatgttatacaatagagctcttgaacttattcctcttatccaactcatatttttgtaatctatgaccaactatcattctccagcccctggtaaccaacattctactctgc

SEQ ID NO: 688360 - DNA, 1335 bp, Homo sapiens
taataattatttgctttcagatgctttttttttcttgctcttcctctcctttttgaaacttcaatttctattagtctcctattttctatacatcaagctttattttcttttctaaatggtgacagaaccgtgagagacttatgtcaccttgtaatgatttaccattggcttaaatacagttatttatgtttacttgctcccatattttatataaaataaaaaatatttgccatttcataactgtttgatatgaaatagaaaggaaaagcttttttagctacatcctctggtaggggctagaaactatcctattaagtaatgcagtttgaattatcctattggcagaacktcagtggagtatggcaaactggcagtaatcatcactctgaatgataatgattattactactacttctagtaacagctaccatttgagtccaacaccatgccagctacaggaacctcttatgtattgtgagagtaagagagaagtattagtgtccccatttcacacactacaaatggtttttcctatggtcaaccagctagtaagtgggatatattggattgaaaccatcttatgactgatttcaaagtatgcttttcccctaaaataccattaataaaaaacaagtatgcataattatgtaattttaaagtcaaggatactgataagaatagttatgtggacaattaatattttaaagtttgagttgtttttataaaatctctagcacaattctaccagctccagttccagccccttaccttggtgctcagctttgctgcaggactgttcttttccttctgctcattctctgcttctttactgtttcactagtagaagctcatagcccaggtatagtcttttttgtgtaacagctttactgaactgtaatttatatactataaaatacacccacttaaaatctgcaactcaatgccttttaatatgttcagaattgtacagccaacatcacaatcaattcttagataatatttgtcatccccacaagaaactccataccattagcagtcactctccgtgttctgtcccctcttcccttgtactaggcaaccactaatctacctcctatctctatagacttgcctattttggacattttatataactgaaactatataatatgtagtcttttgaaaccttgctactttcacttagcatattttcaaggttcatctatgttgtagcatgtgtcagaactttgttccattttattgcagaattgtatggatatcccatatttttgtaggaataacacatatttttatttatccactcattaggtggagggcatttgagttatttccagt

SEQ ID NO: 688361 - DNA, 644 bp, Homo sapiens
taatattcattttcctgttaattcttcagacttttcatgggcagctgatgtgcaagcagtagatttatttaacatattattaagaaatattaggcaatgttctataattcacctaaatcatttggtggctaaggggggataaagactagtggaaaaaggaatcagcttatgaaatgagtaaagcatttgattatgtatttgcctgtgcttataatcccaggagccagaatgcattgcttgaattggaaacaagcaatacatttcttttttttcacattagagttgctgaatccattctatattgattaaagtactgaaaataagttaccgttagactcttgcaaagaaagttaattcatctttggactggttcaagaatttctttttgaaaacttggctctaagtttctatttgagttttcaaacttaatttaagaaagattgccattgtataayaaaatcatagggttcagtgaaacatacatcttcacattaaaaagaagcccaccaaaatctaactatggactggaaaataagacatcttgaggttcttaagtataatgctggaaggatgcattataccaactttcaaaacctgcttgaagtttttgagtttgaatttcaaattaaactagaaactttgga

SEQ ID NO: 688362 - DNA, 1308 bp, Homo sapiens
cttgatggagtgaagaacaaggagtctaagaactcagttatctactggaaggttctgcaggacacaagaaagggtaatatgattcctgacttaatgtaggtacaatatgacctcaagctgaggccaatagattctgataacatgaaaaagtgaccgtgaaaatcaaagaaaaaaccatgggtgtagatgtgaagaaaccctgagattgaaaggaattaaagagagcgtgaaaaattttgctttagagattgaataaattccattatcttctaaatgcaaacatttttaaacagagtgcatgaattcccttttgatgttaaaaaatacaaaattacctacctaatatggtgtttggatggacaagagactcatgttgatagttgagacactttcgtcaaagaaataaaacctctgagtttgaggcaaaatctggcacaggaaagaaatggcatccttcagcccctagggttcttggaagtggtcaaagttccaaacagaatctccctcacacttatctacagccatactcaaccattgtcatcaattttattttttaaaatttttgattatcagtattttatatttacatttaaggatttttagattgtagagatgtttaaatatgtattgtatttaaaagacacatttattctccagcattagtttctctcattcatgattacttacattatgagttaaatgagctttggtgsactgcctgggaatccagccagtatttgtgagatcatttctaagataacatgcattttcagttcccgaaaccctaggaacaataaaactccataaacacagtaagtattgtcaacttgactagggtcaatgaacaataagagaaaatattaataattcagtcaattcttcaagtcttgattcccctttcctgaattacaatttttcccttttcaatttgatttgcactccttgggttgaattttgtgttctagctcatagtaaaactagaaatataaaaacaggaatataaaaacaggaatataaaaatctttgttgaaaaggttaatgaaaatttttagttacaaatgtgcttgttatgtgaatgatgttgggaaggttttctgatatccctggagtagtacatgaatgtgtggagtcatgcatttagtttgtaggatgaaattcacattatggagtgaatttggaatcatatcgaagaaatcattgccaattccaatgtcatgaggcttttgcccaatattttcttctaaaagtttatcgtttttggtcttacccttacgtctgtggtccattttgagtttatttttgtatgtg

SEQ ID NO: 688363 - DNA, 1308 bp, Homo sapiens
cttgatggagtgaagaacaaggagtctaagaactcagttatctactggaaggttctgcaggacacaagaaagggtaatatgattcctgacttaatgtaggtacaatatgacctcaagctgaggccaatagattctgataacatgaaaaagtgaccgtgaaaatcaaagaaaaaaccatgggtgtagatgtgaagaaaccctgagattgaaaggaattaaagagagcgtgaaaaattttgctttagagattgaataaattccattatcttctaaatgcaaacatttttaaacagagtgcatgaattcccttttgatgttaaaaaatacaaaattacctacctaatatggtgtttggatggacaagagactcatgttgatagttgagacactttcgtcaaagaaataaaacctctgagtttgaggcaaaatctggcacaggaaagaaatggcatccttcagcccctagggttcttggaagtggtcaaagttccaaacagaatctccctcacacttatctacagccatactcaaccattgtcatcaattttattttttaaaatttttgattatcagtattttatatttacatttaaggatttttagattgtagagatgtttaaatatgtattgtatttaaaagacacatttattctccagcattagtttctctcattcatgattacttacattatgagttaaatgagctttggtgcactgcctgggaatccagccagtatttgtgagatcatttctaagataacatgcattttcagttcccgaaaccctaggaacaataaaactccataaacacagtaagtattgtcaacttgactaggktcaatgaacaataagagaaaatattaataattcagtcaattcttcaagtcttgattcccctttcctgaattacaatttttcccttttcaatttgatttgcactccttgggttgaattttgtgttctagctcatagtaaaactagaaatataaaaacaggaatataaaaacaggaatataaaaatctttgttgaaaaggttaatgaaaatttttagttacaaatgtgcttgttatgtgaatgatgttgggaaggttttctgatatccctggagtagtacatgaatgtgtggagtcatgcatttagtttgtaggatgaaattcacattatggagtgaatttggaatcatatcgaagaaatcattgccaattccaatgtcatgaggcttttgcccaatattttcttctaaaagtttatcgtttttggtcttacccttacgtctgtggtccattttgagtttatttttgtatgtg

SEQ ID NO: 688364 - DNA, 597 bp, Homo sapiens
tacttgcattccctcacttaacaaacatttattgatcactagctatctattgaattaaactgagacattacccaaagccttgactcttttatcttgtccatttaattgaaaagaatatgtaaaattcacaaaacactgcattcctggatttgcaaaagataaataagttagaagatctattctggrtacccactttggtatggtatctcagatatactcaatgaacctcgagtctcccctcactgggcagttagtgggaaggtgtacttaattatacaacatcactgacctgtatccattttagatgaagttgagatccagagaatgatacagtcaattataaagaggttaaagctatcccacaacaacttatttttctgaaaatgtgaactatgcctttctgcccagtgcagccccagaacatgtcacaaaatgtggctcatatttggcatatattttgaattgaattatagttacaaacattattgtattatatgaacacatacccaataataaatacataggcacataaaagcttccatgtcactgattgctaacttgtatgtctatagaaatctgagaaatggccttttgaag

SEQ ID NO: 688365 - DNA, 639 bp, Homo sapiens
agaatctaatgcctgatgatcggtcactgtctcccattacccccagatgggaacatctagttgcaggaaaacaagcttaagtctcccactgattctccatgatggtgattatgtaataataatagaaataaaatttgcaataaaggtaatgtgcttgaatcatcctgaaaccatctcccacctgcccccaccccgccccccaacctgtgaaaaaattgtcttccacaaaaccagtccccggtgcaaaaaggttggggaccactgcattagggcatagataagagccacccacatactgagttaaggtaggtgttttgtgttcaccttgtccttaggaatttaagcaaggtttccatgcactaaacaaatggtacttaaaaaaagaatgggaaagaaagacacttttactaacatagttcctcaataaaagtaatagttcctcaatatttattacacaatttctacatcctagacactgtgctaggtgaaggagctctggctcatttggtaagtgcctggctagatggtatttggtaagataccaaatcatctagcatgaccccaccttcctccttactgcttatytacaacgaccaagtcccaggctctggaaaatgtctcttggactaattcagtttt

SEQ ID NO: 688366 - DNA, 1745 bp, Homo sapiens
tatattatacacctcactgaagaagatatcacatatataaatgaacagaaaactagtatgtgactgttgttagtgagctgcatatcttgataggcaacatattccatactatatttttgcagttctactaattaggcaaccaatgtttcaaaatgtaatgtgcataaatatatcttggtacttagaatagcaaataaaaaggagagaatctctcttgaccaaatttcaatttctaagttaatcttttataaatgggaagtaggacacacactaatccatattgaggacttctaattttctaggtactttacgtatattttgtcatttaatcttaacacccacaccatgagatagataaaccaatagttccacaagaaaactgaaactcagagaaatgaaacaccagttattcaactacttattggtaaattcagtcaatcccaagattttctggctctctaaattcagaccccttcaatttgccattttttagtggtttaattgcttatatctcttacatcattttttaatattcttatttcaaatagtatgatttctactttggtcattctcttcatcatgtctgccgattctcatgttggtttacttcccatgcattagcaatttttgattagtgaaattttatttatctacagcatatccgcctactatgtatctatatttatttattatttagaaagccctagagttgtggaaatgccacttcagatatgtctttggttgttttgttttttttgtttttcagggaaattttaagaagtttaataaccctggcacaatttatatgttgaattcttggcatgttgttctaaaaccatgcagtgtgtgtactttatcatcttatactcacatttaagataaacttgagattttgatttctcttcagtgacatttcctcttcaaagatagagacacaagaaatacccttactgctttttagaagaaaggatgcagtgaggagtgctgagttttattcaggctcttgcctcctaaagccctgaggctacgccattcatccttgtgtgtctttacaagcttcrgaacccacttttccagcccggatatgaccccccagaattctatttcctgagccaccttggtgtcagcctcaatctactacttttggactggttttgtgcttgattccaagtaaatgtggattaattttttgttgttttcagttcagatatccaactttttaaatctagcatttccagacaggaataaaggggcatttcctcttctctccccctccatatgaactgacacttaacaccccatgctcttctcatcgtttttgcccccatgatctaagaattattcctctctactctcatctagttttcttaaaattcacaaacaaacattttctaatcccttacttttttccttatttttttttatttctttaatcttttcctcctttcctgggtgccttctcttctttactatctccaacatcagccagtccacttctccccacttttctttcacttttcatgtaacttatccattagtgattaattttgtttggttttctcttgttatacaaggacataagtcacaactgaaatattttttgtgtgtgcttcattggttagattggaacactacaaaaatgcaaccaaaatggggcctaagggatcaaattattatgaaaaattaattaagttaattaactgtaacttggaatttgaatgcacagaactctttcaggtaattag

SEQ ID NO: 688367 - DNA, 1240 bp, Homo sapiens
tgacccccttgcaagtccacatctttaagaaacccctaacctggccattgtctcttgataaatttgaataaaaagtactcttatgagctaaagctaaagaaaatgtttagtatttccctttctggaaaaaaaatgtaaatatgaaatttcttatatcctaatcattaatacttgctgaaaacaaygtttaaacttttaaaatatttcatttttccaaaatgtgattaaaaactaaaattcagtttgtatgtatgcatatgtttatcactgcctgaagtaatctacgtagaataacagagtagacaaggatgaaaagtctagaattagtgtacctgaatcgaatcttggctcaatcgcttaatagttgtgtgaactttgtgaacacgtgtgtgctgtctctggaaggaataaatatttatagtgtgggactgcatctgttcatgcaacacgctgtctggcacaggtttctgtctctgatggaaaccatatggtggagagatacaagcaaagttacagaagcgccttccattactgaagaaggtgctacacggtcacagagatagttattaaggcatagagactgtgtttgaatgcagtttctactactgactagatggtgtcggtgtgacctaattctgcttactaagtcagttgaaatacaaacatttagagtgtttaaatcgaagagagtaaaaattaaactaggcccaagataaacctcaaagcactacattatgtctttgcagattgacatgttttcacatagataatcccaacataattaaaaaatattaatatttctgaaattcacaccaaaagagagtttgaatacaggatgattaattgaatttcctccaacaaaatcatctttatattataaataatataatacaatatatagagaaaaactgaatacaacttcgttattttagtatgttactttgaagcacagatttaaagcatcaagtcataactaaagtgccaagacatgcaattcaagccttaagtggagcctgagagaagaaaaatgcccatagcaaaaacaggaatctgtcacaaactaaacagccagagagactagatatccaaaatacttagttgtcctgaatccaatttgaagttgttttatgaactcattctaccctagaccttggcttgcatatctacttagggaaggagagggggccatgaggtggaactcccagtccacttcatgaggaaccccttggacgcagggctt

SEQ ID NO: 688368 - DNA, 661 bp, Homo sapiens
agtctttatcagctggtttcagcggagaaaatcttttaccaatcagcctagctggaagcttctcaaatattttctgtggctgtacacattccactccttttctattcttggtggacacatttcagggttgtgcctcttctcccaatctcaacatgttgtgctggtcacagtaagtcatcttcatgaaaggaatgcactggaatggtgacaggctgggtgcaagttccacttctttctcttcctcctgaagggtaagactcaggattgtaaactttctctttatgtcacagtgccatacagacttgaaagcttcttgccccatttccctagtgtagctccacttttctcccttcttcctgaatacagaatctaaaatatttgcatcttctttccatcccacagtgctatgctagctgstgagagactcagcacgtttctttggtgttagcttccccgaggcattctattactggttccctgactgcttggagttgaggtaaaacaaaattaggattactggggagaaccccaagcctgggaatgtcagatggactcttccctgagtctttcccccaagggagaaatgttgagcctaatgaatttcttttgtcactgagccagagtggcttgtgggagaggttgacacagataaactaaaatt

SEQ ID NO: 688369 - DNA, 621 bp, Homo sapiens
tgagtctgaataagagaaggtattatccttgcagtccctcaagttagatatttcttcaaaaatacaaagcttgtcagcaagggcaaaggcccggaggcacaaatgagttttgcttattcaagggagaaccagaaagaagccagkatacctggtgaatgttaatcaaggaagaaaatattaggatatgaagacagagaaataagtgaataccattctaaatgcaagaagacattgggaaggagagggagaagtatgcctcactcaaattctttggataccctctgaaacccctaatatatttctgtgcttttagaggacttcatttgctccagggataagacagacttcataccacctccacatgaatgtttttttggataaaaaagaattggattataagagactgtgaaaggaaaataaaatctcaggaacccaaactcactatgccaaggggaaaagtcaggcttatgggaactgagtcatgaaaatactgccttccttttatttgcaagcagctgcaatttcacatgcttgtttgtcttatgtaaaatgtagatttactgagtgctagatgaatacataattgacttctcctccactcttttcttttcacaagtaaaa

SEQ ID NO: 688370 - DNA, 621 bp, Homo sapiens
tgagtctgaataagagaaggtattatccttgcagtccctcaagttagatatttcttcaaaaatacaaagcttgtcagcaagggcaaaggcccggaggcacaaatgagttttgcttattcaagggagaaccagaaagaagccagtatacctggtgaatgttaatcaaggaagaaaatattaggatatgaagayagagaaataagtgaataccattctaaatgcaagaagacattgggaaggagagggagaagtatgcctcactcaaattctttggataccctctgaaacccctaatatatttctgtgcttttagaggacttcatttgctccagggataagacagacttcataccacctccacatgaatgtttttttggataaaaaagaattggattataagagactgtgaaaggaaaataaaatctcaggaacccaaactcactatgccaaggggaaaagtcaggcttatgggaactgagtcatgaaaatactgccttccttttatttgcaagcagctgcaatttcacatgcttgtttgtcttatgtaaaatgtagatttactgagtgctagatgaatacataattgacttctcctccactcttttcttttcacaagtaaaa

SEQ ID NO: 688371 - DNA, 2066 bp, Homo sapiens
tcaattctcagcttcaaaattccaagtatatatgaggtgacaaatgtaaccaaattctacagtctagcttaaattttataaagattaaatataaagtgtgtatagcatctaaaattaaatacttatctctgattcatttaaaatttgtttacatccactctgagataagacaaacattaagccttaataatttaatgtaggtttgcctaaagtagagccttctgtttaaaatataatcaatagagtctttaaaatatttcttatggactgaatgattgtgttcttccaacattcatatgttgaaatcctaacccacaatgtgatggtattaaagatgtgacgcccagatctttgggaagcccaggtgagamtgtcgtttgagcccaggagttcaaggccagcctgggcaacatggcaaaactccatctctgcaaaaaaactacaaaaattagctgggcatgatggtacacacctgtagtctcagctactcaggggctgaggtgggaggatgacttgagcccaggaggtcaaggctgcagcgagctgtgattgtgccactgcactccagccttggtgacagaatgagaccctgaaacaaacaaacgaaaagatcacggggcctttgggaagcgatgagttcacgaaggtggagtcctcatggatgggattcgcacctgcttaatagagaccccacagctctgtagcccatactccaccgtgcaagcatacaatgagagactgacagtcttcaactcagaagaggctcctcagcagaatccaaatatcctggcaccatgaccttggatttcccactatctagaactgtgagaaataattttctgttgcttatatgtccatggtctatggtactttgttatagatgcctaaactgattaagacattacatatgtttctccatgaaattgattgactattccaaagttagcaaatatattgagggtctaccctggttatacagtttacaacttcttgacttgaaaaagttatttaatattaccttacagcattattagaaggattagaaagagtgtatggagaacacttagcataaagccgataaaacttaattattcaataaattataacttattaaactctttattcaagtacctatgggttatatgttatggtaggcattttttattatattctgagttgtgtgtccactgtaattacaataacagaacaggatatctcaaagcttaacattagggctttagtattttaatacatttaagtcatttttaatattttcatatgaaaaaacaccacttccatggctattttcatcccacttttaggcacagttttcattttatttttaaagagaaataaacattaagataatgtttattttaagtcctttaggttttaatgcattaattatatctatttctcaacaataacacaagaatcttattaaatggacttacttgataaacagggaacctgctattacacccaggtattctgttaagccagtgtttccaattgatcaatgaaaaatttcagaagtatttcaaggctatttttagctcaactttttaaaatattattcataatattgatcaacatatttaagacaatatttaagacaatatgttaatcaatattatcagggagagtacattaaaccacgtgttagttcagacctgtgctgttcaatgtggtagccactagctacatgagcctattaaaccctgaaatgtagctactccaaattcaaaatttcagaaatgtaaaatacacactggttttcaaagacttataaaatgtttcaacaatatatggaaggataggagaggagtgagggatgagaaattaattaatgagtgcaatgtacattattcaggagatagttacaccaaaagcccagaattcactactacaaaatttagctatgtaacaaaactgcacttgtactttttaaatttgtacaaataaaaatggtattgattatatgttgaaatgatattttgtaagtttgcatataattcaaattcattttacctatttctttttactctctaaaatgtggctattag

SEQ ID NO: 688372 - DNA, 1206 bp, Homo sapiens
attatacacagtagtctaaacacattattgaatattgaaataacatcatcaagaaagtttttattttttaaaaaaggaaaataagtggttgcatttggggagtgatattggagaacaggtagaattaaggcaaagtattttcataatcatcattataatagtaaggggcgctgtgtagatcccctctccaaaacatatacccaagttactgggagtgttgctaagaatagctctcagctgagttccacttcaacttttgacttgggctcaaaaatgtcagaatgtcatccaaagtcacacttatctgggaatagctcacatcaaatgaatggtcaatgttggatcttttactcttattcaagaaaaatctcaagggtcctccatatttatagcttcctggaggatcatctgtggcctctatttcmtatatcacaacttggcttttcctctgcccagtgctgtttccttttcccaccaatcatctcaattcccttttattttttaatcttgaggacactcttcaatttatctcttgcagacaaatctccatatcagagtctgctttccagagacccatatttaattatatatattattgggtttaaaaatacaaaaagattttttgcagttatctcttaaaattactataagggtcaaattaagctataggtatggtatactatatttttgaaaattttagagttaatgaaaataatgacaacaatatagcatattgttgttctattttgacagttatcacagatacgtccctttctcacagagaagttatcatttccccttctgtaaaactgggctttggacttctgttttttagactctttggtcatttgattacttgttaagggcatatatctctgacatgttccacgtattcaatgctagatcctttctagcagcaatatgaacacacgtatgacattttcatacttagaaaataagcaaactaataaaaatgaaataaatcacgattcctagtatttactgacttctctgttttacactgcagcgaaaccacctgcattacctctacttgccccctctacttgctctgtccatttccttatctcacttcaatgtcatggcaattcaggttcagtggcaacattttcatgttcaatgtgtgccaattaccaatggtttcttgttgttaaatcccaaatgaacaagggcattttgtaatttgta

SEQ ID NO: 688373 - DNA, 616 bp, Homo sapiens
agaagcatagggcagacacacagtgagcaggagaagcctgggagatgaaggcaaagagcacagccacactgactgccgccaacttcccagcgactgggccccaacctctgatgaagacatctaccttcctctctaatgacttctgttaccttggcaggcactttctccgctaccttttctccacttgtccttcaaggtacccatgctccagccatactattaacagccaggtgggcactcacacatggatgaaagggcaccactctgcctatttcctggcctgcccctacgtggaagggaccagtttaccaagatgaagagaaatcactcccagaagtcaggtgtactctgacaacaggatgactgacaaaaggaccactaatgcccagaggaacctccaccacccactcagagaggcaagagtctacccaatgaaccccaaagacaatcatggtattatctgaagtcgaggtcatgcagtctcaaataattctatgtgaaaaatatcaatggtccagtctatctagacagatatgccccaatttacagaagtacaactatattgcaagaaaaatttaccatgyagaaatattgattttaataccatagctatgta

SEQ ID NO: 688374 - DNA, 2147 bp, Homo sapiens
tgagacacaagaattgcttgaacctgggaggtggaggttgcagtgagctaagattgcaccactgcactccagcctgggtgacagagaaagaccctgtctcaaaaagaaaaaaaaatacagtgttataatcttatgggaccactactgtatatgtgatctgtcatttactgaaatgttattatgtagcacatgattatacatacatacatatatatattctataatacctatgaaattttaatattaattcctgttcctgcttcttttttcagaaatgagattacatttggggaagtattttcaaggtcctaaaatcaagttgttataatgagagaacagagaagactctgtaatatttcacattatgtagtgtttttttcagtcatcagaacacttacacatattacatggttttataaccctgggtactatttaggcaggaattttttttctattctgcaaatgaaaaaaacatgttgtggccacacagatcttcatattttgaaacccaacccacagcattttttacggtaaactatatatcacactgcctttctgctcaaagactttaaatgattttttctatgcaaaattaaaatatgaaatattttcagtgttcaggttcttataaactgagtttatatgcatattggtatattaatatactccttataatttttatgaaatttcaacattcattacatgttcctttgaattccaagaaaatctttcattgcatgaatattaccattatctcactttccagctttctcaaagccgggcactgtgaggaatgcctcagactggcaaaaaaaaaaaaaaagttaggatgttactggagagaaaagaaactgcactttgataatattaattatttagctgaaaggtatggttcaaatattcaagaagcttttggcatttcccacattacagtcaggcactagaacgtagcaacacagaaatgtacttgttacctgaggcatgttttaatttggggttcaatgattcagtcctacatgaccaactaaaataaaaacctatattctggaagttggtttgtgaggactttggggttaacaactctgaacaacttaagcactacctaccagagtatgctgcttgttttctttggcttagaattgtacataggtagaaaatgatgaacatccattcaattgtgacatcttttctttgtcatttcatagaaaaggggatatgtcatcagttgggcagcaataagaactgcattcttctaaagtggattttaaagttattaacccagagtttcatcagggttccttttagtaggaccaatatcaagggacagtttctgttgcatctgacctgcaatttattttttatcaagttatgtcagaactaaaaagtggtggggttaagagcatcagtgctttctgcaatgtcaaggaacccatttttgaatactagttctttccccatggttctgtctgaggcatgtaatttaaaaagtctgccgtattattttggaggttaagctgagcacttctttgggtaattggggtcatcttccagtgggcagtacttgaactgagacaattctgattttaatttttttttctgaggatatcttgagagatggcagtgaaaaagtcagaatagaatgctctatttttaagaaagatttatgaatgttttaaaaaattctttgtcccacatatatctaatttttttatacgcacacaattgtgcatttcagaactctttaggaagtactcttaaatgtgtctgatatagatcttagaagtaagattattcattcattcactccattccttttgattttctttgatattagtacatgtgaggcgagcagaaaarataaaatctgccttctaaaaacactctgcagggccaggcgtggtggctcactcctgtaatccaagcactttgggaggctgatgcgggcagatcacgaggtcaagagatcaagaccatcctggccaacatggtgaaaccctgtctctactaaaaatacaaaaattagctaggcatgatggtgagtgccactcgtcccagctactcaggaggccgaggcaggagaattgcttgaacctgggaggaagaggttgcagtgagccgagatattttgcatcttctcttttattgca

SEQ ID NO: 688375 - DNA, 594 bp, Homo sapiens
aactacacacaattaaatattagaaaaaaagataaaaaggccgggcacggtggctcacgcttgtaatcccagcactttgggacgccgagccgggcggataacgacgtcaggagattgagaccatcctggctaacacggtaaaaccctgtctctactaaaaatacaaaaaattagccgggcgtagtggcgggcgccagtagtctcagctactcaggaggctgaggcaggagaatggcgtgaacccgggaggcggagcttgcagtgagcggagatcgccactgcactccagcctgggtgacagagcgagactcttgtctcaaaaaaaaaaaaaaaaaaaaaaaaaagataaaaaatacaggagggaaaytgacattccttttacagttagaaaatctaaaaggcattgaaatggagtcccagaggatgagagagaatgcagaagcaatatttgaagagaaaatggctagggatttctaataactaaataattcaccaattcacagattcaaggaggatatatttaaatatatgatgtgtttgtgtgtgttttaaaaatacacaaagacataataaacttgataaaacccaagacaa

SEQ ID NO: 688376 - DNA, 594 bp, Homo sapiens
aactacacacaattaaatattagaaaaaaagataaaaaggccgggcacggtggctcacgcttgtaatcccagcactttgggacgccgagccgggcggataacgacgtcaggagattgagaccatcctggctaacacggtaaaaccctgtctctactaaaaatacaaaaaattagccgggcgtagtggcgggcgccagtagtctcagctactcaggaggctgaggcaggagaatggcgtgaacccgggaggcggagcttgcagtgagcggagatcgccactgcactccagcctgggtgacagagcgagactcttgtctcaaaaaaaaaaaaaaaaaaaaaaaaaagataaaaaatacaggagggaaattgacattcctkttacagttagaaaatctaaaaggcattgaaatggagtcccagaggatgagagagaatgcagaagcaatatttgaagagaaaatggctagggatttctaataactaaataattcaccaattcacagattcaaggaggatatatttaaatatatgatgtgtttgtgtgtgttttaaaaatacacaaagacataataaacttgataaaacccaagacaa

SEQ ID NO: 688377 - DNA, 235 bp, Homo sapiens
tgctttttatcrccaactgggtaattgcatcggtgagaccttgggtacagttacagcaaaaaagtctgaaaaaacaagctagacctctactaagaatgaactgcctagggtaaggtccctttgtcctttgacacaaagtaacttaattttgttgaatctacaacaaaacaacccagctgggatttgattcagatgttctttccattttaaattgaatgtaaacctcaattttagg

SEQ ID NO: 688378 - DNA, 632 bp, Homo sapiens
taccaggactctcaatgactagatacttcactgatgaatgatttattaatggttgttattcattttgtgttggtttatctttattttttctggcttgatcaaattgctactcatttccttttctatttattaattttataactccaataaatgttttaataaattaattattgtgttcctaatctcaatatccattattaaaaacacattgctttatgattacatgaaatcaagatatccaagctatccacgatcaatattttcctgctaatagactgaaasttttcaaatatttttatatccattctactcctccttgaaacatgagacatttgggattgttttacttggtctcctttttccaaccacacctaccctctctaccaaatgctaagctgtattaacaatatttacttgatagtgggtttcttatacttaaggaatccttaagtatcctttggtacttaggtcacacatttctagatagcttactaagtacgtattgatttgacttcataggcgttgcagtgctctttgcttaacaccacgtgtctatttctgacatatgttgctttctaagtatttctctcagatggagcatgtgctgatacattccttcaatgcttgatttc

SEQ ID NO: 688379 - DNA, 640 bp, Homo sapiens
cagagatccaactttaaagtgggagaataaaagaagataatgagtatcttagagttctattttttaaaaattgataaattaaggcataggatataggaatacatggtggagacacaattgtgagtaaaaagaagcccaatctatactttcatgaagcttacggggagactgaggaagatgaatattttaaaaacctcactaataattacaaactgggattgtccgaaaaaaagaacatgattctgtgaggacatattacacgaaagctgatctcgattgtggtaktaagtgactagaggcgaaatctgaaggataggtaggaattaatgagaaaagggctggtgagcaggaagtttgaggcaaacatattaagcctctgtagcaggagaaactgaaaaacgaccagatgggctggagaaaagagattttttaaaaagccaaaaacgaaaaaaattctggtacaagtctggagaggcagccagtgggccataccaacaaaccattttgtccttgctaagaatttgggtatttgtcctgggatcaatgggcgggtaaggaatgttttggtttctgtcttgaaaagattatacctaccgtaattccagaaatgaattgtgatggacagtgtcagactgaaaaa

SEQ ID NO: 688380 - DNA, 383 bp, Homo sapiens
gaggtcaggagttcgagaccagcctggccaacatgaagaaactccgtctctactaaaaatacaaaaattagctgggtgtggtggcatgtgcctgtagtcccagctactcgggaggctgaggcaggagaatcacttgaacccaggaggcggaggttgcagtgagcagagattgcgtcattgcactccagcctgggggacaagagtgagactttgactcaaaaatartaatagtaataatgatgatgatgtgtgaagtttactatgtgcaaaaacctatgttttgcatggaggaaaaatatatgaggcaccctgcccttaaggtgcttctaggctagaagaggagctgaaaaggtgtggaaccaactttgccacaaggcagagag

SEQ ID NO: 688381 - DNA, 383 bp, Homo sapiens
gaggtcaggagttcgagaccagcctggccaacatgaagaaactccgtctctactaaaaatacaaaaattagctgggtgtggtggcatgtgcctgtagtcccagctactcgggaggctgaggcaggagaatcacttgaacccaggaggcggaggttgcagtgagcagagattgcgtcattgcactccagcctgggggacaagagtgagactttgactcaaaaatagtaatagtaataatgatgatgatgtgtgaagtttaytatgtgcaaaaacctatgttttgcatggaggaaaaatatatgaggcaccctgcccttaaggtgcttctaggctagaagaggagctgaaaaggtgtggaaccaactttgccacaaggcagagag

SEQ ID NO: 688382 - DNA, 2439 bp, Homo sapiens
cttttctttgtttctttctttttttttctttttgagacatagtctcactctgttgcccaagctggagtacaagggcatggtcttggctcactgcaacttcctcctcacgggttcaagaaattctccctgcctcagcctccagaatagctgggattacaggcacctgccaccacactcagctgatttttgtatttttcagtaaagacagggttttgccatgttggccaggctggtcttgaactcctgacctcaggtgatctgcccccgtcggcctcccaaagtgctgggattataggcgtgagccataccgtgcctggcctggagttattttctttattctcagttcgcaaattctcaagagtactcttaaagcacacccatacccrtaggaaataagaccatacctactcctggcctggaaccctactggttctgggccttggcaccatcctggccctgcctatggggaacagactgatcgtggtaaggtgacaataggatgacacaaacaggctcattactactctctccttcacagacgagttcaaaagtcttggttgcatttaaggaatcagagcctgagaaaagcctgcaattggatgctatacagctggtaaatatgattgaataatacacgcacatttatatttctagatcggtcatacattcttaaaaaaaaaaaaacaaccctttaaggcattcctagccaccaaaaggtcatattcattggatgactgaaaaaaaaaaaaagatttgaatgtacaaatccaaagttggcttcagttttgtatcttcacctgcttccaaatgaagtgtgcaagtcatagattcacaccttcagaaaccccagtgattttcaatctgccttgaaaacgcctatctgcaatggacgtgtcttctctcttccagccactaaacaacagaagtaacccaggaggcacagaggattccatgatgcctcaggaccatcacacacaacacacacatgttcaacacacacaggctgttcttacacttgtgaaaatgagggatcctggaaactactatttgtgcaagaaactactatttggctctgacaggacagaataaaaatgggaaatccttccaatcatgtgagatactgcccctagctccttctacaggggaggtgtgagaagttgcttccccttctcttgagagacagatgaacacctctcaagcaaagccttctgcatcctgtcgaccccagaggacggacggggagaaatcatgcacttcagtctgagaagaaccaacaagcactactgcaggagtgtggctccgaggctgcagagaacgatcccttccacagacgcaccccaaatacaccagctcctaagctgcccttcacacaaaacccagaaggaggaagtgcatttgtattcatgaatccgcatgattacctgccccgagagcaggagaaggggggccagggacgggagcctttcctggacagctgtgtggaagcagcaggcagcagagctggcctgtctggagcacgtgcctgttccggggtgccgtgtggactggggaagagctgtggcacccacattcattgtaatcatgataaaaataaaaataaacagcaacgtcttcctgcactgctactgccactcatgagccgctgtttcaacagctgtagccgttgatgggtggggactagagaccgacaagggccaccatactcagatcccagcttcctttgtgcttatacagtaacacaagtgccttccccgaacatctgtgttcctccctacagctgcctgggggtaagtgtcacacaggtggtgagttggccaaggacagctttgagggtcagcagcatgcactaggaaagcctacacaagaggctgcaggccttgcttctggtcctggttctgccactaaccagctataaccttgggtgagtcacctcttttcctgagacaggtcctcctcatctgtgaaatgaagatgtattcccacgttccagcttctgagtttttctagtacccctcaagtggagagaaataatgctatgccgccagggggaccgggagagtttctagaattttatcttaaaaattatacttgacttcacaatgtatccacatcagctttgaaatacaatgctttgaaccacctgttaaattccttaacttgttctccccaaacctttgtgtcaagtttctccttggatgccccatgcttacggcaaggctctgagctggtccagcacatacactctggagaaaccttccggctccaagaatgcacatacagaagcacccctgcttgcaagaggagtccacagagcctgtctcatacaaactcacctgtttatatgaaagccattcatagggttggtctggtttccgagagcctaaacaagggccattatctaaaaaaagagaaaaaacaacagatgggctgaacgtacat

SEQ ID NO: 688383 - DNA, 2439 bp, Homo sapiens
cttttctttgtttctttctttttttttctttttgagacatagtctcactctgttgcccaagctggagtacaagggcatggtcttggctcactgcaacttcctcctcacgggttcaagaaattctccctgcctcagcctccagaatagctgggattacaggcacctgccaccacactcagctgatttttgtatttttcagtaaagacagggttttgccatgttggccaggctggtcttgaactcctgacctcaggtgatctgcccccgtcggcctcccaaagtgctgggattataggcgtgagccataccgtgcctggcctggagttattttctttattctcagttcgcaaattctcaagagtactcttaaagcacacccatacccataggaaataagaccatacctactcctggcctggaaccctactggttctgggccttggcaccatcctggccctgcctatggggaacagactgatcgtggtaaggtgacaataggatgacacaaacaggctcattactactctctccttcacagacgagttcaaaagtcttggttgcatttaaggaatcagagcctgagaaaagcctgcaattggatgctatayagctggtaaatatgattgaataatacacgcacatttatatttctagatcggtcatacattcttaaaaaaaaaaaaacaaccctttaaggcattcctagccaccaaaaggtcatattcattggatgactgaaaaaaaaaaaaagatttgaatgtacaaatccaaagttggcttcagttttgtatcttcacctgcttccaaatgaagtgtgcaagtcatagattcacaccttcagaaaccccagtgattttcaatctgccttgaaaacgcctatctgcaatggacgtgtcttctctcttccagccactaaacaacagaagtaacccaggaggcacagaggattccatgatgcctcaggaccatcacacacaacacacacatgttcaacacacacaggctgttcttacacttgtgaaaatgagggatcctggaaactactatttgtgcaagaaactactatttggctctgacaggacagaataaaaatgggaaatccttccaatcatgtgagatactgcccctagctccttctacaggggaggtgtgagaagttgcttccccttctcttgagagacagatgaacacctctcaagcaaagccttctgcatcctgtcgaccccagaggacggacggggagaaatcatgcacttcagtctgagaagaaccaacaagcactactgcaggagtgtggctccgaggctgcagagaacgatcccttccacagacgcaccccaaatacaccagctcctaagctgcccttcacacaaaacccagaaggaggaagtgcatttgtattcatgaatccgcatgattacctgccccgagagcaggagaaggggggccagggacgggagcctttcctggacagctgtgtggaagcagcaggcagcagagctggcctgtctggagcacgtgcctgttccggggtgccgtgtggactggggaagagctgtggcacccacattcattgtaatcatgataaaaataaaaataaacagcaacgtcttcctgcactgctactgccactcatgagccgctgtttcaacagctgtagccgttgatgggtggggactagagaccgacaagggccaccatactcagatcccagcttcctttgtgcttatacagtaacacaagtgccttccccgaacatctgtgttcctccctacagctgcctgggggtaagtgtcacacaggtggtgagttggccaaggacagctttgagggtcagcagcatgcactaggaaagcctacacaagaggctgcaggccttgcttctggtcctggttctgccactaaccagctataaccttgggtgagtcacctcttttcctgagacaggtcctcctcatctgtgaaatgaagatgtattcccacgttccagcttctgagtttttctagtacccctcaagtggagagaaataatgctatgccgccagggggaccgggagagtttctagaattttatcttaaaaattatacttgacttcacaatgtatccacatcagctttgaaatacaatgctttgaaccacctgttaaattccttaacttgttctccccaaacctttgtgtcaagtttctccttggatgccccatgcttacggcaaggctctgagctggtccagcacatacactctggagaaaccttccggctccaagaatgcacatacagaagcacccctgcttgcaagaggagtccacagagcctgtctcatacaaactcacctgtttatatgaaagccattcatagggttggtctggtttccgagagcctaaacaagggccattatctaaaaaaagagaaaaaacaacagatgggctgaacgtacat

SEQ ID NO: 688384 - DNA, 2439 bp, Homo sapiens
cttttctttgtttctttctttttttttctttttgagacatagtctcactctgttgcccaagctggagtacaagggcatggtcttggctcactgcaacttcctcctcacgggttcaagaaattctccctgcctcagcctccagaatagctgggattacaggcacctgccaccacactcagctgatttttgtatttttcagtaaagacagggttttgccatgttggccaggctggtcttgaactcctgacctcaggtgatctgcccccgtcggcctcccaaagtgctgggattataggcgtgagccataccgtgcctggcctggagttattttctttattctcagttcgcaaattctcaagagtactcttaaagcacacccatacccataggaaataagaccatacctactcctggcctggaaccctactggttctgggccttggcaccatcctggccctgcctatggggaacagactgatcgtggtaaggtgacaataggatgacacaaacaggctcattactactctctccttcacagacgagttcaaaagtcttggttgcatttaaggaatcagagcctgagaaaagcctgcaattggatgctatacagctggtaaatatgattgaataatacacgcacatttatatttctagatcggtcatacattcttaaaaaaaaaaaaacaaccctttaaggcattcctagccaccaaaaggtcatattcattggatgactgaaaaaaaaaaaaagatttgaatgtacaaatccaaagttggcttcagttttgtatcttcacctgcttccaaatgaagtgtgcaagtcatagattcacaccttcagaaaccccagtgattttcaatctgccttgaaaacgcctatctgcaatggacgtgtcttctctcttccagccactaaacaacagaagtaacccaggaggcacagaggattccatgatgcctcaggaccatcacacacaacacacacatgttcaacacacacaggctgttcttacacttgtgaaaatgagggatcctggaaactactatttgtgcaagaaactactatttggctctgacaggacagaataaaaatgggaaatccttccaatcatgtgagatactgcccctagctccttctacaggggaggtgtgagaagttgcttccccttctcttgagagacagatgaacacctctcaagcaaagccttctgcatcctgtcgaccccagaggacggacggggagaaatcatgcacttcagtctgagaagaaccaacaagcactactgcaggagtgtggctccgaggctgcagagaacgatcccttccacagacgcaccccaaatacaccagctcctaagctgcccttcacacaaaacccagaaggaggaagtgcatttgtattcatgaatccgcatgattacctgcccckagagcaggagaaggggggccagggacgggagcctttcctggacagctgtgtggaagcagcaggcagcagagctggcctgtctggagcacgtgcctgttccggggtgccgtgtggactggggaagagctgtggcacccacattcattgtaatcatgataaaaataaaaataaacagcaacgtcttcctgcactgctactgccactcatgagccgctgtttcaacagctgtagccgttgatgggtggggactagagaccgacaagggccaccatactcagatcccagcttcctttgtgcttatacagtaacacaagtgccttccccgaacatctgtgttcctccctacagctgcctgggggtaagtgtcacacaggtggtgagttggccaaggacagctttgagggtcagcagcatgcactaggaaagcctacacaagaggctgcaggccttgcttctggtcctggttctgccactaaccagctataaccttgggtgagtcacctcttttcctgagacaggtcctcctcatctgtgaaatgaagatgtattcccacgttccagcttctgagtttttctagtacccctcaagtggagagaaataatgctatgccgccagggggaccgggagagtttctagaattttatcttaaaaattatacttgacttcacaatgtatccacatcagctttgaaatacaatgctttgaaccacctgttaaattccttaacttgttctccccaaacctttgtgtcaagtttctccttggatgccccatgcttacggcaaggctctgagctggtccagcacatacactctggagaaaccttccggctccaagaatgcacatacagaagcacccctgcttgcaagaggagtccacagagcctgtctcatacaaactcacctgtttatatgaaagccattcatagggttggtctggtttccgagagcctaaacaagggccattatctaaaaaaagagaaaaaacaacagatgggctgaacgtacat

SEQ ID NO: 688385 - DNA, 627 bp, Homo sapiens
aaccactccatttctggactccaattttgggcattgactttgtcttttaaactattttaaacaaatgaatctgaaaaatcttcaaaacctgggtgacaggttaatatgtagggataatctcatggtcttacaagggtaaactacaaaatatataaaatccttctgaatctggttcagatgaaaaagttgctatgagaaataggatattcagaattaagtgaaaattatcttggaaactcactgaagaggtaagtttttggacaacaaaatcaaatccattcaatgtagcagctggattaaataatgacagtaaacatttattattattacatttattttaaatgccaagctctgtctgggtgctttatgtggattttctcaatgaatcctcacaaaaactctatgaggttgaaaatattatccctattttacaaattggggaagcgaggcaaagaggggtttgagtgacttgctcaagatcacacggccagttaatgttaccggggaacaaaatataggcaaagagatcccagagcctacattctactctttyttttttcaatttgacttcatttattgagatattgcatacagccaatggaagtaaggatctacttgcttatctca

SEQ ID NO: 688386 - DNA, 2647 bp, Homo sapiens
cagtcatgacatatatactacattgagagaaactagctctttttttcaatttatagttatggggtttatataaacaaatttcattgatgttactttgccttgttgaacagaatagagctttaacaggagaaacaaccatcttctgaattccaaagaaccttgaattctcatgtctttctaggtgtgttcctctaaggtctagaatttgttaattgctatgatgtcttcgccaagaagactggtctgtgtggctactttcaggacaactattgtcaatcaacatctgcagagacaatgacaaaacagcctcactacatacctaggcagcttctgttctcaaaataaatgatctcagctgtttcaaaaaataaaatagtaaatacgaccatcatccaagtttccattctgtaccattccattctgtaccattccattaaatctgttgacgaattatatccatatttaaatactcttatggataaaagcagaaatgtgtcaggataatcagcaaaaatgtaaaaatcagagtgaattgataacttagttgttatattggttatggcacaatgtcatagggaaaaaatgagcttcagggtcagagagttttgtgttccaatctgaatttgaacacttacgagctctgtatctctgggaaagccatttaatttttctgaactttagaatatcttctatacaattaagataaaaatgcttattaatcagattttcattgattaaataaaacatggaaaaatacattatacagtgacttgcagatgctctagacaaactgagttgtcattttatgtcctttctatcctacatcagataactgttttgaatgatatttttaaatgaaagttattagagttttttttcttagcaacatttatacrttatagtgtttatatctatctaccatcaaaatgaatttgaggtaatttaaatcattagaaaaacaggaaacatttattaaaaaatacttaaattaacatacagaataaatctctgcaggaagataagaaaacaactggcatgaagtaaaaactgaagttcttcatcatagctttgaaagtcatgcacaacatacagcaaaacctacctttctgtgcttatttcacactttgtcctaacacacatcttctgctccaatcaaagcagaccatttgataagccctacatatctcatttgcttttcttttctacctgaaatgctttctcttcctaccccaaaacttgaacgaaaactcagccaaaatgttcatgcaaaacgctcatctcttttatacagattatagagttccagacctgaatgtttcttttcctcctttgcctccccttaattctgtcttcaggaaccatcaatggttattgtcctatccaccttgtttgttcattggccttagcttctctccctacaacaagaactctggactgtccccctgcctaaaggatggattgaaccatttatctctctctcttctgcagcatccagtacagaagcttccttatttttattattcactttatatttgttaaattgtagtaaatgggaatttaatactaaactgttttctgagcttcctgacaacaaagaaaaaaaaaaggaattatagaacttggagataagttgttaaaaaaaaggaaaaaatgataaaagaaattaaagaatgtacttttagttgtccactgaataaaacataataaggtcacttgaaaagcctttttttttttttgcttctgatttctaggataaatttatctcatagatgttgggcaagggtgttctggataaaagaagagtgtgagccaaaatacagaggcaggaagggagaggatgagcaaggtttagctggagggtctgggtggaagaaaggtcagaggcctagactatgactctaggttttgactgagaaacactctttgcacatagcaactcctttattcctggaaaaataattcaagcatgctttttagttgccacttaatatatttacattttaattgtttccattttcagtgggtgttactttagacaatataacaacctcagtttctatcaatgaaaataaaaatttaggaaattgtcccctattttaacatttaaatattacaaaagtctcatattgtctaatgaattttaaattttctatagttttagattgtatcagacatggctaataagttttaacaagtaatcattgagtaccaactatataccaaatgccatttcgagtgctataaatgtgacagtgtctctgcccctcatgcagcttaagttccagtgagggagatagacatttacccaaccaacaaatcagtatatgaaaaaaaattttatctcatagattattatataaagctgtgtacatgataatagacaataggtaaaaacatagttcaccaaaaaattgtagaaatctttataaagatgaattcttttttattatacataattaaagttatggaccaaaccaattttaatttcaggaaaatgaatggcatcattcaacaatgtttttttctaattgtatttcttaacataggtaagagcttggagaaaatgtttaagtaggtggttagcttgtctctttaaatcatcccattttcaagtaaagttttgacaagacctggttacttgtagtca

SEQ ID NO: 688387 - DNA, 2647 bp, Homo sapiens
cagtcatgacatatatactacattgagagaaactagctctttttttcaatttatagttatggggtttatataaacaaatttcattgatgttactttgccttgttgaacagaatagagctttaacaggagaaacaaccatcttctgaattccaaagaaccttgaattctcatgtctttctaggtgtgttcctctaaggtctagaatttgttaattgctatgatgtcttcgccaagaagactggtctgtgtggctactttcaggacaactattgtcaatcaacatctgcagagacaatgacaaaacagcctcactacatacctaggcagcttctgttctcaaaataaatgatctcagctgtttcaaaaaataaaatagtaaatacgaccatcatccaagtttccattctgtaccattccattctgtaccattccattaaatctgttgacgaattatatccatatttaaatactcttatggataaaagcagaaatgtgtcaggataatcagcaaaaatgtaaaaatcagagtgaattgataacttagttgttatattggttatggcacaatgtcatagggaaaaaatgagcttcagggtcagagagttttgtgttccaatctgaatttgaacacttacgagctctgtatctctgggaaagccatttaatttttctgaactttagaatatcttctatacaattaagataaaaatgcttattaatcagattttcattgattaaataaaacatggaaaaatacattatacagtgacttgcagatgctctagacaaactgagttgtcattttatgtcctttctatcctacatcagataactgttttgaatgatatttttaaatgaaagttattagagttttttttcttagcaacatttatacattatagtgtttatatctatctaccatcaaaatgaatttgaggtaatttaaatcattagaaaaacaggaaacatttattaaaaaatacttaaattaacatacagaataaatctctgcaggaagataagaaaacaactggcatgaagtaaaaactgaagttcttcatcatagctttgaaagtcatgcacaacatacagcaaaacctacctttctgtgcttatttcacactttgtcctaacacacatcttctgctccaatcaaagcagaccatttgataagccctacatatctcatttgcttttcttttctacctgaaatgctttctcttcctaccccaaaacttgaacgaaaactcagccaaaatgttcatgcaaaacgctcatctcttttatacagattatagagttccagacctgaatgtttcttttcctcctttgcctccccttaattctgtcttcaggaaccatcaatggttattgtcctatccaccttgtttgttcattggccttagcttctctccctacaacaagaactctggactgtccccctgcctaaaggatggattgaaccatttatctctctctcttctgcagcatccagtacagaagcttccttatttttattattcactttatatttgttaaattgtagtaaatgggaatttaatactaaactgttttctgagcttcctgacaacaaagaaaaaaaaaaggaattatagaacttggagataagttgttaaaaaaaaggaaaaaatgataaaagaaattaaagaatgtacttttagttgtccactgaataaaacataataaggtcacttgaaaagcctttttttttttttgcttctgatttctaggataaatttatctcatagatgttgggcaagggtgttctggataaaagaagagtgtgagccaaaatacagaggcaggaagggagaggatgagcaaggtttagctggagggtctgggtggaagaaaggtcagaggcctagactatgactctaggttttgactgagaaacactctttgcacatagcaactcctttattcctggaaaaataattcaagcatgctttttagttgccacttaatatatttacattttaattgtttccattttcagtgggtgttactttagacaatataacaacctcagtttctatcaatgaaaataaaaatttaggaaattgtcccctattttaacatttaaatattacaaaagtctcatattgtctaatgaattttaaattttctatagttttagattgtatcagacatggctaataagttttaacaagtaatcattgagtaccaactatataccaaatgccatttcgagtgctrtaaatgtgacagtgtctctgcccctcatgcagcttaagttccagtgagggagatagacatttacccaaccaacaaatcagtatatgaaaaaaaattttatctcatagattattatataaagctgtgtacatgataatagacaataggtaaaaacatagttcaccaaaaaattgtagaaatctttataaagatgaattcttttttattatacataattaaagttatggaccaaaccaattttaatttcaggaaaatgaatggcatcattcaacaatgtttttttctaattgtatttcttaacataggtaagagcttggagaaaatgtttaagtaggtggttagcttgtctctttaaatcatcccattttcaagtaaagttttgacaagacctggttacttgtagtca

SEQ ID NO: 688388 - DNA, 2647 bp, Homo sapiens
cagtcatgacatatatactacattgagagaaactagctctttttttcaatttatagttatggggtttatataaacaaatttcattgatgttactttgccttgttgaacagaatagagctttaacaggagaaacaaccatcttctgaattccaaagaaccttgaattctcatgtctttctaggtgtgttcctctaaggtctagaatttgttaattgctatgatgtcttcgccaagaagactggtctgtgtggctactttcaggacaactattgtcaatcaacatctgcagagacaatgacaaaacagcctcactacatacctaggcagcttctgttctcaaaataaatgatctcagctgtttcaaaaaataaaatagtaaatacgaccatcatccaagtttccattctgtaccattccattctgtaccattccattaaatctgttgacgaattatatccatatttaaatactcttatggataaaagcagaaatgtgtcaggataatcagcaaaaatgtaaaaatcagagtgaattgataacttagttgttatattggttatggcacaatgtcatagggaaaaaatgagcttcagggtcagagagttttgtgttccaatctgaatttgaacacttacgagctctgtatctctgggaaagccatttaatttttctgaactttagaatatcttctatacaattaagataaaaatgcttattaatcagattttcattgattaaataaaacatggaaaaatacattatacagtgacttgcagatgctctagacaaactgagttgtcattttatgtcctttctatcctacatcagataactgttttgaatgatatttttaaatgaaagttattagagttttttttcttagcaacatttatacattatagtgtttatatctatctaccatcaaaatgaatttgaggtaatttaaatcattagaaaaacaggaaacatttattaaaaaatacttaaattaacatacagaataaatctctgcaggaagataagaaaacaactggcatgaagtaaaaactgaagttcttcatcatagctttgaaagtcatgcacaacatacagcaaaacctacctttctgtgcttatttcacactttgtcctaacacacatcttctgctccaatcaaagcagaccatttgataagccctacatatctcatttgcttttcttttctacctgaaatgctttctcttcctaccccaaaacttgaacgaaaactcagccaaaatgttcatgcaaaacgctcatctcttttatacagattatagagttccagacctgaatgtttcttttcctcctttgcctccccttaattctgtcttcaggaaccatcaatggttattgtcctatccaccttgtttgttcattggccttagcttctctccctacaacaagaactctggactgtccccctgcctaaaggatggattgaaccatttatctctctctcttctgcagcatccagtacagaagcttccttatttttattattcactttatatttgttaaattgtagtaaatgggaatttaatactaaactgttttctgagcttcctgacaacaaagaaaaaaaaaaggaattatagaacttggagataagttgttaaaaaaaaggaaaaaatgataaaagaaattaaagaatgtacttttagttgtccactgaataaaacataataaggtcacttgaaaagcctttttttttttttgcttctgatttctaggataaatttatctcatagatgttgggcaagggtgttctggataaaagaagagtgtgagccaaaatacagaggcaggaagggagaggatgagcaaggtttagctggagggtctgggtggaagaaaggtcagaggcctagactatgactctaggttttgactgagaaacactctttgcacatagcaactcctttattcctggaaaaataattcaagcatgctttttagttgccacttaatatatttacattttaattgtttccattttcagtgggtgttactttagacaatataacaacctcagtttctatcaatgaaaataaaaatttaggaaattgtcccctattttaacatttaaatattacaaaagtctcatattgtctaatgaattttaaattttctatagttttagattgtatcagacatggctaataagttttaacaagtaatcattgagtaccaactatataccaaatgccatttcgagtgctataaatgtgacartgtctctgcccctcatgcagcttaagttccagtgagggagatagacatttacccaaccaacaaatcagtatatgaaaaaaaattttatctcatagattattatataaagctgtgtacatgataatagacaataggtaaaaacatagttcaccaaaaaattgtagaaatctttataaagatgaattcttttttattatacataattaaagttatggaccaaaccaattttaatttcaggaaaatgaatggcatcattcaacaatgtttttttctaattgtatttcttaacataggtaagagcttggagaaaatgtttaagtaggtggttagcttgtctctttaaatcatcccattttcaagtaaagttttgacaagacctggttacttgtagtca

SEQ ID NO: 688389 - DNA, 575 bp, Homo sapiens
tgcagctggtcaccattatcctaaatgaattgacacaggaacagaaaaccaaacactgcatgttctcacttataagtgggagctaaacattgggtacacatggacacaaagatgggagcaataaacattggagattccaaagagggaagggagggaaaggggcaaggattgaaaaactacctatcggatactatgttcactacttgggtgatgggataattagaagcccaaacttcagcatcacacaatatacccatgtaacaaacctgcacatgtaccatctgaatctaaaataataattttttaaaagaggactataacatgaaaaaaagaaaaatagtcaccttattttgcccttgtcactattaacctcattgaaaacccctccaggcttggtgtggttgctcacgcctgtaatctcagtactgtgggaggactaggcgggcaractgcttgagcccaggagttggagaccagcctgagcaacatggcaaaaacctgtctctacaaaaaatacaaaaattagccaggcggggtggtgtgcacatgtagtcccagctagctgggaggctgag

SEQ ID NO: 688390 - DNA, 667 bp, Homo sapiens
tgatgtatgactgaaaagaattccaactattttgttagggtatttttcttcattattgttaatgtctttgggcctattggaatcctgagcctcacttgcaacaaggcatgttaaatcactattgtctttaatagtgctttaataaaaaaggaggagggcaagaaaatacgctattccttgtcaaggagaccttccctcttctgcrtttattgccatgtctccttcttgattttgctgccttgcaaatggctttgattcagcttgtaggcttgtgttcttatccaagatctacacaccattttacaaatggagtcaagagaggtacattagattaaatattgatttaagtgtaaatctatgccttctagcatttgagcaaggcagaaggacatcaggttagctgcaggtaaggccatgccagcacaatgattcaatcagggcatgattatgcaagccaagggcagccaaagcctagcagtgccatctctggtatccagctaaagacatggacgggaatagcagtgttttaacttcttttttatttcctcttcccatcttcctctagaaagcttagttgaacaatatttttatgtaggagtagacatgaaagttgacagtgttatataaaaagtcagaaaacccatattcaattcctggctgtcatgct

SEQ ID NO: 688391 - DNA, 1906 bp, Homo sapiens
  misc_feature 487, 488, 489, 490, 491, 492, 493, 494, 495, 496, 497, 498,499, 500, 501, 502, 503, 504, 505, 506, 507, 508, 509, 510,511, 512, 513, 514, 515, 516, 517, 518, 519, 520, 521, 522,523, 524, 525, 526, 527, 528, 529, 530, 531, 532, 533: n = A,T,C or G
  misc_feature 534, 535, 536, 537, 538, 539, 540, 541, 542, 543, 544, 545,546, 547, 548, 549, 550, 551, 552, 553, 554, 555, 556, 557,558, 559, 560, 561, 562, 563, 564, 565, 566, 567, 568, 569,570, 571, 572, 573, 574, 575, 576, 577, 578, 579, 580: n = A,T,C or G
  misc_feature 581, 582, 583, 584, 585, 586: n = A,T,C or G
aaggtgggaaaagtgtcacaggggacggggactggaaggtaagaacaaggagggtgcggacaccggtggggagggtgggacacagattgggggctgagccagaacaagttttaaagcagggcagaggtgctcagggcaggctgagggaggtgacctccagtgacacactgtgagagaacatgccgagatccagggccaatggcatggagtacggctcctatgggagccaccctttggcagagggtcctctggtcctggctggctctaggtcacatctgccccccacagccctgcccctcagtcctgctggctccttctgagccttgggccctgcccttctcaggcctctggaacctctcagcatggttctggccctaatgctctgggtagctcgtgcagacacctttccccccaccaccctgatggcactctgggaggggcgtggggtgggcagtgggcggcaggggaatggagggaaatgaattcnnnnnnnnnnnnnnnnnnnnnnnnnnnnnnnnnnnnnnnnnnnnnnnnnnnnnnnnnnnnnnnnnnnnnnnnnnnnnnnnnnnnnnnnnnnnnnnnnnnngcagggccccagatcgtgcatatgcacagcggggcatccgaccactttcatgggctggaagaaggtggatcttcacctacaggctcctctccgtgtttccccaagagcatatcacaagctccgaaaaaagtgtgtttacagggccctctgaaaaccatgcactcccctaactttccggattgagggacggcaggtaatcaggatgtgaggtggggctttacgagacctctcaagtctagacaagcctcctgactctctgggcctcagtttcctctgttaatgtgtatgacgaggaatagtggatggtccttggggcttcacccagcttacccctcattctacgctttcttcacctgccagtgaaggagtggcagagtgcagggctgacgggcccatcctcactgatcccctccaccaacaacccccaccggctatccatcctcctccactgctccaaacgttaaacctttctccagtcacagacaacctgggctggcgaagccaaaggaagggcctcatttgcatacttgagcccctccccaaccccttagtgtatgcacagttgccatagcaactggcccaaaagactcttcttggcagtagcctcccttttctgcactgctggaatgctggctgcttactcaggctctgaacactcagagctcaatcccttattttaaggatgaagaaaatgaggcccagaggggacgctacttgcccaagggcacacagcacattggtcgcagaatcttacctacaatccaggtcacctgatttctaccccagcgtgcctgtcatcctaggacggacatgggggtcactttctacccaatgacaagcgtgctacatccgtgctctacatcaggcctctggggaagaccttgggaagcttaagtgaagaaactaacttcgggcagagactcagatattgctgagtgctagaggtggagatacagctaaataggctcctgtaagtatccattccataacaaacatttgttgtatgcctgctatgtgccaggtactgtcctacacyctgagattcagcagcaatgaaatgtcctgccctggtgggggctgacagtctggcagtgggtaaaaactattgtgtccggaattggtgggttcttggtctcgctgacttcaagaatgaagccacaaaccctctcggtgagtttcaccgttcttaaagatggtgtgtccagaatttgtttcttctgaggtttggatgcgtcaggagtttgttccttctgggggtttcgtggtcttgctggcttcaagagcaaagctgcagacctttatggtgagtgttacagttca

SEQ ID NO: 688392 - DNA, 636 bp, Homo sapiens
ctccctgctctcctctggggcattccaccccatgcccatgacagagccagttgcctctgaatcagggccctgttgttttggcagaacagggaggggacagcttgtggattggggtctgggatttctgacatcaggaggcttcctggtcgaggctggtgagccggagcagctcasgggggaaggaaagggaagccggttggggccagacccccactgtgcttcttgctcttagctcttagcatgcggctgtggccattctggctgactgcctgggagcagggcttctctttaggcagaataaagccccagctggcctggggtgggttgaaggttccaagatgcctccttatagctgaatcaatccttagtttccctgcctgaaactatgcctcacattccaccattagaatcagtcctgtgggttaaagagttgcttatggaaggggccttaaacacagagatagattacttgaacgagaggccctggaatcatttggctcacatcacgtcattcattcacctccacaaagcctgctggggatgccaggctctgtgcaggactgggctgcagaggtcagcacgaggagggctgtgctgcgaggatttgaagggctaactggtcatccaccttcccca

SEQ ID NO: 688393 - DNA, 602 bp, Homo sapiens
tgtgggcaggggctgggacccagtcctgtgggagggaagtctcgcaggggatctgaccagcttgaggctccaggctcttgattctaatctgcgggtgtttgcctttctcctcttggaggcctccttcccccatggcatctgtccttccccgtgtgtgtgtgtgtgtgtgtgtgtgtgtgtgtgtgtgtgtgtccgcrcgcgcgcatgcactgctcagcccagacgtgctccggcctcaaggagaagccagtgtgagccctcacgaaggatctggaagcctaagcagggcctgacttcaaaagctgctgtgcattggtctcccagcctgaatctgccctgctgtagccccagcacacagcctgtcatgatgccaaaaagccctctgtttgaaattcatggaaaccgatcataaactcacaggaccttagaactggcaaggcctgagagatcctctgggccagcacagaggagcagccaggggcacgggcagcctgcacaagctctgtgcccctggctagatgttgcttaagcacttggtgccttggcttcctcatctgtgagatagggataaaaataccatgaagctcatagggatgtgggga

SEQ ID NO: 688394 - DNA, 664 bp, Homo sapiens
tagaaggctggagaagctcaggagctgaggctggactctggggcactgcagcttccttccctccccttggcccagaactggagcagtcagggattctgtagggggaatgacgggggagggatgaccctgagaccacggcttggtcttgatggagggaccacatctctggggaagcctcgcaatcccaacacaagctcctcttccaactgcttggggaaactgaggcacagaatggacaagtggcttgctggtcttcatttgacaaacccctggggaagggggccttgggtttggcccccagccaagccctgactcagcttccatcccttctccctgtggcctcctaagtggtggggagggaggttgctggctttgagtggggaggctgggktgagggaagtaaccccggggggaaattagcccaaattagcagtgagaatgaggaagggctggtgttctcttctctactcttgcagataaatatttaatcacaacaacaataatgatgatgatgatcttaataatgtgccagtagctcaggccataacccgagccccgctctcagagggaggaagtgggggtggggagaaagagcagtggagagatggagagatgaagaaagtcagggagggagggagggagggaggatgtgcaagctgaatgg

SEQ ID NO: 688395 - DNA, 2637 bp, Homo sapiens
catccctgcaacaacagtttagccagagacacaagagatttttggagacaactgcttcaaacctctcgtcccagcttcatcgttgcattcagacctgccttgtcccaaaaagaatttgcagcagtgcccagaaataaacaygtatatagctaaaaaagaaactggtaacaaaaccaaggggaagagactgcacttcacagatgaggccccactcagcatccataagacttgcccagaaaggagcccttggttgggctggagccaaccaggacttcccagagcagctgaccttggggcagactcaccgtccatggtattgaagccaggagtgccgtgcctggccccgcaacccctcatcctccagccctctggccacaggcaacccagaagcaaggctggtgggcccagacttcaaataaaccccaaatctgtcccttcttaccacccccacccttggtccaggccattgtcacctcttgcctggactacagtggcctccacactggcccagggccccactctattccctgcacaacagccagagggatctcgaccctcctctgctcctgaccctccaacggctcccagctcacccagaacaaaagccaaagtccccacaggcccccccagggccccatgcaatttgccctcctccggccgtatgtctccctgcctcactcattctgcccctgcctcctggttattctccaaatgccgggcaggcaccacctcagggcctttgcacatgccagttcccctgcctggggccctcttcccacagatctccacctggctaatgccctcgctgcagctggggatctgccaaaagtcacccctgcagaaagccagggtgaggaccgaaaggccgtcaaccttgcagggaagagtctcccttacttgcccctctctgtccacttacactgctttgttcctcttcagagcagcatctttcacagctggtatctcaaattataattatacagtgatgtgtttgctaattcactggaagctcctcctgccctttccccaagtgtgagccccacaaggccaggagcttcatctgcttagtccacggccgtaccccagtgtcctggtccaatgcctggcacatagtcagtgctcaataaatattcattctgcagatgaataaattactgtggaggaaagggatgcaaaggctggagggcagaaggaaaaaaatggccacgcccctcctcaccagccatacccctggggcaagtctgtgggattgggaggcccgggtcccaccttctgagtccctgaaagtcccagaagcatgaggggagccagcaccagaggagtggctgccaggggattcaggcctcccagaccactttcagaaaggggccctcacagctcatacttggtcacgcaggagtcacacgtgacttgagggatcctgatccacttctctcttctctctctctctctcacacacacacacacatacacacacacatacacatacatatacacacacacacacacacacaacccttaccatgccaaggtcttccaagcctcagaccaggtggcgaaaccagggaccctttgagattaccctgcccccatccctacctctttcctccctagccctagaactgctggcctctgtggggcagggccttctgaggcctgcccatctgacaagcccaccaatgcttccctggggaaggccagatgaagggaaccaaattctccacttaaaaggaggactcagtcttcccaccttcgagctccagagcaagggccagtttcggagtcatgcagaactggctacaaagcccagctctgccctgacaagctgggagggcccaggcaagctcctgggcaccctgggctgcagtcacctcctctaaagtggggacaatgctcaggacttctgtgcaggggctgaggctggggccggggagcagcatctgtcatgacagttcatgaacatggcctcaaaatgtgtgtattacacacaaggagtctcaggggtctgtacacaggccaggccaggctggctgtgtggctggcatgggaggccgagtctcttcaggctcaagggctctgggaagaaggaagagggaccaggttggggaacatggaatatcaaggcagaaatgtccgcatgcaccattcgtgcccaaatacatgagctcactgaggaaggcacacagtccctttttggtcttagaaatgaaaaaccggaggctcagggagaagtgaatcatgtacggccatacagtggtagagggtggggctgagagtgggacgcaggctgctggacatccccgccccagggcacttggtgggcccatgtaggcctgaggtgggaagcgctgggtggtgaatgtgagacaaggaaggaaacggtgggttcacagcgtccctccagggatgcagagaaaaaggcagctggggcttatctcagccacatccccaaggagctcagagtgggggacttggagtgccaggaaccccaccccagccaggaaagcaggcagaagtccagggtcagcaaacaggtgaagacgctttcctgaaggtcaaggcccaaacccgagctggggtgagcagggccgcaggcttcaccacttgccctttagccaagggaagaaactggaagga

SEQ ID NO: 688396 - DNA, 581 bp, Homo sapiens
gcactgccatcaaccatgttttgattttgcaagtcacttctcatctttctgcctcagtttcctaaactgtaaaatgcagtgcttacatgaaacaygctgtaaggtcccttagtaaaattcttaattttatacaggtgactctaatctggtgttacagttgctgtctgtgagggacaagatctttgtgtatattttaaattttgtttagttagaaaatagtaagttgccttttagcctagccccaaaactcatttgtgaagtggacatccatttaaaatctagctccatttagcccccgattacagtggcttgccttgtcaaacctcctgctcactagtgggatcctcactcagcaaatgtttgttgagtgtgggccaggcacgatggctcatgcctgtaatcccagcactttgggaggccgaggtgggcagatcacttgaagccaggagttcaagaccagcctggccaaaaaagcaaaaccctgtctctactaaaaatacaaaaaaaaaaaattagctgggcgaggtggcatatgcctataatcccagctactcaggaaggtgaggcacaagaatcgcttg

SEQ ID NO: 688397 - DNA, 1127 bp, Homo sapiens
tttaaaaagctgacattttcttcctagctacttttgctactattagaacagtgtcaccaggttacagaggaacattggtcatagacatcaaactaacaatctgtgtttttttcttctaaaattcagattttctaaccatgaattcttctgaatattgacaataaaaagtgatatttagctaactagaatcaaatacatattttttacttaaaccttaatgtctaaagtttagggaaacaaatgtctcttgtcaaattcaggatttttattactagttactttaatccagttcagacattatttattgaatatactgtagagttaagtctactggactccagcttgaaaccaaaagatatcttcccatcgattattttaaaattttgtcctcatgcacttttcaaattgtgttccacggaatatttgaaaataatacaaaaaaagtatttttatgaagcattgggttaaagttttaaaaaataaagtagtttcctctatgtggacttctaaggaccttcatccactagtgctcattgtggacttccaagggggaaagtatggaacaytgcttcccaaatctattccatcactgaaatttatttcaagaaacacactctgcaaatgctacttgaggctcttcagcattaagccttgtgataattttacacagtttacagaaagtctgcctaaattttaaaaggctcttaatttgtccttttccatattgatcagcgaaggcattgtgttgccttgacccccctgtaatttcttctcattcagctggataagatagagagacattaaggctgtggataggagaacactgggcctacttaacaggagcttgaagccacacagggacagccaggtttaagtggttaagtggttgagcaggcagatagttagacaggccaagaaactggcagaatcgaggctagtggtgattgccagctgtcaatgcagacttttccaggaagagattcaaggcaagatgagcagataaggcagggttgaggcttaatcaagttaggactggaattgcagaacttgagtctcagcactccaccacagggaggaactgagtcttaattccactggacacttgatacagatgcctctttattttc

SEQ ID NO: 688398 - DNA, 1127 bp, Homo sapiens
tttaaaaagctgacattttcttcctagctacttttgctactattagaacagtgtcaccaggttacagaggaacattggtcatagacatcaaactaacaatctgtgtttttttcttctaaaattcagattttctaaccatgaattcttctgaatattgacaataaaaagtgatatttagctaactagaatcaaatacatattttttacttaaaccttaatgtctaaagtttagggaaacaaatgtctcttgtcaaattcaggatttttattactagttactttaatccagttcagacattatttattgaatatactgtagagttaagtctactggactccagcttgaaaccaaaagatatcttcccatcgattattttaaaattttgtcctcatgcacttttcaaattgtgttccacggaatatttgaaaataatacaaaaaaagtatttttatgaagcattgggttaaagttttaaaaaataaagtagtttcctctatgtggacttctaaggaccttcatccactagtgctcattgtggacttccaagggggaaagtatggaacattgcttcccaaatctattccatcactgaaatttatttcaagaaacacactctgcaaatgctacttgaggctcttcagcattaagccttgtgataattttacacagtttacagaaagtctgcctaaattttaaaaggctcttaatttgtccttttccatattgatcagcgaaggcattgtgttgccttgacccccctgtaatttcttctcattcagctggataagatagagagacattaaggctgtggataggagaacactgggcctacttaacaggagcttgaagccacacagggacagccaggtttaagtggttaagtggttgagcaggcagatagttagacaggccaagaaactggcagaatcgaggctagtggtgattgccagctgtcaatgcagacttttccaggaagagattcaaggcaagatgagcagataaggcagggttgaggcttaatcaagttaggactggaattgcagaacttragtctcagcactccaccacagggaggaactgagtcttaattccactggacacttgatacagatgcctctttattttc

SEQ ID NO: 688399 - DNA, 1127 bp, Homo sapiens
tttaaaaagctgacattttcttcctagctacttttgctactattagaacagtgtcaccaggttacagaggaacattggtcatagacatcaaactaacaatctgtgtttttttcttctaaaattcagattttctaaccatgaattcttctgaatattgacaataaaaagtgatatttagctaactagaatcaaatacatattttttacttaaaccttaatgtctaaagtttagggaaacaaatgtctcttgtcaaattcaggatttttattactagttactttaatccagttcagacattatttattgaatatactgtagagttaagtctactggactccagcttgaaaccaaaagatatcttcccatcgattattttaaaattttgtcctcatgcacttttcaaattgtgttccacggaatatttgaaaataatacaaaaaaagtatttttatgaagcattgggttaaagttttaaaaaataaagtagtttcctctatgtggacttctaaggaccttcatccactagtgctcattgtggacttccaagggggaaagtatggaacattgcttcccaaatctattccatcactgaaatttatttcaagaaacacactctgcaaatgctacttgaggctcttcagcattaagccttgtgataattttacacagtttacagaaagtctgcctaaattttaaaaggctcttaatttgtccttttccatattgatcagcgaaggcattgtgttgccttgacccccctgtaatttcttctcattcagctggataagatagagagacattaaggctgtggataggagaacactgggcctacttaacaggagcttgaagccacacagggacagccaggtttaagtggttaagtggttgagcaggcagatagttagacaggccaagaaactggcagaatcgaggctagtggtgattgccagctgtcaatgcagacttttccaggaagagattcaaggcaagatgagcagataaggcagggttgaggcttaatcaagttaggactggaattgcagaacttgagtctcagcactccaccacagggaggaactgagtcttaattccactggayacttgatacagatgcctctttattttc

SEQ ID NO: 688400 - DNA, 646 bp, Homo sapiens
aaataattactgaccttaagaattggacggctgggcactgtggcttatgcctataattccagcactctggaggccaaagcgggtggaacacctgaggtcaggcgttcaagaycagcctggccaacatggtgaaatgctgtctttactaaaaatacaaaaattagcccactgtggtggtgcgcgcctgtaattccagctactagggaggctgaggcaggagaatcacttgaacctgggaggaggaggttgcagtgagccgagatggcgccattgcactccagcctgggtgacagagtgagaccctgcttcaaaaaaaaaggaattggaaaggaaaagatgagactgccattgtttgtagacgctaagatgatctctacatagaaaatccaaaagaaagaccaaattagtgtatctaataaaagagttaagtaaaatttctagatacaagataaactttaaaaattaatagtatttttccacaccactagtctcaaaatattagttcctctaaaaattaatacataaaacttttaggcttggcatggtggctcatacctataattctagtgctttgtgagactgaggcaggaagatcatgtgaagccaggagtttgagaccagcctgggcaacatctcaagatcctgt

SEQ ID NO: 688401 - DNA, 646 bp, Homo sapiens
aaataattactgaccttaagaattggacggctgggcactgtggcttatgcctataattccagcactctggaggccaaagcgggtggaacacctgaggtcaggcgttcaagaccagcctggccaacatggtgaaatgctgtctttactaaaaatacaaaaattagcccrctgtggtggtgcgcgcctgtaattccagctactagggaggctgaggcaggagaatcacttgaacctgggaggaggaggttgcagtgagccgagatggcgccattgcactccagcctgggtgacagagtgagaccctgcttcaaaaaaaaaggaattggaaaggaaaagatgagactgccattgtttgtagacgctaagatgatctctacatagaaaatccaaaagaaagaccaaattagtgtatctaataaaagagttaagtaaaatttctagatacaagataaactttaaaaattaatagtatttttccacaccactagtctcaaaatattagttcctctaaaaattaatacataaaacttttaggcttggcatggtggctcatacctataattctagtgctttgtgagactgaggcaggaagatcatgtgaagccaggagtttgagaccagcctgggcaacatctcaagatcctgt

SEQ ID NO: 688402 - DNA, 646 bp, Homo sapiens
aaataattactgaccttaagaattggacggctgggcactgtggcttatgcctataattccagcactctggaggccaaagcgggtggaacacctgaggtcaggcgttcaagaccagcctggccaacatggtgaaatgctgtctttactaaaaatacaaaaattagcccactgtggtggtgcgcrcctgtaattccagctactagggaggctgaggcaggagaatcacttgaacctgggaggaggaggttgcagtgagccgagatggcgccattgcactccagcctgggtgacagagtgagaccctgcttcaaaaaaaaaggaattggaaaggaaaagatgagactgccattgtttgtagacgctaagatgatctctacatagaaaatccaaaagaaagaccaaattagtgtatctaataaaagagttaagtaaaatttctagatacaagataaactttaaaaattaatagtatttttccacaccactagtctcaaaatattagttcctctaaaaattaatacataaaacttttaggcttggcatggtggctcatacctataattctagtgctttgtgagactgaggcaggaagatcatgtgaagccaggagtttgagaccagcctgggcaacatctcaagatcctgt

SEQ ID NO: 688403 - DNA, 610 bp, Homo sapiens
gccaaggaatgctggtggcggtagctggaggccccatttgggaggtcctgtacagtgatgtgcaacagggtcgggggcctgcttacagaagcattctggccatgatttggtaaagcagctagctgtgctgtgggatctcttctgccccttgtcggtttatactctccaaagccctcaggctggaatgactaagttgcctgaacmggaaagatggcggcctgccccatctattctctcagagttcatcttgtttgatggagcttaatttttagcctgttaattttactgtctacattagacttgttcggaaagaatctgctatattttaggttagatatgtgagaattcattgttttctgtaaataaacctgttcatgtcttgttctctggaaagaaatctctttcaactatctgactttggtcacagtcatgtagagcagtagccagtctataatgacataattgaatttccatttccagtgttttgtttttgtgtcttacattgtacagttcagaaatgagcattttattcccaattgtcaaaatgctaagctgtccactgtactgaaatactgtttttgttaatgcttcgtcattcaattttttttaa

SEQ ID NO: 688404 - DNA, 610 bp, Homo sapiens
gccaaggaatgctggtggcggtagctggaggccccatttgggaggtcctgtacagtgatgtgcaacagggtcgggggcctgcttacagaagcattctggccatgatttggtaaagcagctagctgtgctgtgggatctcttctgccccttgtcggtttatactctccaaagccctcaggctggaatgactaagttgcctgaacaggaaagatggcggcctgccccatctattctctcagagttcatcttgtttgatggagyttaatttttagcctgttaattttactgtctacattagacttgttcggaaagaatctgctatattttaggttagatatgtgagaattcattgttttctgtaaataaacctgttcatgtcttgttctctggaaagaaatctctttcaactatctgactttggtcacagtcatgtagagcagtagccagtctataatgacataattgaatttccatttccagtgttttgtttttgtgtcttacattgtacagttcagaaatgagcattttattcccaattgtcaaaatgctaagctgtccactgtactgaaatactgtttttgttaatgcttcgtcattcaattttttttaa

SEQ ID NO: 688405 - DNA, 610 bp, Homo sapiens
gccaaggaatgctggtggcggtagctggaggccccatttgggaggtcctgtacagtgatgtgcaacagggtcgggggcctgcttacagaagcattctggccatgatttggtaaagcagctagctgtgctgtgggatctcttctgccccttgtcggtttatactctccaaagccctcaggctggaatgactaagttgcctgaacaggaaagatggcggcctgccccatctattctctcagagttcatcttgtttgatggagcttaatttttagcctrttaattttactgtctacattagacttgttcggaaagaatctgctatattttaggttagatatgtgagaattcattgttttctgtaaataaacctgttcatgtcttgttctctggaaagaaatctctttcaactatctgactttggtcacagtcatgtagagcagtagccagtctataatgacataattgaatttccatttccagtgttttgtttttgtgtcttacattgtacagttcagaaatgagcattttattcccaattgtcaaaatgctaagctgtccactgtactgaaatactgtttttgttaatgcttcgtcattcaattttttttaa

SEQ ID NO: 688406 - DNA, 610 bp, Homo sapiens
gccaaggaatgctggtggcggtagctggaggccccatttgggaggtcctgtacagtgatgtgcaacagggtcgggggcctgcttacagaagcattctggccatgatttggtaaagcagctagctgtgctgtgggatctcttctgccccttgtcggtttatactctccaaagccctcaggctggaatgactaagttgcctgaacaggaaagatggcggcctgccccatctattctctcagagttcatcttgtttgatggagcttaatttttagcctgttaattttactgtctacattagacttgttcggaaagaatctgctatattttaggttagatatrtgagaattcattgttttctgtaaataaacctgttcatgtcttgttctctggaaagaaatctctttcaactatctgactttggtcacagtcatgtagagcagtagccagtctataatgacataattgaatttccatttccagtgttttgtttttgtgtcttacattgtacagttcagaaatgagcattttattcccaattgtcaaaatgctaagctgtccactgtactgaaatactgtttttgttaatgcttcgtcattcaattttttttaa

SEQ ID NO: 688407 - DNA, 610 bp, Homo sapiens
gccaaggaatgctggtggcggtagctggaggccccatttgggaggtcctgtacagtgatgtgcaacagggtcgggggcctgcttacagaagcattctggccatgatttggtaaagcagctagctgtgctgtgggatctcttctgccccttgtcggtttatactctccaaagccctcaggctggaatgactaagttgcctgaacaggaaagatggcggcctgccccatctattctctcagagttcatcttgtttgatggagcttaatttttagcctgttaattttactgtctacattagacttgttcggaaagaatctgctatattttaggttagatatgtgagaattcattgttttctgtaaataaacctgttcatgtcttgttctctggaaagaaatctctttcaactatctgactttggtcacagtcatgtagagcagtakccagtctataatgacataattgaatttccatttccagtgttttgtttttgtgtcttacattgtacagttcagaaatgagcattttattcccaattgtcaaaatgctaagctgtccactgtactgaaatactgtttttgttaatgcttcgtcattcaattttttttaa

SEQ ID NO: 688408 - DNA, 613 bp, Homo sapiens
tgcacaggccccaggtactgagaagttgctccgagtaagcttgtcttgggccaaattctaagtctggccagggccacagaaggccgagtcccctsggtggtaatcctggctgctgcagggaacccatggtgcccctcccctcccagggctcaggatgaggtccgactgggacaggatgctttaggtatggggcttgtgctccaggagggggcctctgtcacacaggttgggtgagaagatgtatgccatgctgctggctgctggctgccggctgccagggcttttgggatgtacgttcacccttcctttcagggacctcaaagtgaccagcttcccttttaagaatgacttcccaaggcccaggagccatctggggctgcagagctgcatgctgccctggcttcttccatgttgtgctggtcactacccaccaagggggatcagatgcaggcacgatgcaggacggttgtctctggacctgtgtcttggttatcatggagctggactgggcctggtgacagggccctgatggggttgtcctgggtggtcaggggggtgatgagaaaaatgcagaatggaattgctgtgaggatgaatgagacgactgtcagca

SEQ ID NO: 688409 - DNA, 613 bp, Homo sapiens
tgcacaggccccaggtactgagaagttgctccgagtaagcttgtcttgggccaaattctaagtctggccagggccacagaaggccgagtcccctgggtgrtaatcctggctgctgcagggaacccatggtgcccctcccctcccagggctcaggatgaggtccgactgggacaggatgctttaggtatggggcttgtgctccaggagggggcctctgtcacacaggttgggtgagaagatgtatgccatgctgctggctgctggctgccggctgccagggcttttgggatgtacgttcacccttcctttcagggacctcaaagtgaccagcttcccttttaagaatgacttcccaaggcccaggagccatctggggctgcagagctgcatgctgccctggcttcttccatgttgtgctggtcactacccaccaagggggatcagatgcaggcacgatgcaggacggttgtctctggacctgtgtcttggttatcatggagctggactgggcctggtgacagggccctgatggggttgtcctgggtggtcaggggggtgatgagaaaaatgcagaatggaattgctgtgaggatgaatgagacgactgtcagca

SEQ ID NO: 688410 - DNA, 613 bp, Homo sapiens
tgcacaggccccaggtactgagaagttgctccgagtaagcttgtcttgggccaaattctaagtctggccagggccacagaaggccgagtcccctgggtggtaatcctggctgctgcagggaacccatggtgcccytcccctcccagggctcaggatgaggtccgactgggacaggatgctttaggtatggggcttgtgctccaggagggggcctctgtcacacaggttgggtgagaagatgtatgccatgctgctggctgctggctgccggctgccagggcttttgggatgtacgttcacccttcctttcagggacctcaaagtgaccagcttcccttttaagaatgacttcccaaggcccaggagccatctggggctgcagagctgcatgctgccctggcttcttccatgttgtgctggtcactacccaccaagggggatcagatgcaggcacgatgcaggacggttgtctctggacctgtgtcttggttatcatggagctggactgggcctggtgacagggccctgatggggttgtcctgggtggtcaggggggtgatgagaaaaatgcagaatggaattgctgtgaggatgaatgagacgactgtcagca

SEQ ID NO: 688411 - DNA, 613 bp, Homo sapiens
tgcacaggccccaggtactgagaagttgctccgagtaagcttgtcttgggccaaattctaagtctggccagggccacagaaggccgagtcccctgggtggtaatcctggctgctgcagggaacccatggtgcccctcccctcccagggctcaggatgaggtccractgggacaggatgctttaggtatggggcttgtgctccaggagggggcctctgtcacacaggttgggtgagaagatgtatgccatgctgctggctgctggctgccggctgccagggcttttgggatgtacgttcacccttcctttcagggacctcaaagtgaccagcttcccttttaagaatgacttcccaaggcccaggagccatctggggctgcagagctgcatgctgccctggcttcttccatgttgtgctggtcactacccaccaagggggatcagatgcaggcacgatgcaggacggttgtctctggacctgtgtcttggttatcatggagctggactgggcctggtgacagggccctgatggggttgtcctgggtggtcaggggggtgatgagaaaaatgcagaatggaattgctgtgaggatgaatgagacgactgtcagca

SEQ ID NO: 688412 - DNA, 613 bp, Homo sapiens
tgcacaggccccaggtactgagaagttgctccgagtaagcttgtcttgggccaaattctaagtctggccagggccacagaaggccgagtcccctgggtggtaatcctggctgctgcagggaacccatggtgcccctcccctcccagggctcaggatgaggtccgactgggacaggatgctttaggtatggggcttgtgctccaggagggggcctctgtcacacaggttgggtgagaagatgtatgccatgctgctggctgctggctgmcggctgccagggcttttgggatgtacgttcacccttcctttcagggacctcaaagtgaccagcttcccttttaagaatgacttcccaaggcccaggagccatctggggctgcagagctgcatgctgccctggcttcttccatgttgtgctggtcactacccaccaagggggatcagatgcaggcacgatgcaggacggttgtctctggacctgtgtcttggttatcatggagctggactgggcctggtgacagggccctgatggggttgtcctgggtggtcaggggggtgatgagaaaaatgcagaatggaattgctgtgaggatgaatgagacgactgtcagca

SEQ ID NO: 688413 - DNA, 860 bp, Homo sapiens
gataaggttgatttgtttttgtagaacttataattttatgatttgtagttctaatgagtagatctttttctggaatagtagttatggtcaaacacttctaaccaaatgtgccatgttgtccagtctggtctcaaaatatggggctcaagagacctgcccaccttggcctcccaaaatactgggattacaggtgtaagcccctgaatctggccagatatttttctttttatggctgaataatactctgtgtatgtatatattacattttctttatctattcacctactgatgggcattaggtttgggctaccttttggccactgtgaataatgctgctgttaatcgggtgtacaaatacctgtttgagtccctgctctcagttcttttgggtatatacgcttaaagggtgttgatggatcatataattctatgcttcatatttttaaggagctgctaaaccattttccacagtgggctgtaccattttacattccaaaaagcaatgcatacagcttccaatttctctatagccttgctgacagttaatattttctgtttatgtattrtatttttatagtgtttgaaattaatctgaggctttttgctgataccaaaatattaggaaaggttttccaaaaataatactgcttattataaaggattttacgtgttacttgatgccctgtgatctgttttctaagtaagaagaggaacttcttggctgggcacagcggctcatgcctgtaatcctagcacttttggaggccgaggtgggtagatcacctaaggtcaggagttcaagaccagcctggccaacatagcgaaacccagtctccactacaaaacaaaaaaaaaaaaaa

SEQ ID NO: 688414 - DNA, 860 bp, Homo sapiens
gataaggttgatttgtttttgtagaacttataattttatgatttgtagttctaatgagtagatctttttctggaatagtagttatggtcaaacacttctaaccaaatgtgccatgttgtccagtctggtctcaaaatatggggctcaagagacctgcccaccttggcctcccaaaatactgggattacaggtgtaagcccctgaatctggccagatatttttctttttatggctgaataatactctgtgtatgtatatattacattttctttatctattcacctactgatgggcattaggtttgggctaccttttggccactgtgaataatgctgctgttaatcgggtgtacaaatacctgtttgagtccctgctctcagttcttttgggtatatacgcttaaagggtgttgatggatcatataattctatgcttcatatttttaaggagctgctaaaccattttccacagtgggctgtaccattttacattccaaaaagcaatgcatacagcttccaatttctctatagccttgctgacagttaatattttctgtttatgtattgtatttttatagtgtttgaaattaatctgaggctttttgctgataccaaaatattaggaaaggttttccaaaaataatactgcttattataaaggattttacgtgttacttgatgccctgtgatctgttttctaagtaagaagaggaacttcttggctgggcacagcggctcatgcctgtaatcctagcacttttggaggccgaggtgggtagatcacctaargtcaggagttcaagaccagcctggccaacatagcgaaacccagtctccactacaaaacaaaaaaaaaaaaaa

SEQ ID NO: 688415 - DNA, 860 bp, Homo sapiens
gataaggttgatttgtttttgtagaacttataattttatgatttgtagttctaatgagtagatctttttctggaatagtagttatggtcaaacacttctaaccaaatgtgccatgttgtccagtctggtctcaaaatatggggctcaagagacctgcccaccttggcctcccaaaatactgggattacaggtgtaagcccctgaatctggccagatatttttctttttatggctgaataatactctgtgtatgtatatattacattttctttatctattcacctactgatgggcattaggtttgggctaccttttggccactgtgaataatgctgctgttaatcgggtgtacaaatacctgtttgagtccctgctctcagttcttttgggtatatacgcttaaagggtgttgatggatcatataattctatgcttcatatttttaaggagctgctaaaccattttccacagtgggctgtaccattttacattccaaaaagcaatgcatacagcttccaatttctctatagccttgctgacagttaatattttctgtttatgtattgtatttttatagtgtttgaaattaatctgaggctttttgctgataccaaaatattaggaaaggttttccaaaaataatactgcttattataaaggattttacgtgttacttgatgccctgtgatctgttttctaagtaagaagaggaacttcttggctgggcacagcggctcatgcctgtaatcctagcacttttggaggccgaggtgggtagatcacctaaggtcaggagttcaagaccagcctggccaacawagcgaaacccagtctccactacaaaacaaaaaaaaaaaaaa

SEQ ID NO: 688416 - DNA, 860 bp, Homo sapiens
gataaggttgatttgtttttgtagaacttataattttatgatttgtagttctaatgagtagatctttttctggaatagtagttatggtcaaacacttctaaccaaatgtgccatgttgtccagtctggtctcaaaatatggggctcaagagacctgcccaccttggcctcccaaaatactgggattacaggtgtaagcccctgaatctggccagatatttttctttttatggctgaataatactctgtgtatgtatatattacattttctttatctattcacctactgatgggcattaggtttgggctaccttttggccactgtgaataatgctgctgttaatcgggtgtacaaatacctgtttgagtccctgctctcagttcttttgggtatatacgcttaaagggtgttgatggatcatataattctatgcttcatatttttaaggagctgctaaaccattttccacagtgggctgtaccattttacattccaaaaagcaatgcatacagcttccaatttctctatagccttgctgacagttaatattttctgtttatgtattgtatttttatagtgtttgaaattaatctgaggctttttgctgataccaaaatattaggaaaggttttccaaaaataatactgcttattataaaggattttacgtgttacttgatgccctgtgatctgttttctaagtaagaagaggaacttcttggctgggcacagcggctcatgcctgtaatcctagcacttttggaggccgaggtgggtagatcacctaaggtcaggagttcaagaccagcctggccaacatagcraaacccagtctccactacaaaacaaaaaaaaaaaaaa

SEQ ID NO: 688417 - DNA, 587 bp, Homo sapiens
ctactgtagtgtacagtaatatcccaggccttcacattcactcactaatcactcactgatccacccagaacaattttcagccctgtaagtgccattcgtgctaagtggtctatayaggtactgttttattattattattattattattattattttatactgtgtttttactgtatcttttctagatttcaataagttgagatacacaaatatttattattgtgttacaactgcctatattatccaatatggtaacatgctgtgcaggtttgtattctagaagcaataggctataccttataatctaggtgtgttctaagctatatcatacaggtttatgtaagtacactgtgaaatctgcatggcaaacatcattgccttatgatacatttctcaaattttcagaacatatccctgttgtttagcagcacgtgaatgtatttgatttattgtcttgatgtccctttgctttccccatgtgttaccatcaactgcctaatgaaacagcctgggattgtgtaatgactaacttagtgctttgagtttaattctttttcagccactgtggtatgttgattactatatta

SEQ ID NO: 688418 - DNA, 587 bp, Homo sapiens
ctactgtagtgtacagtaatatcccaggccttcacattcactcactaatcactcactgatccacccagaacaattttcagccctgtaagtgccattcgtgctaagtggtctatataggtactgttttattattattattattattattattattttatactgtgtttttactgtatcttttctagatttcaataagttgagatacacaaatatttattattgtgttacaaytgcctatattatccaatatggtaacatgctgtgcaggtttgtattctagaagcaataggctataccttataatctaggtgtgttctaagctatatcatacaggtttatgtaagtacactgtgaaatctgcatggcaaacatcattgccttatgatacatttctcaaattttcagaacatatccctgttgtttagcagcacgtgaatgtatttgatttattgtcttgatgtccctttgctttccccatgtgttaccatcaactgcctaatgaaacagcctgggattgtgtaatgactaacttagtgctttgagtttaattctttttcagccactgtggtatgttgattactatatta

SEQ ID NO: 688419 - DNA, 587 bp, Homo sapiens
ctactgtagtgtacagtaatatcccaggccttcacattcactcactaatcactcactgatccacccagaacaattttcagccctgtaagtgccattcgtgctaagtggtctatataggtactgttttattattattattattattattattattttatactgtgtttttactgtatcttttctagatttcaataagttgagatacacaaatatttattattgtgttacaactgcctatattatccaatatggtaacatgctgtgcaggtttgtattctagaagcaataggctataccttataatctaggtgtgttctaagctatatcatacaggtttatgtaagtacactgtgaaatctgcatggcaaacatcattgccttatgatacatttctcaaattttcagaacatatccctgttgtttagcagcacgtgaatgtatttgatttattgtcttgatgtccctttgctttccccatgtgttaccatcaactgcctartgaaacagcctgggattgtgtaatgactaacttagtgctttgagtttaattctttttcagccactgtggtatgttgattactatatta

SEQ ID NO: 688420 - DNA, 636 bp, Homo sapiens
tgaaacttattttaaatgaatttatatgcttttctctggtcaatcagtcctttgtttttggggtctctgtcatgaaatttgccacaagtgagaaaagaatatattactttttctccctaccactgccatgaataagaatcttatcttccattacaatcttgagatccttttcaatattctctaaaaagaaggtggtaaatgtgtaagaaaagaaaaatgtgtctcctgaacatggaagacctaatcaatttcctctgaaacagagaaatggaaaactaaacagtatttttctaacatgcaaaagcaatttctctccattattctctaaaaaataaaacgtatatttcttcttccaatttttgawaactgccattccattcagtttagtaatgattattatgttttaaaaatattaaaatctttttcttgccttagcattcatgacacaaaagtataaaagaagttttgattaaatgcattttgctttgtgttaataagtttaatggataactctgacctttaaaatataatatacatccatgaatcagctaaataataggttttctggcaagcataactgctacttctgtttataaagcagacacagctacatgcatgcctttgatggctagtgaa

SEQ ID NO: 688421 - DNA, 595 bp, Homo sapiens
tgatgggctttttcatccaggcatctcttggccattcaacacttgaaagcctaactagctttggagcagtcaaaggggtggcatcttctctcttctcaaattcctgcctcttgcccacagctttggtgacaaagctgatgtcccatcattttgatctcatagctttgccttttccttagcctcattttcagttccctgtcttgttaataaagattccagctcagttcttcaagtgcttcggttcttattaaatttgtggaatatgcacacgtagaagaacttgactttcttttctcctaagttttgacaagctttcaaacgtgccttaatgaaattcttcaagagtggcctccccattctggtgccagtccctggcgagctgagaagcaagtgtggagcagaccagttggggagktgagtgtggataggaaggcagagaactcacactctctaagttggggcagttgcttggccactctgtggctcagtttccttcataagcaaaattgaggggctgggtaacgtccactccatggttctatctgtttcgacaagtttgattctgtaagtgactgggatagaatccctgtaagaa

SEQ ID NO: 688422 - DNA, 1274 bp, Homo sapiens
ggatggtccaggttgggaaggcaaggggagctgctaaggcagagtacctgataagaactttccccctcccttagaaaggggcagtgcttcagcatctgtacatgtcaagcagtacctgaggtggacttcaaacagaaacagcatgatctgatggcttaaaagatggatgtccctagaaagcagaatgagccatgatagaaattgaaatcttgccttcatctttcaaaaacatgaaatcagtattctgcaacatactggggcactagttactcccctgatttaaacatcccagataaatggaattcatttaactctggatgtctggtaaggagtcagcgaccaaatatacccaattgaagatgagggtctctcatttctaagagggcaggaacttaactaactgcagctgcagtatacaatctcaggcttggcctcgtgactgccatgatgtataagcctcttaatagacataaaagaggagacagcacttatgagaatcttgtagctttcagtttaagcaaatgattcactcagtctcagaagcctcaaaacccagtgaaaaccttctatatgccaaccactattctatgcactatagatgtagaggtttaaaaaaaaaagaaatagaacaaacacagttctgctgttacaaatcttatattctaatgagagtaaaataaattaacccatgaataaaaagttattttgataatgatagatgctgtgaagaaaataaaacagggtcatgtgatagggtgactaagtgtcaactaagtatcgtggagactgctaattgtctaaaagaatccatcttccccttctttatttttttaattatttatttgtttgtttgtttgtttgtttatttattttgagatgaagtttcactcttgttgcccaggctggagtgcaatggcacaatcttagctcactgcaacctccacctcctgggttcaagcaattctcctgcctcagcctccagagtagctgggattataggcacctgycaccatgcccagctaattttttgtatatttttaacagagacagggtttcaccatgttggccaggctggtctcaaactcctgatctcaggtgatccacccgccttggcctctcaaagtgctgagattacaggcatgagccactgcactgagcccatcttccccttctagaagtagagttgtattggacacatgactgttttgctaattatatttctagactctctttgcagcaaatgtggccatgtgacaatgtcctcaccaataaaa

SEQ ID NO: 688423 - DNA, 600 bp, Homo sapiens
agcattgtcacttcctgtctcccactaacctcagggtcacagtgggctggtggctgtagcatgctccacacctgctctcagggatgctggagggagactgaggcccaggcttttgtcttagagacttgggatatgtctaggatcccttctaaaagccaagttctagatagaatctggcctttcagggttggagagaccccatgtggcttctgagcagacttccttcctgatctcagtcttggaagtgaaggtcttacccctggttkcccccttcctgtgacagagggctctttgcctctttgcactccatgccccagagacaatcagtgctggggacaattttgtcagaaatctattcccagccctagcttagcctagtggcactctcagtcctgaaagctagaggccatttccacattggtgtagcaccgtggttctcagactgtgtttgctatcaggatcacctggggaacttggtaaaaatacaaatgcaggtcatattctgcttcctccatcctgggcctctgtgttctttattagccttcttggtggttctgacctacatcaaagttgaggaccactggcataacgcacggctgc

SEQ ID NO: 688424 - DNA, 1283 bp, Homo sapiens
tcctgcctcagcctcccacgtagctgggattacaggcacgcaccaccaagcttggctaatttttttgtatctttagtagagactagggtttcgcaatgttggccaggctggttttgaactcctgacctcaggtgatccacgcacctcagcctcccaaaagtgttgggattacaggcatgarctaccgtgcccagccatagatcatattttaaaatttcactctggcaacagccacaaaactggctcaccagcagcgccccctgctggtctgtgagtaagatcagcctccaggaaggacagttcctctctgagctcccctcttggccctgctgctccttcctcagcccctctgtccccctccaggctaaaaacaacactcttctccagccaaggagggagccaaagggcttgtgatcttttcctgagtctttggtatcttatacttcagaatcactttttacttcctctgaagaccacacgcaaaggcagaactaagcctcatgtgcagatgtgctttctttatacagcatgccagggccatgcgaaaatttgcattttaataacaaaagttatgcaaagattaacttcatttttagtagagaaaatgttttgtaaagggatttcttcaaatagctccctcatatatttaaccacaactcaatttataaacagctcctgaagaacctatttcaagaagtagaataaaactgtattcactatctttgcaaacccaaagagtatgcaaaagatcactgatccactggaaacatcagtaacagcatggaggctttccacctgagggtggtttccacagcgcctggatcctggagccgccctgggctgtgaactttgggaggggagtgccctggcaagggcttacttacatcctccgactcgaacacatggcagatcatcttatactgcttcttgccttcctgggccccgggcgtggtctcgatgcagtcctgagaggctgaccggggcatgcggcgtctggccatcagcactacaatgttcccaatgtcggcgatgtaggagatggtacgcaaggcgtggtccatcatggtttcctgtcgggagggagacagtgccacgtcagggaacactactgggacaatccattgaaaagtactccagggctgggcatggtggctcaagcctgtaatcctagcactttgggaggccgaggcaggcagatcacctgaggtcaggagttcaagaccagcctggcaaacatggtgaaaccccatctctactaaaaatataaaataaatagttgggcg

SEQ ID NO: 688425 - DNA, 1465 bp, Homo sapiens
tgaaatgtttgtccccataagaaccggaaggattctctttactagatcttaaaattcacagataagtaatcctgtaatgtgactgttccttctctcctactttagacagccaaatctggctcttgatatataaaatttacaggagaaaaacttaagtttggcttgagaagtctacaagaatggttagaaagagaaatatcctgcatatagtagacactcaataaatgctgaattgggctggaagccttggacatgcaccctggagtaacagaggatgtcatgtacgtgtttaactactgaagctttcattaactgtggcagtgttaaatacagtcgacactaatgagggggagtggtgacctggatacaccaaaacagagggaaatcccagatcaactctatttagtcttgaaatacagtccatgatttttttttcctgtaacaaaagtacctttccaattctgcttggcttggatgaatattgcaatgagcttatcctccatgagcccacagagaaaatccgctgcataaggcagtcgaccaaccagatttaaaagttaccaaggaaatttgaatttgracgtactggctggtattaagaaattattattagttgcattaagtgtgatatggatgttactttcactacgtagggaatatgttccttttttcttttaaaggtacatactggaattaacaaataaaagttaccatgggccatcttcaaaagggacactaaagatttgactgtattatagcattaagtaccatttactgaaattttttggtgcaaaccagtttagatacttaatttgaatcctaaacaaacctctctgaggcagctgtcattatccccattttacaggtgaatgaactgagcctcagaggcagtagtgactattcaatgtttctgtcccaattctgcttcagggaacccctctccctcccactggacactatcatgatgcgacagtcatgacacagtctcatcaacaatagtcgaagtaccaagagtcaaagtgccctgccctgctgcccagagtgtggtgtgggacccaggcctctcatgtaatccacaatctacatgactaatattcagagcagagatggtggaaactctgaggacctcatccatcagccctttctgaggtccagagcttgagcctcccctgctcaaggcagccacattagtttctgttacatgcaaccgaagcacactgaccaagagagaaacattacgtgactgctgccagacagcccagctagtaagtggcagagtgaggatctgaacccagggctgtctgatgtcaacgccccatgcttcctctcaagcaatatccctaaggggtcaagttcatgggacttgcaagtcctgactttgacttttcatgccttctgcatcttccttataaaattcttacacacttacctccatgtctctctatgcacaggtgtgtaataatgc

SEQ ID NO: 688426 - DNA, 1747 bp, Homo sapiens
cattacatcagaataaatgagtaaaacatgtggaataaaagctggctttaaaaattggatatcagccttccattatactaaaatatataatttaataaaattaattacttaaaactgaaaaactgtaagagtaaatgtttaatgcttgatgctaatgcattaacatgttcttctaactcttgatacaattttgtgtcaagaagttcacatcaaattaatttgtgttcatactatttgataatttttttttcttttttttttttcttttttgagatggagtctcgctctctcgcccaggctggagtgcagtggtgcgatctcagctcactgcatgctccgcctcctggcctcacgccattctctygcctcagcctcccaagtagctgggactgcaggcgcccgccaccacgaccggctaattttttgtatttttagtagagacagggtttcaccgtgttagccaggttgactttgatctcctgacctcatgatctgcccgccttggcctcccaaagtgctgggattacaggcgtgagccaccgcacctggctgagaactttttttgctaagtaaccatatctgagaagtattcgtgtagatgccctgggggaaaacatactttaaaaatcaaatatatatatctgggctcaagaaaacataatatttaaaaaattaaaaatcatattatccaaaagacagtaaaaatgtggcacagtaaacatcatttagctttgtgtctacatagataatatatagagtacatatatatgtactaaatatatatatttatatatacacacacatatatatatatatataaataaataaaatgaactcggttttgaatattcggataactgggatgaattattttcctcagagtattcatttaaattggccaatgctcatttaatacccactacttgccagtcttgttcaaaagatgaaaactgcaaagtaccctaaactttgtctcaagcaaggtattgatcaatagtaatgtagatgtaaaattaaaaatgaaaggacaaagtaatttgcaaagtattttaaaataattattcgaattcaattaacctacttgcagacaagttactaagcaacatttttcagatttttgaaatagcaaacacgatgattgaatttcgccttttggtatgttctagaaagttttgtttgattctgcacagtgtagcagtaagctagtggttttgaatagataatgaacaatgagaacatacctctcatcttttgcaaggactagcctttgtagtgtgtatacatgcacacacaaacatgcatgtatgtgtttatgtctataatctttattgataatctttaaagattactacagaatatgcatagattgtatttgaatatttacagattttatttaaaaggctggcatataaatgcaggctgagaagtatttcattaaccattttgcctctagaggatttaagaataatgacaaataaaaaacaaatactgtcatttatttgctgtaattgatgcaaccactttctctatctaataatataaatgtttttcttgccaagtagattaaacctatgtagatccattttaagtacacctagttcatttttatgcattttataacaaatgtacattttgtggagacaactggtcatctatggggaacatggtttattgtactttcttctgagtcatgacattcattggactacatccaacatatatataattttttaatgcaagatattct

SEQ ID NO: 688427 - DNA, 1747 bp, Homo sapiens
cattacatcagaataaatgagtaaaacatgtggaataaaagctggctttaaaaattggatatcagccttccattatactaaaatatataatttaataaaattaattacttaaaactgaaaaactgtaagagtaaatgtttaatgcttgatgctaatgcattaacatgttcttctaactcttgatacaattttgtgtcaagaagttcacatcaaattaatttgtgttcatactatttgataatttttttttcttttttttttttcttttttgagatggagtctcgctctctcgcccaggctggagtgcagtggtgcgatctcagctcactgcatgctccgcctcctggcctcacgccattctctcgcctcagcctcccaagtagctgggactgcaggcgcccgccaccacgaccggctaattttttgtatttttagtagagacagggtttcaccrtgttagccaggttgactttgatctcctgacctcatgatctgcccgccttggcctcccaaagtgctgggattacaggcgtgagccaccgcacctggctgagaactttttttgctaagtaaccatatctgagaagtattcgtgtagatgccctgggggaaaacatactttaaaaatcaaatatatatatctgggctcaagaaaacataatatttaaaaaattaaaaatcatattatccaaaagacagtaaaaatgtggcacagtaaacatcatttagctttgtgtctacatagataatatatagagtacatatatatgtactaaatatatatatttatatatacacacacatatatatatatatataaataaataaaatgaactcggttttgaatattcggataactgggatgaattattttcctcagagtattcatttaaattggccaatgctcatttaatacccactacttgccagtcttgttcaaaagatgaaaactgcaaagtaccctaaactttgtctcaagcaaggtattgatcaatagtaatgtagatgtaaaattaaaaatgaaaggacaaagtaatttgcaaagtattttaaaataattattcgaattcaattaacctacttgcagacaagttactaagcaacatttttcagatttttgaaatagcaaacacgatgattgaatttcgccttttggtatgttctagaaagttttgtttgattctgcacagtgtagcagtaagctagtggttttgaatagataatgaacaatgagaacatacctctcatcttttgcaaggactagcctttgtagtgtgtatacatgcacacacaaacatgcatgtatgtgtttatgtctataatctttattgataatctttaaagattactacagaatatgcatagattgtatttgaatatttacagattttatttaaaaggctggcatataaatgcaggctgagaagtatttcattaaccattttgcctctagaggatttaagaataatgacaaataaaaaacaaatactgtcatttatttgctgtaattgatgcaaccactttctctatctaataatataaatgtttttcttgccaagtagattaaacctatgtagatccattttaagtacacctagttcatttttatgcattttataacaaatgtacattttgtggagacaactggtcatctatggggaacatggtttattgtactttcttctgagtcatgacattcattggactacatccaacatatatataattttttaatgcaagatattct

SEQ ID NO: 688428 - DNA, 1747 bp, Homo sapiens
cattacatcagaataaatgagtaaaacatgtggaataaaagctggctttaaaaattggatatcagccttccattatactaaaatatataatttaataaaattaattacttaaaactgaaaaactgtaagagtaaatgtttaatgcttgatgctaatgcattaacatgttcttctaactcttgatacaattttgtgtcaagaagttcacatcaaattaatttgtgttcatactatttgataatttttttttcttttttttttttcttttttgagatggagtctcgctctctcgcccaggctggagtgcagtggtgcgatctcagctcactgcatgctccgcctcctggcctcacgccattctctcgcctcagcctcccaagtagctgggactgcaggcgcccgccaccacgaccggctaattttttgtatttttagtagagacagggtttcaccgtgttrgccaggttgactttgatctcctgacctcatgatctgcccgccttggcctcccaaagtgctgggattacaggcgtgagccaccgcacctggctgagaactttttttgctaagtaaccatatctgagaagtattcgtgtagatgccctgggggaaaacatactttaaaaatcaaatatatatatctgggctcaagaaaacataatatttaaaaaattaaaaatcatattatccaaaagacagtaaaaatgtggcacagtaaacatcatttagctttgtgtctacatagataatatatagagtacatatatatgtactaaatatatatatttatatatacacacacatatatatatatatataaataaataaaatgaactcggttttgaatattcggataactgggatgaattattttcctcagagtattcatttaaattggccaatgctcatttaatacccactacttgccagtcttgttcaaaagatgaaaactgcaaagtaccctaaactttgtctcaagcaaggtattgatcaatagtaatgtagatgtaaaattaaaaatgaaaggacaaagtaatttgcaaagtattttaaaataattattcgaattcaattaacctacttgcagacaagttactaagcaacatttttcagatttttgaaatagcaaacacgatgattgaatttcgccttttggtatgttctagaaagttttgtttgattctgcacagtgtagcagtaagctagtggttttgaatagataatgaacaatgagaacatacctctcatcttttgcaaggactagcctttgtagtgtgtatacatgcacacacaaacatgcatgtatgtgtttatgtctataatctttattgataatctttaaagattactacagaatatgcatagattgtatttgaatatttacagattttatttaaaaggctggcatataaatgcaggctgagaagtatttcattaaccattttgcctctagaggatttaagaataatgacaaataaaaaacaaatactgtcatttatttgctgtaattgatgcaaccactttctctatctaataatataaatgtttttcttgccaagtagattaaacctatgtagatccattttaagtacacctagttcatttttatgcattttataacaaatgtacattttgtggagacaactggtcatctatggggaacatggtttattgtactttcttctgagtcatgacattcattggactacatccaacatatatataattttttaatgcaagatattct

SEQ ID NO: 688429 - DNA, 629 bp, Homo sapiens
gcctcaagcaatcctcccacctcagcctcctgaatagctgggactaccagtttacaccaccacagttggatatgttgtttttttaaaaaattttgtagcgatggcatccccctatgttgtgcaggctggtctttaagkcctgggcttaagcgatcctccacctctgcgtctaagattaaaggctaagcttaaaggcatgagccaacacacttggtcacatttatttattatttactatatgtcttcctgaatttaatttaaaaacgataaaggcagaaattttgtttgttttatttgtagagaacccacagattttttagtaagtttctggtgaataatttaatatgcattttctcatttaatcctcacattaatgagttatttcctccacagaaaaaaggaaaaaactcatatttattatatttaaaataattggcattggtcacattgctagtaactagtgatggaagtgacgaccagtgtggagcagctgctgcaaggatgctggttgcacagcatgagacatggacagggttgcatgttctgcagagctggtgggagccaggagcaggcgagagcccagacccctacttagttgatgaggcagaagcccgtgctccctggcacag

SEQ ID NO: 688430 - DNA, 629 bp, Homo sapiens
gcctcaagcaatcctcccacctcagcctcctgaatagctgggactaccagtttacaccaccacagttggatatgttgtttttttaaaaaattttgtagcgatggcatccccctatgttgtgcaggctggtctttaagtcctgggctyaagcgatcctccacctctgcgtctaagattaaaggctaagcttaaaggcatgagccaacacacttggtcacatttatttattatttactatatgtcttcctgaatttaatttaaaaacgataaaggcagaaattttgtttgttttatttgtagagaacccacagattttttagtaagtttctggtgaataatttaatatgcattttctcatttaatcctcacattaatgagttatttcctccacagaaaaaaggaaaaaactcatatttattatatttaaaataattggcattggtcacattgctagtaactagtgatggaagtgacgaccagtgtggagcagctgctgcaaggatgctggttgcacagcatgagacatggacagggttgcatgttctgcagagctggtgggagccaggagcaggcgagagcccagacccctacttagttgatgaggcagaagcccgtgctccctggcacag

SEQ ID NO: 688431 - DNA, 1369 bp, Homo sapiens
taagtcatttggacattaatagcattcttttactgttggtctgcatttcctgacttcctgatgttattcatgattctttatttcattttcataggtgctattctctttttaagaatttagaatggttactttctcactctttcttctgctttaatctatttaaaatgcctaaaaatttattttcaagtgaatgctgtgttcctgtgtatttttataacttctaacaacaaactagaaaacagttttaaaggcggcattatcccttttcatgtctatgcttacatttctttggatcacatttgttactggaagagaaacccatggaggaaaatggaggaaaaacagtgctctgactaaaaatgattctcaacaaagctttgctttactcttgctcatcttagctctcaaacctacttttgaatgacgctttggtcattgctacagaggctatatagagttcaataatttaacagctgaattataaaattaaataaaatatttgaaacaaagagcatgtacttatcaggaaagataaatgtgtttacatacattatatatttttctactcattagttcatcattcatttgtccattaatttaccatctcatattgaatgcctttgtgtgccagatgctgttctggcactgggaatattggaaggaaaacttccattccttgctacagtctatgccacaaggaaaccaaaccaaggtgggaaaaacatgttcttattatattcagtagatagaccagtgatagtttttcaattttcactggtattaaggcacactgagttctgaaaaaaaaaagctacaaaaataagaattaaaaatatttgaaactttcaaagcaaaataattaattttctagaattcagggctcagcaaacatttaatgctataaccctttaaaaaaatcataaggtcagggatcatggcacttaaaattgcatcctgtaccatttggagataggaattttaggttgtaacatactcaatatacttccttgtggtctgggaagaagtagcctcttcaggtgtgtgaagttatatgggtcgaaacacttagccaaataacaggccgtgagttactggaactcagatgtaggtctgtaaatctattctttgtggaggggggtccattgaggccaccagagtctgtgwcttggagaagagttacagagaacatgcctagggacaatggagggtcaagacaggggcctgagcatggagaagatttggggtccatacagtgtgctgtggcttgaaggatggtccttgctgagactattgctggctcttctttcattcccttcagtcaactatcatagtctcactgctctgttcaggatccctactttactcctcc

SEQ ID NO: 688432 - DNA, 1150 bp, Homo sapiens
gccaggagttcaagaccagcctgggcaacatagtgagaccacatctctaacamaaaataaataaaaaagaaagaaagaaagaaaagaacaaataaaaaataggaaatatttataaaaaaattattgggcactcacaagctgaaacagtttcaactatttattcaacaccttagtgaacacctgctcagtgcgggcattattatatgttaactagaggttacaaaaagaaaaaaagttttttgacctcaaggaaaaagaatgtatgaacacataaataatattgtgtgataaaggcaagcataggccgggtgcggtgggtcacacctgtaattccagcactttgggaggctgaggcaggcggatcacgaggtcaggaggttgaaaccatcctggctaacacggtgaaaccccgtctctactaaaaaatacaaaaaaattagccgggcatggtggtgggcacctgtagtcccagctactcgggacgctgaggcaggagaatggcgtgaacccgggaggcggagcttgcagtgagcccagatcgtgccactgcactccagagtgaagactccgtctcaaaaaaaaaaaaaaaaaaaaaaaaaaagggcaagcataaatgtacaaagtacagaggtgcaaagatgtctgagtgatagattccatctaaggtagtcgggaggtcttcctgggggtggtggcatctgtccaccaccctcaggtgggaatttgaaggataaattcccagtgaacaaggtggagacagcatgagcaatgacatacaggaatcctataataggatgtgttcaaaggactgtaagtaaatctgtgtgactagagcttaaagtttaagataggtgcaacacaaagtatctgagacaggactcaatcaatttagaagtttattttgccaagggtaaggacacacacatgggagacaggtctgtgcctttctccaaagatgattttgagggtttcaatatctaaaggggaaaggagtggatactggggagaggagaaattgttaaggggtgtgggccagtaagaggcaaatggttgcattcctttgagtctttgattagccattgacatgtgagatgggggggtagaggaatagtcacgcattcatctagctcagtgaatctgcatttttaaa

SEQ ID NO: 688433 - DNA, 1150 bp, Homo sapiens
gccaggagttcaagaccagcctgggcaacatagtgagaccacatctctaacacaaaataaataaaaaagaaagaaagaaagaaaagaacaaataaaaaataggaaatatttataaaaaaattattgggcactcacaagctgaaacagtttcaactatttattcaacaccttagtgaacacctgctcagtgcgggcattattatatgttaactagaggttacaaaaagaaaaaaagttttttgacctcaaggaaaaagaatgtatgaacacataaataatattgtgtgataaaggcaagcataggccgggtgcggtgggtcacacctgtaattccagcactttgggaggctgaggcaggcggatcacgaggtcaggaggttgaaaccatcctggctaacacggtgaaaccccgtctctactaaaaaatacaaaaaaattagccgggcatggtggtgggcacctgtagtcccagctactcgggacgctgaggcaggagaatggcgtgaacccgggaggcggagcttgcagtgagcccagatcgtgccactgcactccagagtgaagactccgtctcaaaaaaaaaaaaaaaaaaaaaaaaaaagggcaagcataaatgtacaaagtacagaggtgcaaagatgtctgagtgatagattccatctaaggtagtcgggaggtcttcctgggggtggtggcatctgtccaccaccctcaggtgggaatttgaaggataaattcccagtgaacaaggtggagacagcatgagcaatgacatacaggaatcctataataggatgtgttcaaaggactgtaagtaaatctgtgtgactagagcttaaagtttaagataggtgcaacacaaagtatctgagacaggactcaatcaatttagaagtttattttgccaagggtaaggacacacacatgggagacaggtctgtgcctttctccaaagatgattttgagggtttcaatatctaaaggggaaaggagtggataytggggagaggagaaattgttaaggggtgtgggccagtaagaggcaaatggttgcattcctttgagtctttgattagccattgacatgtgagatgggggggtagaggaatagtcacgcattcatctagctcagtgaatctgcatttttaaa

SEQ ID NO: 688434 - DNA, 657 bp, Homo sapiens
agtgcagtggcatgatcttgtctcactgcaacctctgcctcccgggttcaagcgattctcctgcctcagcctcccaagtagctgggactacagacacgtgccaccacgcctggctaattttttgtatttttagtagagagggggtttcaccgtgtcagccaggatggtcttgatctcctgaccttgtgatctgcccgccttagcctcccaaagtgctgggattacagacatgagccactgtgccctgacatataattcttaatagtccccacacttcatgccaatgtagtctcaaaattcttctggtagcatgaactctataaggattttcttcatcataatcaagttcagactattctcttgctacacaaagtgacttcaagagtttatttagatttagttttcctaatttcccaccttgatcagctaaaggktttttaaatcagtttcctctcattgctttgttctctttccacttggctttagaataaagagatgatagtcacaaaaacgcatccttaggttgacagagtaagttccagatccacagggaatcatttgctattcttcttttaaaaagagcaaactcccttaccagtagaaatccagctgttctttatttgcttttgtttccttcagaatctatttctgatagac

SEQ ID NO: 688435 - DNA, 981 bp, Homo sapiens
atcaatttcagtatctaaggctacaaaggccaccctaggaaattaaacatatgtattaattaattaaaaaactagacaactgtttatttcaaatcaatacataaacatgtctataccaaaaaggcacagactagatggataaacatgggaaggaaagamcactttgtaactggtgaggcctttggttaagcatggcttcctggaggaggtgaactaggggtggtcctggaggaagttaaaaacctgagtagataaagaagaataagaaaggtgtctggcaaggaaagaaaggtggagcacaggaatgggaggactgccctaacaaacacagcatgagcaggaataatgaaggacaggttgactgtctaaggtgcatattgcctgaatcccttaattttcatctaaggaatttgaatgtgatctgattagcaacaagaagtcaccatagatccctgagcacctcatgagtgcattgtaaaaactgaatgagataacatatgcgaaagcgaccagcgctgtggtgcccagtaggtaatgcacaataaatgttagtctgttacagagttatttctgaatagggctgagatataatgaacacgatgtttcaggaacagtgatctgtgcaagtgaaccagaggcggggagaatggtggctgttgcagcaagctggccacagggtgacaagcatgcctcaccactgtgcatgcagaccatatgtcactaggtttccgaaaagctgccatctgccaaggtagcagtctgatggacctctgccgcctagatgatgctagccagggaccttttggacaatgtatcctactgtaaaacgtagttcacacatgtttcttgaaattacagcatagttatagaaacaggcagatgtggcagacaggaaactgaagaaaataggcccattgattgctcttctatgctagggcttcattaacaatctagagaaccctggaattccttatggcaagt

SEQ ID NO: 688436 - DNA, 1604 bp, Homo sapiens
atttcaagccatcctgaatactctaatgatccttttaatggcgtctgagaaaaagtaaattatccatttgctggcatacagtagttggcaaatgtggggctgggtgaggtagcatcctttcaggattaggatattatactggtacatatctttgtgttccaaataggtatcaatgtgttaggatactctgaaaacagatttttcaataaaacttatcaattaactagtatcaacaacttaagctagaaacaccttttgaatacaaatgctacttcccagataatagaagcatatttctttaggaattattttttgtttacccttaatgactgtgctgtggtctgaaagtytgtgtccccacaaaatccacgtgttgaaatcctaaccctaaggtgatggtattaagatctggggcctgtgtgaggtgatgaggtcatgacggcagggcactcatgaatgggattagtgtcattttaaaaaagactcaggggagcttgttggcctcttccaccacatgaaggcacagctagaaagtgcccacatttatgaactagaaatcaggctttcaccagacacccggtgagatcttgaacttcccagcctctagaactgtgagaaataaatttctgtggttgatatgccatttgtcacagcagcccaaatgggttaagacagattggaagcctttcaaaaagcacatcatgtacttccttgcttttttctgaagcagagcacattgaacccaacctttccatcaggtagaaaagcaaaaaggttgcctggtgtcctccctccaaacagggagccctgatcctaaacctaaaactcttcccttgctgactggataatgggatagtaattgttttttctttttcttttttttttttaattttaagttctgggatacatgtgtagaacatgtaggtttgttacataggtatacatgtgccatggtggtttgctgcacctatcaacccatcatctaggttttaagccctgcatgcattaggtatttgtcctaatgctctatgggatagtaatttttaaactgtaaactactccaactttctataataaggccctcaaaggcaagtgaggtgcataggagctgatggtaccctcccaaaatgtcctcaaactgctactcttttgaattgtagctagacgggtttttgcacctttagtttttactaggtaatgtaatttttattgccaccagtgtagctcccagaaagatctttcttcaccttgtcctctcaaatggcttgctgccctttacaatacagataatcatgttcatgtataatagttcagtctaggaataaggcagtttcagtgaaagcctgtgggtggtgattattggtagggtgcataagtgttagtgcatggactttgtgagatccgtctgtctggaacctcaggggcctcttccacttactttcaggatcctgactatgtgttgtatttctatatataataagattgtcaaaaaggtcaaaagtgcttcctaaatgaaaaataagtactttcagttacatgcagataaattctattagttacagacaaagtatcaaaggtcatgcagttaatggcaaatctaaagc

SEQ ID NO: 688437 - DNA, 1604 bp, Homo sapiens
atttcaagccatcctgaatactctaatgatccttttaatggcgtctgagaaaaagtaaattatccatttgctggcatacagtagttggcaaatgtggggctgggtgaggtagcatcctttcaggattaggatattatactggtacatatctttgtgttccaaataggtatcaatgtgttaggatactctgaaaacagatttttcaataaaacttatcaattaactagtatcaacaacttaagctagaaacaccttttgaatacaaatgctacttcccagataatagaagcatatttctttaggaattattttttgtttacccttaatgactgtgctgtggtctgaaagtctgtgtccccacaawatccacgtgttgaaatcctaaccctaaggtgatggtattaagatctggggcctgtgtgaggtgatgaggtcatgacggcagggcactcatgaatgggattagtgtcattttaaaaaagactcaggggagcttgttggcctcttccaccacatgaaggcacagctagaaagtgcccacatttatgaactagaaatcaggctttcaccagacacccggtgagatcttgaacttcccagcctctagaactgtgagaaataaatttctgtggttgatatgccatttgtcacagcagcccaaatgggttaagacagattggaagcctttcaaaaagcacatcatgtacttccttgcttttttctgaagcagagcacattgaacccaacctttccatcaggtagaaaagcaaaaaggttgcctggtgtcctccctccaaacagggagccctgatcctaaacctaaaactcttcccttgctgactggataatgggatagtaattgttttttctttttcttttttttttttaattttaagttctgggatacatgtgtagaacatgtaggtttgttacataggtatacatgtgccatggtggtttgctgcacctatcaacccatcatctaggttttaagccctgcatgcattaggtatttgtcctaatgctctatgggatagtaatttttaaactgtaaactactccaactttctataataaggccctcaaaggcaagtgaggtgcataggagctgatggtaccctcccaaaatgtcctcaaactgctactcttttgaattgtagctagacgggtttttgcacctttagtttttactaggtaatgtaatttttattgccaccagtgtagctcccagaaagatctttcttcaccttgtcctctcaaatggcttgctgccctttacaatacagataatcatgttcatgtataatagttcagtctaggaataaggcagtttcagtgaaagcctgtgggtggtgattattggtagggtgcataagtgttagtgcatggactttgtgagatccgtctgtctggaacctcaggggcctcttccacttactttcaggatcctgactatgtgttgtatttctatatataataagattgtcaaaaaggtcaaaagtgcttcctaaatgaaaaataagtactttcagttacatgcagataaattctattagttacagacaaagtatcaaaggtcatgcagttaatggcaaatctaaagc

SEQ ID NO: 688438 - DNA, 592 bp, Homo sapiens
tgcagtctgtacaagaaacatggtgtcagcatctacttctggtgagggcctcaggaagcttccactcatagtggaaggtgaaagggagtggacatcacatggtgagagaggaagcaagagagagaggaggaggtgccagactcttcaacaaccagctctcaggggagctctcaaggacactaagagtgagaactcactcactcccttgaaaatggcaccaagccattcatgagggatccatccctatgatccaaatacctcccatcaggccccaccttcaacactggggatcagatttcaaaaagagacttggtaggaccaaacaaaccatatccaaagggtagcactatccatgccatgccattattttatatacaaatctggagaagaagcatttgaaatgcaattgtcaaacctatatttgataaattaatctttatttacagcaataagtattgtcttacatctgtattaatataaaatagtcgtatatatacatacatacatatatatatatatatatrtatatatatatatacacacacacacacacacacacacacacacacacacacacacacatatcaattcc

SEQ ID NO: 688439 - DNA, 659 bp, Homo sapiens
ccctctttgggcactgtgtagaatgttggctgaagtagggaggaaaaagccataatccctgtccttgtggggtaggaaggttgatcagcaatattgaaataattacccaaatatgtcattacagatgggaataagtgacgtaaaggcaagaacgaaagtacaatgaaggggacctgatctagctgtgggctcagagaaggctgagatgctaagatgagttgcaaataactatagatggtgtggaggggtgaaatcggagttgaagagccttcctggcaaagatgtgagcacgtgcaaaggtcctgaggtctgaaggagctggatgtgtccaaggacatgaaaacaggcggtttgacctgaaatgtgaagaatgagaagttgagggaagtagggtcaggcatggaaacgacgtttcagacaaaagwgaaggcatcagctaattggccagcaattctttattttgtctcatagatactgtgggtacagttgtgcatagacagccacctgaggcctagactgatgcccatgggcttctctgctcctcgctctgacattttcttttttttggttttttgagacggagtcttgctctgtcaactaggctggagtgcagtggcaagatcttggctcactgcaacctctgcctcccgggttcaagc

SEQ ID NO: 688440 - DNA, 600 bp, Homo sapiens
cactttccagaaaaaagtcagttaaaagaagaaagtcttcctggctggcctagggaaaaaaaaagtaaggaagccttttaacttgcttacttttctacctcaattctctttatttagacactgtttagaattaaaggatgagtttaggattgggaaaaaaagctattatctcaaagcctggttgttcttttctttcttttttgagatggagtctcaccctgttgcccaggctggagtacagtgacgtgatcttggctcactgcaatctccatctcctgggctcaagcaattctccttcctcagcctcctgagtagctgggattacaggcctgcgccaccacgcctgrctaatttttgtatttttagtagagacggggtttcaccatgttggccaggctggtctcgaactcctgacctcaggtgatccacccgcttcggcctcccaaagtgctgggactacaggcgtgagccaccgcgcctgccctggttgttcttatcctctttctagcccttttctctaccctcaagaatattataaaatgatgtgcgaaactgcctatcgggatagagtgcataggaagtaaaaaactattcctacag

SEQ ID NO: 688441 - DNA, 598 bp, Homo sapiens
gaatagtcactcccacttgtatatggttttcaatgtctctttgctgtctctcagttcctgtgtcccaagcgtggctactttggtactttatttccccattcccatgggatggctcacccttcaggaacaggataccacctcaatacctacttctagctattgactacatacccagaattcttagttcctcctgagattggaactatttgggggcccctgactgtagaatatagccagtcctttttcctagtggaactggaaacagctccaacagaaatrtgaattctaggaaaacaacatagatgtttaggaaatataaatgaatttactttttaactaagtcagatgtactaaagaaacagggcacctagtgtgttttatggtccatcttttcagggatagtatttgcataaaaagtacagaaataacagaaggtcatacttgagtagttaagaccatgtttcagctgctattcataatagcttacaacttcttattcccattttattctatgatgcccaaactgatctcactttttatttatctagtctcctgattactttcaaaaatatgtgacatcctttaataactgccagct

SEQ ID NO: 688442 - DNA, 598 bp, Homo sapiens
gaatagtcactcccacttgtatatggttttcaatgtctctttgctgtctctcagttcctgtgtcccaagcgtggctactttggtactttatttccccattcccatgggatggctcacccttcaggaacaggataccacctcaatacctacttctagctattgactacatacccagaattcttagttcctcctgagattggaactatttgggggcccctgactgtagaatatagccagtcctttttcctagtggaactggaaacagctccaacagaaatgtgaattctaggaaaacaacatagatgtttaggaaatataaatgaatttactttttaactaagtcagatgtactaaagaaacagggcacctagtgtgttttatggtccatcttttcagggatagtatttgcataaaaagtacmgaaataacagaaggtcatacttgagtagttaagaccatgtttcagctgctattcataatagcttacaacttcttattcccattttattctatgatgcccaaactgatctcactttttatttatctagtctcctgattactttcaaaaatatgtgacatcctttaataactgccagct

SEQ ID NO: 688443 - DNA, 1016 bp, Homo sapiens
tattgtcatttcataaaaagtgaatttagtcaaatattctaaatatattcagtgaaaatgatttagtcatcatataaccaattaaaagtttactcataacattagtcttccatttgaattcaagtatttgggtttcttccctcacttacatttctttgacatgaaacgctgcactagaaatattcttagtagctgggtcaactgccgctatgtggcatgcattccttgtcttggatggctttgaagatattctcaaacattatttttgcaatctttgaaaaagtacaaaaggtagataactttgtacyctttgaatattgcatgatagcaacaaaaatgaaaaatctatagaaaaaagtcaggtggtaaataaaaatcgaaagtatctttatatataaacagtgtccataattcaaccattttaaagtatttgcaaaattggattattctgttgtgtgcgtttctaactatatacatgatgtaccgaatttaagaagcttattaagcttattggtttttactgcagatcgggctcatcaaggaaaaactaatccgtacagcataaacaaattagaaatgaacttaaaataaatatacaaacaaaatagtaaactttgtagtacccgaatataaggtgttacagttaacatggaatctgataacaccaattctttcctttcttaaacttcataggaaagctaaaaatactttaacttttgaaattaataaatgaaatacatcttatatttattgaacagctcctttctgaaatacattgtactataatataaaagatgaatgaagtaagtttttatttccaaatatccttaagtgtagaactgaaaagaaaataagacaaaccaacacaatataaaactcaacactttgtgtcaaatttttactatttttccccttctttgttttccctcttataccggtgaagcttgtgaatgttctcatctgggtaataattgtgacccaaagactgggcgatgcatttgccctcccaataccat

SEQ ID NO: 688444 - DNA, 658 bp, Homo sapiens
agaatctcactctgtcgcccaggctggagtgcagtggcrccatctcagctcactgcaacatctgcctcctggattcaagctattctcccacctcagcctcccgagtagctgggattataggcgcctgccaccacgcctggctaattttgtatttttagtagagatggggttttaccatgttggccaggctggtctcgaactcctgacctcgggtgatctgcccgcctcagcctcccaaagtgctgggattacaggcacgagccaccacagccggcaacgcctgtgttcttataagccatgtgctccagggaaagggacaatcatgttattttgtgaaaagcagtgtacttaagctttgaaaaggtgaaactcaaagggagaagcagggagccgccaaggctctcccgcagagggaatgctgacgtgtgaggaggcagggcctgctgaggccctgcctgtgggagccacggtgcagtcctgccacacagaggggtccccaggcggcttatttgtgcccaggcgttaggctcaggggctcggggcctccttacctggcttccctgggggcgcgacttctcccctcgagttccatgctcctcaaagatgagcctcagccacctcaggtgcccaggcagctcctttcagccgtgctgacaag

SEQ ID NO: 688445 - DNA, 1179 bp, Homo sapiens
gatcctaaggtttgacctcagtgcttttgcatcacagagggcgactttgcaccttccgcctggaactgctgtccccactcggggctgtaggcactccccagaatcgggcttcctgttgaggagaaacagcacgtctgtgttttccagtcgtggctgatccccgtaagatcagcgcgtccagcccatgggctgcaccgtttcatcctgctttgcggctgtttctcaaacttcaacgccgggactcagggcttgggaacaagctgggaggatttgctgaaagctgcacagtatgaatcaccccttgcttgcctcagagacattggagccgcctggtgataagacgactggtgggatgcgaggcgatcggacgcctgcccgggccgcaggagcaatgcggcgcacatcagggtgccggtcacgtcgcctgtctggcggcccctgtgcccggtcctgttcgtcgaatcaactttgccatctggtggctgttcggtgcttctccacttactgggttgtcccagaaccattgtctgatgcctgagattccaggcgagctggggtgcctttctgccttgatacggacagtaactcaggaaaagggactttagaagaattaattaaaacatttaaaatataaccgctctgatttgcaattggtctcaaagataaactctgaacgtgccttgtaaatactgcatggtcactgaaaaagaaggagttaaagaagcagctgtggggtcagatggagctcactggcagggccgtcaatccggcgckgctcacagactgcaggccgccatccagcagctgagtcaggaaagcgcagcccgctgggcctgccggcagcaccaccgtccggagctggctaggaagccaaaggctcagggcccccctgaccccctggataagcctgcagatgcctacacgcaactaagagagggtcaggtctgcaggccaagctgttcttctgactcagatacccagacctggaggcagcgcgggaagaaggctgtggaacccaagctgcagtttcattttccgcaggaagagtaattttccaataataattgcctgggtgacatagcaagaccctgtgtcaaaaaaaaaaaaaaaaaaaaaaaaaagggaaccaaatctcaactgtgtagaacagcttctgctggcaaactctaacctgcacac

SEQ ID NO: 688446 - DNA, 609 bp, Homo sapiens
aaaggatttgaacaccacttacaatagagcaaatttccagatagctccaggagcttaatctttggaagcaggagtttctttgtttacaaacaagcaggcgtttgttagccagtgcaacaataaacctctgctctctggtcagccattttcattaaattattcttaaagaccaccaataaaaggtgccartcattctacttaactatgtggctaaccatctattattaaccagagcacatacttctggaataacaaatggggtcgcaaagatctgagctcgataagccctataatgagataactcccgggcctggtatcatgtgataaatgggatgattgatcagaactgcacaggagagactgacgtcctctctgcgctctccctcctctttccctccctccctgtggtttagctctactaaaaaatgctaaatagagatatatatatttcatataagaaatacgcaaataagccttttttattaaatgcatatttgctagaggttaaaccctggtatcctgcaaaaatcaagagaagaaaacttgctgagtgtttctgccatgtcattttccagccatatttaacagagagagatttctggcaggact

SEQ ID NO: 688447 - DNA, 609 bp, Homo sapiens
aaaggatttgaacaccacttacaatagagcaaatttccagatagctccaggagcttaatctttggaagcaggagtttctttgtttacaaacaagcaggcgtttgttagccagtgcaacaataaacctctgctctctggtcagccattttcattaaattattcttaaagaccaccaataaaaggtgccagtcattctacttaactatgtggctaaccatctattattaaccagagcacatacttctggaataacaaatggggtcgcaaagatctgagctcgataagccctataatgagataactcccgggcctggtatcatgtgataaatgggatgattgatcagaactgcacaggagagactgacgtcctctctgcgctctccctcctctttccctccctccctgtggtttagctctactaaaaaatgctaaatagagatatatatatttcatataagaaataygcaaataagccttttttattaaatgcatatttgctagaggttaaaccctggtatcctgcaaaaatcaagagaagaaaacttgctgagtgtttctgccatgtcattttccagccatatttaacagagagagatttctggcaggact

SEQ ID NO: 688448 - DNA, 658 bp, Homo sapiens
ttctagtcaaaggttttttatcttaagatactataaatgatgctaatttttagtccacttgaaatatgtaagttgtgctataacaaatcattctgtcacgtgaccactttccatgtagttgaactgatcgagaaagtatatttgaattgattcccatcataaccagggaggcacatctaactcagtggtgaaaaggtgcatcacacatttgccttgctgctggttatgtggtctgggatctctgccttctctcgttttcctcccctgcctcccaccctccctgcagcagccctcaagcctgggggctttttagaatagatgtgaagttttcaacctgtggacctgctgcgtgtggaggtgctttgcctgcaycccttgtttcttgagtctttaatgatgcctttgtccaagccatagccctgtctctacactcctccactcccgcgctgggctgaggcaccgatgataaaccctgaggctggcctttggtgaggaatttggggctttccccatatcttctctctgcacctttttcaaggggtgctgctttttcctctctcctgctcaagttcccttttgcatcgtcaccacccaacactttccatgacacttccttgctgtggccagaagcccaccaggcaaggttggaaagaacctc

SEQ ID NO: 688449 - DNA, 679 bp, Homo sapiens
tatgactattaattattttcaaggtagatttttaaggccaggtatggtggctcacgcctgtaatcccagcactttggaaggctgaggcaggacgatcgcttgaggtcagaagttcgagaccaacctggacaacacagggagacccagtctctacaaaaaatgttttaaaaaattagttgggcatggtgacacatgcctgtggtcccagctacttgggaggctgaggtgggaggattgcttgaggctgggagattgaggctgcagtgagccatggtcacaccattgtactctagyctgggtgacagagcgagaccctgtctcaaaaaaaaaaaaaagtagatgtatatatgtagctcttcactagtaaacagctatcttatattgtaaatgcaaacaaaagtttgcaactcatatacaatatttatttttcctttcatcttcttttaataagaacttagacttgtttacctttggaaaatatttttcacttttatattacattagaaatgccactctttaaaaatcaatatttaaaatgcaaaattagtagctgaagtgtttgttctgaaacagatccactaccctcttatgtcctacagaatttctgagtaagctctaccaatcatttgcatcagaatcttatggaatacgaacagtgtctatttcggggactcaacac

SEQ ID NO: 688450 - DNA, 1181 bp, Homo sapiens
tgttaaccatttcattgcccttggcttctttcaaaattttacatttcatatatactgtaaaatattaaaattatttatctccttgattcattagaagcttagtacattttgagagcagaaaaaaacamaaaacattttaagatggattaaagtcattatgaccatgagaaaaaaaatggttttttttccagtgttcattgtatgtaacctagagtattatagattacatttttctttggattcagtttatttaaacaaagtttattgtggcattgaagatattagaactaaatttttaagaaactgacaaattcatcatttcctgggcttcactggtcatttaggaatactgatttggaaaatatgccaagtggcccattaattatccacaaggccatttttacggtgtatagtcccacctggactgtcctgaacttcacagtgtaaaatgacagaaggaatgaaaatgacattaaaagatttgttccaaaataacacatcgtgataaagtgaaatagaaaccattgctatttctatagccattaactttccatttcctgagaaatgcttttaatactctatgaggatatatacagaaacaacagtaataacatcatatgtaataactcaggtagctagagaattcacgatgaagttggtctcagaaatatacttctgtattcctattttaatgaacatataaatcatattttgccattatatttgtcggtaacttattcataacatttgaaatttgaatcagaaataatcttcaaacagtctgttttgtggcataagagaattgttatgaccactttaacgtttaagaaaggaaatttgaaactcacggtattcataaatttaaactgaaatcatcattgtcctaattccttagtgagaatgtgtttaagattttaattcatatgaagtggttagcacagttcctgggacttagtaaacagtcagtaaataatagttgtgttaatattatcatcatcactgttgtttctactaccatcaccgctgtgactgtcaccttttagccacttctttcttaaggatagtttaatttgatttccttttagttggaattgacaagttgttttcataatccattttgtccctctgaacgtcttgcatgagtaattttaaaaaattttctcccttttatatgaatagtc

SEQ ID NO: 688451 - DNA, 1181 bp, Homo sapiens
tgttaaccatttcattgcccttggcttctttcaaaattttacatttcatatatactgtaaaatattaaaattatttatctccttgattcattagaagcttagtacattttgagagcagaaaaaaacaaaaaacattttaagatggattaaagtcattatgaccatgagaaaaaaaatggttttttttccagtgttcattgtatgtaacctagagtattatagattacatttttctttggattcagtttatttaaacaaagtttattgtggcattgaagatattagaactaaatttttaagaaactgacaaattcatcatttcctgggcttcactggtcatttaggaatactgatttggaaaatatgccaagtggcccattaattatccacaaggccatttttacggtgtatagtcccacctggactgtcctgaacttcacagtgtaaaatgacagaaggaatgaaaatgacattaaaagatttgttccaaaataacacatcgtgataaagtgaaatagaaaccattgctatttctatagccattaactttccatttcctgagaaatgcttttaatactctatgaggatatatacagaaacaacagtaataacatcatatgtaataactcaggtagctagagaattcacgatgaagttggtctcagaaatatacttctgtattcctattttaatgaacatataaatcatattttgccattatatttgtcggtaacttattcataacatttgaaatttgaatcagaaataatcttcaaacagtytgttttgtggcataagagaattgttatgaccactttaacgtttaagaaaggaaatttgaaactcacggtattcataaatttaaactgaaatcatcattgtcctaattccttagtgagaatgtgtttaagattttaattcatatgaagtggttagcacagttcctgggacttagtaaacagtcagtaaataatagttgtgttaatattatcatcatcactgttgtttctactaccatcaccgctgtgactgtcaccttttagccacttctttcttaaggatagtttaatttgatttccttttagttggaattgacaagttgttttcataatccattttgtccctctgaacgtcttgcatgagtaattttaaaaaattttctcccttttatatgaatagtc

SEQ ID NO: 688452 - DNA, 1181 bp, Homo sapiens
tgttaaccatttcattgcccttggcttctttcaaaattttacatttcatatatactgtaaaatattaaaattatttatctccttgattcattagaagcttagtacattttgagagcagaaaaaaacaaaaaacattttaagatggattaaagtcattatgaccatgagaaaaaaaatggttttttttccagtgttcattgtatgtaacctagagtattatagattacatttttctttggattcagtttatttaaacaaagtttattgtggcattgaagatattagaactaaatttttaagaaactgacaaattcatcatttcctgggcttcactggtcatttaggaatactgatttggaaaatatgccaagtggcccattaattatccacaaggccatttttacggtgtatagtcccacctggactgtcctgaacttcacagtgtaaaatgacagaaggaatgaaaatgacattaaaagatttgttccaaaataacacatcgtgataaagtgaaatagaaaccattgctatttctatagccattaactttccatttcctgagaaatgcttttaatactctatgaggatatatacagaaacaacagtaataacatcatatgtaataactcaggtagctagagaattcacgatgaagttggtctcagaaatatacttctgtattcctattttaatgaacatataaatcatattttgccattatatttgtcggtaacttattcataacatttgaaatttgaatcagaaataatcttcaaacagtctgttttgtggcataagagaattgttatgaccactttaacgtttaagaaaggaaatttgaaactcacggtattcataaatttaaactgaaatcatcattgtcctaattccttagtgagaatgtgtttaagattttaattcatatgaagtggttagcacagttcctgggacttagtaaacagtcagtaaataatagttgtgttaatattatcatcatcactgttgtttctactrccatcaccgctgtgactgtcaccttttagccacttctttcttaaggatagtttaatttgatttccttttagttggaattgacaagttgttttcataatccattttgtccctctgaacgtcttgcatgagtaattttaaaaaattttctcccttttatatgaatagtc

SEQ ID NO: 688453 - DNA, 1485 bp, Homo sapiens
  misc_feature 616, 617, 618, 619, 620, 621, 622, 623, 624, 625, 626, 627,628, 629, 630, 631, 632, 633, 634, 635, 636, 637, 638, 639,640, 641, 642, 643, 644, 645, 646, 647, 648, 649, 650, 651,652, 653, 654, 655, 656, 657, 658, 659, 660, 661, 662: n = A,T,C or G
  misc_feature 663, 664, 665, 666, 667, 668, 669, 670, 671, 672, 673, 674,675, 676, 677, 678, 679, 680, 681, 682, 683, 684, 685, 686,687, 688, 689, 690, 691, 692, 693, 694, 695, 696, 697, 698,699, 700, 701, 702, 703, 704, 705, 706, 707, 708, 709: n = A,T,C or G
  misc_feature 710, 711, 712, 713, 714, 715: n = A,T,C or G
gaaactgtatcccttccttacaccttatacaaaaattaactcaagatggattaaagatttaaatgtaagacctaaaaccataaaaactctagaagaaaacctaggcaataccattcaggacataggcatggacaaagacttcatgactaaaacaccaaaagcaatggcaacaaaagccaaattgacaaatgggagctaattaaagagcttctgcacagcaaaagaaacttccacttattttttaattaaacatccttctctgtatggttaaagtaattcaagacagggttaagctcatttgtttcactgtgcttttggttttaggaaatgtgtttgtaaatttaattttgctttattactatgtaaacaaggtttgtcacagaagtctagtttctatccctgtccatgcaggaggacaggtccccagatggccttggtccactcagcccttcccctgcctctcctgcttgcagttgtgagaataactgtagaatgcactcagaatgcaacatcctaaggtaagaaactgtccagaaaaacccaggctcctcattcctcctatcactaagcaacgcttggctcagtgatcccagtcatgctgggatataaaacccannnnnnnnnnnnnnnnnnnnnnnnnnnnnnnnnnnnnnnnnnnnnnnnnnnnnnnnnnnnnnnnnnnnnnnnnnnnnnnnnnnnnnnnnnnnnnnnnnnncggggtttcaccgttttagccgggatggtctcgatctcctgacctcgtgatccgcccgcctcggcctcccaaatgctgggattacaggcgtgagccaccgcgcccggcccaaatcctgaaacttttaaatgcccacaacaaaggtttatttcttacttatgccacatgtttattgtgggtcaattatggctctattccatgttttcttcactgtaagatccagactgattgggcaggttctttctgaaactttcttggttgtcatggcagagagcatagaaaactaatccttgtcttttaaagcttttgcccaaaattgacacatgccacttccatttacatttcattgtctaaagcaggggttggcaaactttttctgtaaagtgccagagagttcatttttttttttttaggttccacatatggtctctgtcgcattttttttttttacaattctttttaaaaatgtaaaacctttcttagcatgctggctgtacaaaaaaacagaccacatgccacattcagtttgcctcctgtagtttgcttacttctgatcttaaaagcaagtcttatggccaagcctgggatcaacagtgagggtcagtgaataactgtaaacaatattccataccgtgaattgtaarattaatataatctgtatattcaccttatgatttgcatatcagtcagtagtttgtaaataaatttgtgcttttatagtacatgaatttgctctcttgggacattctcttttacatcttacttaaata

SEQ ID NO: 688454 - DNA, 658 bp, Homo sapiens
aaaagctttggctggctagcaatgaaattggcttaagaaacctatttggaaggcaaaattgtttattaagtctttcctttgcttttcatttcagctctagcaatcttaaccccctccaaggtaatggtacttacargggaatggggggaagtttatgcccatgtatttgtgcacaagaaaagcatactaatttatttaaaaatgttatgtatctaaaattgcacttctgctgctcctattcattgaattcatcttttcatgctctaagcattcctcttaaatgccccaaaaatgacaatgacaacaacaaagagaagtctttcaactttttaaccaataaagacattaacctattcatttcctttcctacattccaaacatttgaaaatagaagtctacttattggctacagtcttcagtcctcttatgttcttctgcatggcactagaagactttttttaatcttgccacagatattttaaaccatcgcagacataatatgcataacaattctctgaaatttttaaccaccatttttgctaagaaacatccacattcaaattcgtccatactgaaatgttccctgctatgcgaagtgtttctccttctagtcaaggttaattttgacacttattctaagactcccatgaccaatatt

SEQ ID NO: 688455 - DNA, 617 bp, Homo sapiens
gtgacatttaaaagtaatgtgggttatactggcatgtgtttaagatcataagtttctatgggacatatgaacaaataaaaaatgaaagaaggaaggcaagaaggggaaaagaaacaagaaaatgaaaacatgactacatcaatacttmtttttctggaatgaggcccacataaggttttctctttaatagtggcagaagatgataaataaaagatcttttttttttttttttttttttgggcaagtgatctctaaatgtaaaaagtctgagattcacttatacatactcgaactattcaccttttttttggagggggggaccctcacctatacaaaaatgtggtggggggggtctgagtcctctccctttttgaacattccaggattttcattcctgtgtcatgctttgtcatggagggggcagaagggaggagaacatatgattggcacaagtcgctgttactcttatccttgtagctcttgttatacagctctttatcttgtcatggggttaattgttttaacattttgatctctacacatcttcactgataatcatggacaatatgagaaactacaactaaaacatgtgttaaatcagccatcaatatttcaaa

SEQ ID NO: 688456 - DNA, 661 bp, Homo sapiens
ttgagacagactttctgaatgtaaagacaagccaaccgtgaccaaggaagtcattgtgcaaatgtccagatcagaaaagtactctaaaatgttgtgtggaacacatatcccttgtaatgtcatygcttcttcagttaggttcacaaccttgtgttttttcatttgtttgttttagtcatggaatagatcaatgaatcttctatgttaaaagcatcttccatgttcaaggaagtttttcctatttttttcaacttatattactttatattttgggctatttttgcctttatgaacaataacagcaccaatgactatgattagacatgattgggtgcatgtgtatatgtctattttggtagctgtctgcatttttttgcattaatttttacttaaaactaggattctattttgtaccgtgtacttttaattcatggatttatattataagttgatttaatgaaagggaataattaaagcccacagtataataaaatctcagatctactcctgtatattttactaacctgaagggttagagcatgaattaccaagataatcacctctactatccactgcatatgcctaaacaatttaaagtttaagcattattttactttcacatttttgctcctcttttcttatataaacaaatatgtctttc

SEQ ID NO: 688457 - DNA, 661 bp, Homo sapiens
ttgagacagactttctgaatgtaaagacaagccaaccgtgaccaaggaagtcattgtgcaaatgtccagatcagaaaagtactctaaaatgttgtgtggaacacatatcccttgtaatgtcattgcttcttcagttaggttcacaacyttgtgttttttcatttgtttgttttagtcatggaatagatcaatgaatcttctatgttaaaagcatcttccatgttcaaggaagtttttcctatttttttcaacttatattactttatattttgggctatttttgcctttatgaacaataacagcaccaatgactatgattagacatgattgggtgcatgtgtatatgtctattttggtagctgtctgcatttttttgcattaatttttacttaaaactaggattctattttgtaccgtgtacttttaattcatggatttatattataagttgatttaatgaaagggaataattaaagcccacagtataataaaatctcagatctactcctgtatattttactaacctgaagggttagagcatgaattaccaagataatcacctctactatccactgcatatgcctaaacaatttaaagtttaagcattattttactttcacatttttgctcctcttttcttatataaacaaatatgtctttc

SEQ ID NO: 688458 - DNA, 661 bp, Homo sapiens
ttgagacagactttctgaatgtaaagacaagccaaccgtgaccaaggaagtcattgtgcaaatgtccagatcagaaaagtactctaaaatgttgtgtggaacacatatcccttgtaatgtcattgcttcttcagttaggttcacaaccttgtgttttttcatttgtttgttttagtcatggaatagatcaatgaatcttctatgttaaaagcatcttccatgttcaaggaagtttttcstatttttttcaacttatattactttatattttgggctatttttgcctttatgaacaataacagcaccaatgactatgattagacatgattgggtgcatgtgtatatgtctattttggtagctgtctgcatttttttgcattaatttttacttaaaactaggattctattttgtaccgtgtacttttaattcatggatttatattataagttgatttaatgaaagggaataattaaagcccacagtataataaaatctcagatctactcctgtatattttactaacctgaagggttagagcatgaattaccaagataatcacctctactatccactgcatatgcctaaacaatttaaagtttaagcattattttactttcacatttttgctcctcttttcttatataaacaaatatgtctttc

SEQ ID NO: 688459 - DNA, 1073 bp, Homo sapiens
gtggaaagagagggagagggagaccatggggagagggagagggagagggagagggatctagtaggttttaaaactgagatgtgaacccagacagtctgcactatgcggctttaagtatcattctttttgctggcaattcaccagtaagaatagatgtcattaaacagacataaattaataatgttttctaggactatacttactgtcagtgaacttgcagaaaattatccttgacccctaaaattctttgaaataccatagtagtaattgaatttgtttccttgttctgtggtaatttctattgcgtggtccccttttaatgcttaatatttgatcagaattttacagcttggaaaatctcctcctattcattatatcatttagaatwacagactcttataacataaaagaacttaggggacaaccccaaaatattaaccaaaaagaaccgaatattagagagggtacctgaccaacacaaagttcttgcttggttggagtggctgaaccaggctcaaacccagatcttccaaggttattcccctagtgatgaaaaaatttcagcataataaatgcatctaagtgtgtgtgtgtgtgtgtgtgtgtgtgtgtgtgcatgtatgtatactgactgttcttcaaaaataatattggagaggcatgacctaggtagctggtttgcagatctcctagttaagactgtacttgccatttacaaatgctcaatggatggagcattcctggatggatatcctagtttatttaatagcaaataatcaaatgaaaagttgattaattgttccaatatttgaaagtttctaggtgtacctatttatctaactatttaaaataattaactctttttttttacagataaatcttaggttaatatgagacttgcttattcactaatctgttgcttacacttcaataaatggggatgagttctttatatgatggaagaaatcctatctgatgagatcaccaaaacacaattatattttcttttttaaaccaagtatattgggtgctctaactcacagggcaaagtgctttcaggaagatgtttcagg

SEQ ID NO: 688460 - DNA, 1352 bp, Homo sapiens
tgttaacaaatgtgtgttgagatggatgctctcatggctagtagttgtgtaaatcaatacaatttatgtaaaaaacaagttggtcttatctttcaagagccgtagtaaatctcatgtttttaatcaaagtatttttgactcttggagacagattgtgcaaagatttctatttgtgcacattaattgcagaattatttgaatagacaaacaatgtagataaaataaaatggttacataagttattttgccatatactaaaatagtgtgagaatataataatttcttgaagaatctttattgatataaggcaaatgaaaaataacaatatatgttagtgttacaaaagagattattacatggtttaataaatagcatagtccaatttttgattwggaagtgtatagaaaatatttaaaaataaatatgactacatgttaatggtatttgtgtttcggtggtggtacagataatatttcatgcccatttttgtgtattttctaagtttttcattaaatattgatgactcataataaaaataaattttaaaaagaaagagcaaggagagaaatgccaaacaaatgtgtggaataggatgctttgaaaaatacattttctgaagttttttttgttttttgctatgaaagaaataatatctgtaaaaaaagttaatctattgtcttcctcccgaaaactgagtatgactgaaaaattggaatatcagccaaataaattgagagatttttctattgtattaataaatattagtatttgtataaattaggaaatattttcatagtcattatcttatttaacttttgcaactattttctgaagatgacaacgttatccccaatttacatatggggaaactaagagtcagaaaaagttccttgtccaaggacacatggatgaaatcctgagctctttccagcactccacctgcattgtttatgcatactgatacttcaaagtacaatctggggcctccttctccttgagtttttattaggatcttggtatccctatggtattgccattgtgtcaacctaagctagatatagaaacattttattcctggcagtaacatgttacaaaaaagcgaacttaatgaaataaaattatagttaccaagaaaaattaataataattttgttttcattaggttactaaaggcactaaaataaacctgtcattacagatttgcacctatgatcttgatgtctccacatgctgcaagtcacattggacagtttgtagttttgtgactgaatctaacattaagtttattagggactttggtctacatgtaaaactcacctggatgttaatggaagagcctctgggtattgaaa

SEQ ID NO: 688461 - DNA, 650 bp, Homo sapiens
attaacagtcctctccttcctgaagaaaacattaacaagaactctgaactctatacagaaggcatatgagtgtgtttgtgtatatgcatagtggactccagaatattactctagtcatctttttgcttactttgaatatgtaaaaatattttcatttaaaaagtaaaacaaattattataccagtgtaaaatatgcactatttttaaaaattaatttacttattttagttgacaaaaattatatatatttatcatgaacaacataatgttttgaaatatgtatatattgtgaaatgggtaaattgaggtcattaacatatgtactaccacacatacttttytgtgatgagtacacataaaatctactctttttagcaatttttgagaaaattgactataatcaccatgttgtataatggatctcttgaacttattccttctctctaactgaaattttgtatcctttgaccaacatttacccaactttcccccttggcccatggtattttttgaagctggtatagcatatcaaataatgagacttatggtcaccaactgattactatgactttgttttttaaaatagaagcagatagaaatttttctaaatatagaagattattttaaaaattagtccctcaggccaggca

SEQ ID NO: 688462 - DNA, 780 bp, Homo sapiens
  misc_feature 680, 681, 682, 683, 684, 685, 686, 687, 688, 689, 690, 691,692, 693, 694, 695, 696, 697, 698, 699, 700, 701, 702, 703,704, 705, 706, 707, 708, 709, 710, 711, 712, 713, 714, 715,716, 717, 718, 719, 720, 721, 722, 723, 724, 725, 726: n = A,T,C or G
  misc_feature 727, 728, 729, 730, 731, 732, 733, 734, 735, 736, 737, 738,739, 740, 741, 742, 743, 744, 745, 746, 747, 748, 749, 750,751, 752, 753, 754, 755, 756, 757, 758, 759, 760, 761, 762,763, 764, 765, 766, 767, 768, 769, 770, 771, 772, 773: n = A,T,C or G
  misc_feature 774, 775, 776, 777, 778, 779: n = A,T,C or G
tttggactgtagttcacactggctgcgcttccttatggaaacagtgactacaagatggaggatattaatgaaagatagcacacatctatactaaatgtcataacagcaaaaaccataagatagttactgacaatgagtcatgcaattccgagggaaaaactagtatgctacattcctccatgctacattctttcaaataagaatgaaagaatcaagaatgggccttraagaatgaagatgaggagaaataatgggtgtgtggaccacgcaatggagtgggaattcctagataaggaaaggtatatggtctgtttaattaagggactctaaaatacttgttaaaaaaaacaaaaaaaacagcaagtagtgctttccagtaacaaagtctactgcaaatttctttctgtacatgggaaataaggactgtgggattctttgggtggatcccagcacctagagttggatctgatcaaaaagaagtgctcagtaaacatttacctactgctttggttgccttccccctgtggagtgctggcctccaggattgagcttgcatcataggtgttcagtaggaacttgcttagtggatttacaggttgaggttagaacccatcaggattcttttcctggaaagacaggcatgtgttcttcccttccctctaagttttcacatagacacnnnnnnnnnnnnnnnnnnnnnnnnnnnnnnnnnnnnnnnnnnnnnnnnnnnnnnnnnnnnnnnnnnnnnnnnnnnnnnnnnnnnnnnnnnnnnnnnnnnng

SEQ ID NO: 688463 - DNA, 780 bp, Homo sapiens
  misc_feature 680, 681, 682, 683, 684, 685, 686, 687, 688, 689, 690, 691,692, 693, 694, 695, 696, 697, 698, 699, 700, 701, 702, 703,704, 705, 706, 707, 708, 709, 710, 711, 712, 713, 714, 715,716, 717, 718, 719, 720, 721, 722, 723, 724, 725, 726: n = A,T,C or G
  misc_feature 727, 728, 729, 730, 731, 732, 733, 734, 735, 736, 737, 738,739, 740, 741, 742, 743, 744, 745, 746, 747, 748, 749, 750,751, 752, 753, 754, 755, 756, 757, 758, 759, 760, 761, 762,763, 764, 765, 766, 767, 768, 769, 770, 771, 772, 773: n = A,T,C or G
  misc_feature 774, 775, 776, 777, 778, 779: n = A,T,C or G
tttggactgtagttcacactggctgcgcttccttatggaaacagtgactacaagatggaggatattaatgaaagatagcacacatctatactaaatgtcataacagcaaaaaccataagatagttactgacaatgagtcatgcaattccgagggaaaaactagtatgctacattcctccatgctacattctttcaaataagaatgaaagaatcaagaatgggccttgaagaatgaagatgaggagaaataatgrgtgtgtggaccacgcaatggagtgggaattcctagataaggaaaggtatatggtctgtttaattaagggactctaaaatacttgttaaaaaaaacaaaaaaaacagcaagtagtgctttccagtaacaaagtctactgcaaatttctttctgtacatgggaaataaggactgtgggattctttgggtggatcccagcacctagagttggatctgatcaaaaagaagtgctcagtaaacatttacctactgctttggttgccttccccctgtggagtgctggcctccaggattgagcttgcatcataggtgttcagtaggaacttgcttagtggatttacaggttgaggttagaacccatcaggattcttttcctggaaagacaggcatgtgttcttcccttccctctaagttttcacatagacacnnnnnnnnnnnnnnnnnnnnnnnnnnnnnnnnnnnnnnnnnnnnnnnnnnnnnnnnnnnnnnnnnnnnnnnnnnnnnnnnnnnnnnnnnnnnnnnnnnnng

SEQ ID NO: 688464 - DNA, 1316 bp, Homo sapiens
gattggtcctgcaaaggaaaaactattaggagagttttgatctaggatagctactccctagcttcttaagttcatttcactgccagcaaaaggctgccatgttactatcaacactctagtcccatcctagacaagcataaaaatatcaaccaaggcaaagtcaatatactcctttcccccaacagtaacacatgccacaccttctatcataaggttaccgtcctttcctttattggatttctgaattttttaaaaagtaaaagtaaagcaatcattaagtagttcagataaaagaaaagcatctttacctgagttacccatcaggtctactctgacccgccctagcttctcccagaacaagcttctgggtatctaaaaaactattttcatactgatttcatgtaaagtcctctctaccatatgagtcaactaactatgagaacagtcttctcatacatattatatgtacatagattctcacccacaattaaatctctcactgcagaacaggttttttggggcctgataagacaggagcttctaccaaaggttttctcagactcaaggtaagtatgggttttttcacctatgtgagttccctgatgtaccacaagagttgatcattgacaagcactcttcattcagacacttgcagtctttcctcagattgggttttttttttttgggtgcaaacccaagtaaggctctccaatgaatgcttttgccatacttaagacaaatatacaatttttcaccagtatggcttctctgatgggtaagtcagagttttgttagaagcttttttcacacttgctggggcttctccccagggtgggttttctgaggtccaatgagatgttcatactgtctgcagcacaactgacactgaaggcatttaaaaagttgttctccggtgtgaattctcttacaacgagaagggctgagcattagtagaaagctctctcacactcagtgcatttctaaggtttcccacttgtatgaatcctcttgtgagtgatcaaayttgagctcagacggtaagttttcaaaacctctgggcatctgtagatttctcgttggagtgaggatgaagtgttctgttagggcagctctctgggcaaagaatttctcatatttccaattgcaggctctctggtccccactgaattctgagctctgagcaaagtctgagatttgtcctcatcttaatgagttctctgatacataaataatttttaatattggtattacagcttctcgcctggtcaagacatctgtgaggcttctgacgcatggggagggctaagctcaagacc

SEQ ID NO: 688465 - DNA, 662 bp, Homo sapiens
gagatcacatggacacaggaaggggaatatcacactctggggactgtggtggggtggggggaggggggagggatagcattgggagatatacctaatgctagatgacgagttagtgggtgcagcgcaccagcatggcacatgtatacatatgtaaccaacctgcacaatgtgcacatgtaccctaaaacttaaagtataataaaaaaaaaaagaaaaaaaaagaaatgyatatgtactcagtaatctacacagacttttaatgcttgtttcacagtaacaaacgtgtgcagtgatacagacagtcacaagagaacacgaaagtaaatgtatttgtacccagtaatcttgatgggacatagttcgctgaatcgtagggttgcgtttccagtttagtgttcctgcaagagcagatgatgaggagaggtgagattccagaaagaaattgaaatccgggaggaacgtgaaaaacaggcgaaaacacggaaataaggacctgggcttttcatccttttatgatttccaaagtgtacaaatctttctctgtcgtgactaactcctgatatgggctttcctaactgcatctgcttacttcccgcagacctgtccttggcttgtgcagggtaagtaaagcctctcaagaactcccatttttcatttctatt

SEQ ID NO: 688466 - DNA, 662 bp, Homo sapiens
gagatcacatggacacaggaaggggaatatcacactctggggactgtggtggggtggggggaggggggagggatagcattgggagatatacctaatgctagatgacgagttagtgggtgcagcgcaccagcatggcacatgtatacatatgtaaccaacctgcacaatgtgcacatgtaccctaaaacttaaagtataataaaaaaaaaaagaaaaaaaaagaaatgcatatgtactcagtaatctacacagacttttaatgcttgtttcacagtaacaaacgtgtgcagtgatacagacagtcacaagagaacaygaaagtaaatgtatttgtacccagtaatcttgatgggacatagttcgctgaatcgtagggttgcgtttccagtttagtgttcctgcaagagcagatgatgaggagaggtgagattccagaaagaaattgaaatccgggaggaacgtgaaaaacaggcgaaaacacggaaataaggacctgggcttttcatccttttatgatttccaaagtgtacaaatctttctctgtcgtgactaactcctgatatgggctttcctaactgcatctgcttacttcccgcagacctgtccttggcttgtgcagggtaagtaaagcctctcaagaactcccatttttcatttctatt

SEQ ID NO: 688467 - DNA, 662 bp, Homo sapiens
gagatcacatggacacaggaaggggaatatcacactctggggactgtggtggggtggggggaggggggagggatagcattgggagatatacctaatgctagatgacgagttagtgggtgcagcgcaccagcatggcacatgtatacatatgtaaccaacctgcacaatgtgcacatgtaccctaaaacttaaagtataataaaaaaaaaaagaaaaaaaaagaaatgcatatgtactcagtaatctacacagacttttaatgcttgtttcacagtaacaaacgtgtgcagtgatacagacagtcacaagagaacacgaaagtaaatgtatttgtacccagtaatcttgatgggacatagttcgctgaatcgtagggttgcgtttccagtttagtgttcctgcaagagcagatgatgargagaggtgagattccagaaagaaattgaaatccgggaggaacgtgaaaaacaggcgaaaacacggaaataaggacctgggcttttcatccttttatgatttccaaagtgtacaaatctttctctgtcgtgactaactcctgatatgggctttcctaactgcatctgcttacttcccgcagacctgtccttggcttgtgcagggtaagtaaagcctctcaagaactcccatttttcatttctatt

SEQ ID NO: 688468 - DNA, 662 bp, Homo sapiens
gagatcacatggacacaggaaggggaatatcacactctggggactgtggtggggtggggggaggggggagggatagcattgggagatatacctaatgctagatgacgagttagtgggtgcagcgcaccagcatggcacatgtatacatatgtaaccaacctgcacaatgtgcacatgtaccctaaaacttaaagtataataaaaaaaaaaagaaaaaaaaagaaatgcatatgtactcagtaatctacacagacttttaatgcttgtttcacagtaacaaacgtgtgcagtgatacagacagtcacaagagaacacgaaagtaaatgtatttgtacccagtaatcttgatgggacatagttcgctgaatcgtagggttgcgtttccagtttagtgttcctgcaagagcagatgatgaggagagstgagattccagaaagaaattgaaatccgggaggaacgtgaaaaacaggcgaaaacacggaaataaggacctgggcttttcatccttttatgatttccaaagtgtacaaatctttctctgtcgtgactaactcctgatatgggctttcctaactgcatctgcttacttcccgcagacctgtccttggcttgtgcagggtaagtaaagcctctcaagaactcccatttttcatttctatt

SEQ ID NO: 688469 - DNA, 611 bp, Homo sapiens
tggagatctcacatatgtgacaaagaaagtgattacagatattttaggtacctcatgccatttgagtcacagaataattaacaaataaacgactgaattccttttctactgtaactgtttgctggaaatattatataatgatgtgcctctgtgcatatttactcagctttgcattcagtgatgtcacgctggtaacttgaaatcatggtggaagcatttatgcctcagmaattagaaaatactatggatcacgtcttttccccctgagagtcagttatgaaattttaccagcacccccctgatccagccttgtcaaaattcccttttctagagtgtcttctcttttcatttctcccagctataggtgcttggctccatcttcttgccccatagattctcttttcattaacctcaaatcttaattctcttatcacttgtcactttgcaaggagggctactctgacactcaggttgacttaagaccaccaattaaatctcatagcaccaggtattcaatacaaataataattgcaattaaatatttctatgcaaattcactttaatagcattcaagaaatgttattgagaatctcttttgtgccacacgctgt

SEQ ID NO: 688470 - DNA, 611 bp, Homo sapiens
tggagatctcacatatgtgacaaagaaagtgattacagatattttaggtacctcatgccatttgagtcacagaataattaacaaataaacgactgaattccttttctactgtaactgtttgctggaaatattatataatgatgtgcctctgtgcatatttactcagctttgcattcagtgatgtcacgctggtaacttgaaatcatggtggaagcatttatgcctcagaaattagaaaatactatggatcacgtcttttccccctgagagtcagttatgaaattttaccagcacccccctgatccagccttgtcaaaattcccttttctagagtgtcttctcttttcatttctcccagctataggtgcttggctccatcttcttgccccatagaytctcttttcattaacctcaaatcttaattctcttatcacttgtcactttgcaaggagggctactctgacactcaggttgacttaagaccaccaattaaatctcatagcaccaggtattcaatacaaataataattgcaattaaatatttctatgcaaattcactttaatagcattcaagaaatgttattgagaatctcttttgtgccacacgctgt

SEQ ID NO: 688471 - DNA, 675 bp, Homo sapiens
cctaaatattaacatcaatttagtcattagtattttgtacaagttatatcttccatgtatacataaaattaatgtgattattaaaataaatatgattattaaaactaaagggtttcaccaatgtactatgaagaattctttcatgtatcactgagaaaataaaagggttttaggaaatgtaacgagtaattatggattgttttagttttaggacacgtgatgttaaaatgatccatcatcacttctgtgtagctgattagaaagacataagatgattccttttaaatgaaacacacttaccattttagtgagttcaaggaaatacaatagaatgtaagattatattactgkgactcagaaaccaacgaagcacgtccgcgcgtgatgtttttcacattaagaaagcaaacgacattaatgaggtcaatagagcacaaaatagaaaagctcattaaatctacatgtcatttcatagctaacaaagttttactgggttatatatttaaatatctacagacatgaagagtatattgtacaagataagttgacaattcatgggggtgtgactatttttctttcttacacacctacataaacacagtcaataaggtatctccattcagcacgtggaattgaagaaaaaaaattatagcacactcagtgtctccagaatta

SEQ ID NO: 688472 - DNA, 727 bp, Homo sapiens
ttttctccaacatgtctttcatgattttgcagaggttctcaaactttgtttttttctcttcctgtttctttttttcttcttcatcttctggaagttccaaaccctctttggcaactgacactacagtcttactctcaagttccttcagctgctggacacagtacttatcaatcaactcgatcatatagatcacttctaagccatgcttctgaagacattccacaaaggctgagttagctacttggtccttggtctcacctgtaatgtaatagatatgtttctggtttgccttcattctggaaaacacaatgagataaaccatctcatcacgagaggcagatgtgcactatttcaacagctctgaaagcttcttctgattttgaragtctatatattcaaagatttatgttttcagataacttctcgtggaactttttgtagttctttttatcctctgccagttcagcaaagagttctaagtatgttttgaccaaattcttcctaataactttcaaaattttgctttgttgcaacatctcagaaaaaatatttagagggagatcctctgagtccatcacccctctaatgaagttcaggtattcagggattagctcctcacagttacccatgatgaaaactctgtgtacatacaactgaatgttgttctttttctttctgttttcaaataggtcaaaaggagcacatcttgaaacaaaaagagctcttc

SEQ ID NO: 688473 - DNA, 2815 bp, Homo sapiens
tggagcatgtgggctctttgtgcctaatgtctagcttggggcttaggccacaatgctaggactaaaggaaaagtcatcttcaacttcctgtcacccataggcagagggactccatgtcatggtttgcctgggacagtcccttttactccagctgtctggacttcattattcacattgctccctttcattcttaaagtcaccatggtttggagtaggtggagtggtcattcacacgtttgtggtaagattggaagaatctcttgcttacctagtgcctgaaatcccactattgttttgggttaagcattgcaataggatcttgcttaaaatgcagagtcgtgtgattgattgtgtgtatgtgcactcacttgtgtgggtgtggggggaatgggtgaataccatgagtcctagtttgaattggtttttcagattgcattcctgaatagtggggaggacctggacaaagttaaacccacgaagtggggagggggatccatgggaggaagacgtttggcctctctcagccccacgaggtcccagagggagagttcccagactaggctggcctcggacccaaagcagacagatgaaccttgtgacttttggccctgggcaggcgcctaagcttggctgtgaacttggttttactctgatggtgagaaaagcccaggtaatatgtgagcccctcataagagccagtattgctccctgatactctcctggcaaaccctcatccttcccacagtcccttccaagcaagaggaggagcaccaagacaggaaaggcacctgaggagggatcaagtcccagatcccaaagggacccctccaggccttgaacaatttgctcatcacactgatcgagccctcctgggttccagtgctgcctcctctcctcccgagtgtccttgggtgaggtacctttttgagcctcagtttcctcatctgtagaatgggggtaaatagtaaccattggggagtgtcccaactgagaccaatgccccctcatataaggatacttccaggagggctgatttacaaaggagcctggtgtgggggaagagtagggaaggtgcagtctcccacagtagccatgtttctaggccaggaggggacagcaggagggagcagatactagaaatgggaggatgggtcccatacggaaggctgctgtgagacgatcagtgacttctggtggagggacaggtccagcagaagtcagggaaggtaccagggggataagtaccccagcctcaaccttctccctccctccactttcctgccagggctgttcaactggtccaaccaacaggatgccagaggcaagaaggcacgttaacatagcgctcgccagtcagacttctgggcacaaagcagggtggagaagggcagagcatggacctgaagggcagcagaagcccacccrcatgtgatcctgtagctgatggctgagcattagcccactagagcctcgcaatagccccattcctcattcaggggctggcacataaaagtctcattaaatagtcaccaaatgaatgaatgaatgcatacctcctacctgctaacagaagtgcctgtgccagctccttactatactgtgaaccccaagagagaggtgttggggccaagagcagcctgaatctaccctgtggctggccatgaggaaggtattggacggaactgatgaacttgctttgtgtggagtgtggatgccaaatggccttgcaatgtgaatccttgggaccccacaggccaccaagaacacagaaaacttatgttcaagttccctttctctgttgatgtgaaggctatattagtccattttcatgctgcaatgaagaaatacccgagactgggtaatttataaagaaaaagaggtttaatggactcacagttccacatggctggggggtcctcacaatcatggtggaaagtgaaggaagagcaaaggcacatcttacatggcgacaggcaagagagcgtgtgcaggggaactgccctttataaaaccatcacatctcatgagacttattcactatcttgagaacagcagaggaaaaagccacccccatgattcagttacctcccaccatgtccctcccatgacatgtggagattatgggagctaagattcaagacgaatttgggtggggacacagctaaaccatatcagagacagaatggaagcttcttggtgtgggaattccagaaggcacaggcaaagctggtttgtgtggcgttttcaggggagcctagattctacaatttccttgcagtgctagtggggaatggcacagaaaacccactgcagtccagctttccttctcttctttattactcttagagtaagcttatagaggtcatataactttattgtaaagaaaaccaaatcagcaatcacaaataagcagaaaagaaacaataaaaaatgatcactgtcatataattgattaatattttggtgcatatctttctagattcttttctactctggctttctttttatcaggatcctgttgtttccaaccaaagccaaaatagctaacatgctggctgagcacggtggctcacatctgtaatcccagcactttgggaggcctaggaggcgggtggatcatttgagattaggggttcaagaccagcctggccaacatggtgaaaccctgtctctactaaagatacaaaaattagccaggtggtagtggcatgtgcctgtaatcccagctactcgggaggctgaggcaggagaatagcttgattggaggtggaggttgcagtgagccgagattgcaccactgcactccagtctgggc

SEQ ID NO: 688474 - DNA, 2815 bp, Homo sapiens
tggagcatgtgggctctttgtgcctaatgtctagcttggggcttaggccacaatgctaggactaaaggaaaagtcatcttcaacttcctgtcacccataggcagagggactccatgtcatggtttgcctgggacagtcccttttactccagctgtctggacttcattattcacattgctccctttcattcttaaagtcaccatggtttggagtaggtggagtggtcattcacacgtttgtggtaagattggaagaatctcttgcttacctagtgcctgaaatcccactattgttttgggttaagcattgcaataggatcttgcttaaaatgcagagtcgtgtgattgattgtgtgtatgtgcactcacttgtgtgggtgtggggggaatgggtgaataccatgagtcctagtttgaattggtttttcagattgcattcctgaatagtggggaggacctggacaaagttaaacccacgaagtggggagggggatccatgggaggaagacgtttggcctctctcagccccacgaggtcccagagggagagttcccagactaggctggcctcggacccaaagcagacagatgaaccttgtgacttttggccctgggcaggcgcctaagcttggctgtgaacttggttttactctgatggtgagaaaagcccaggtaatatgtgagcccctcataagagccagtattgctccctgatactctcctggcaaaccctcatccttcccacagtcccttccaagcaagaggaggagcaccaagacaggaaaggcacctgaggagggatcaagtcccagatcccaaagggacccctccaggccttgaacaatttgctcatcacactgatcgagccctcctgggttccagtgctgcctcctctcctcccgagtgtccttgggtgaggtacctttttgagcctcagtttcctcatctgtagaatgggggtaaatagtaaccattggggagtgtcccaactgagaccaatgccccctcatataaggatacttccaggagggctgatttacaaaggagcctggtgtgggggaagagtagggaaggtgcagtctcccacagtagccatgtttctaggccaggaggggacagcaggagggagcagatactagaaatgggaggatgggtcccatacggaaggctgctgtgagacgatcagtgacttctggtggagggacaggtccagcagaagtcagggaaggtaccagggggataagtaccccagcctcaaccttctccctccctccactttcctgccagggctgttcaactggtccaaccaacaggatgccagaggcaagaaggcacgttaacatagcgctcgccagtcagacttctgggcacaaagcagggtggagaagggcagagcatggacctgaagggcagcagaagcccacccacatgtgatcctgtagctgatggctgagcattagcccactagagcctcgcaatagccccattcctcattcaggggctggcacataaaagtctcattaaatagtcaccaaatgaatgaatgaatgcatacctcctacctgctaacagaagtgcctgtgccagctccttactatactgtgaaccccaagagagaggtgttggggccaagagcagcctgaatctaccctgtggctggccatgaggaaggtattggacggaactgatgaacttgctttgtgtggagtgtggatgccaaatggccttgcaatgtgaatccttgggaccccacaggccaccaagaacacagaaaacttatgttcaagttccctttctctgttgatgtgaaggctatattagtccattttcatgctgcaatgaagaaatacccgagactgggtaatttataaagaaaaagaggtttaatggactcacagttccacatggctggggggtcctcacaatcatggtggaargtgaaggaagagcaaaggcacatcttacatggcgacaggcaagagagcgtgtgcaggggaactgccctttataaaaccatcacatctcatgagacttattcactatcttgagaacagcagaggaaaaagccacccccatgattcagttacctcccaccatgtccctcccatgacatgtggagattatgggagctaagattcaagacgaatttgggtggggacacagctaaaccatatcagagacagaatggaagcttcttggtgtgggaattccagaaggcacaggcaaagctggtttgtgtggcgttttcaggggagcctagattctacaatttccttgcagtgctagtggggaatggcacagaaaacccactgcagtccagctttccttctcttctttattactcttagagtaagcttatagaggtcatataactttattgtaaagaaaaccaaatcagcaatcacaaataagcagaaaagaaacaataaaaaatgatcactgtcatataattgattaatattttggtgcatatctttctagattcttttctactctggctttctttttatcaggatcctgttgtttccaaccaaagccaaaatagctaacatgctggctgagcacggtggctcacatctgtaatcccagcactttgggaggcctaggaggcgggtggatcatttgagattaggggttcaagaccagcctggccaacatggtgaaaccctgtctctactaaagatacaaaaattagccaggtggtagtggcatgtgcctgtaatcccagctactcgggaggctgaggcaggagaatagcttgattggaggtggaggttgcagtgagccgagattgcaccactgcactccagtctgggc

SEQ ID NO: 688475 - DNA, 660 bp, Homo sapiens
caatctgcttgctccttgaagtggcatgaaaacaaaaatccaaggaaagcgctcagtgaggggatttccctggtgacctgtggctaatggcctttgcctacctcttgctctggagaggccctccgaagcctgaatgggggtgggaagtggcttccagggaagaagggcctttctgaggtggctgtgctcayaggacgcagcctttgagaatcaggatcagaagatgtaagtagcccccataactggcacattggtagtggatgctctgggaggatgatgctttccctgtggctttttgcactttggaaagtggaaagagattagtgcaggagtcagcaaaccagggcactgaggccatatccatcccactgcctgtttttgtatagcctgcaaactgaggatcttttaatttcttttttttttttttgaaacggagtctcactctgtcacccaggctggagtgcagtggcacaatctcggctcactacaacctctgcctcctgggttcaagcaattctcttgcctcagcctcccaagtagctgggattacaggtgcctgccaccattcctgcctagttttcttgtaattttagtatagatggggtttcaccatgttggccaggctggtttcaaactcctgacctcaagtgatccatctgt

SEQ ID NO: 688476 - DNA, 937 bp, Homo sapiens
ggccaatcagagtaccctgttcttctggccacagtgattggttcaacaataagcaggtgtctcragcctagtcaatcaaagtcctcttggggctttggccagagctactagaaatgatactttttctgagttggtaagctggaaggaagccatttttcagaggatgattatctttgtatctatgtgaggaaaacctttctggaaaagaaattgcatataccagaaagcagacatggaaggaagaagggaggaagagagagagagagagagagattgacacatttgacattgacaagaggctggatgaaggtgtgtgtactgctggtcatgaagtgtcttaattctaagagatgaaagggccattttcgtccactgaaataataggcattatttgtatgtatctgtagtggccagtgactgacttcccaggagaaatcggcatctccaggagagaaaagtagggacttcctagtaaagagttccccaagaaccaataacagtcacatggccctacagcagaggcattttaagatgtccgttggctctggttccttttagaagcctctcccacattatatatcaagtatccagtgtacctatatcatatgtttgttaatgtaaatacattttaaagaatttttaaacctggcacagtggcttatgcctgtaatctcagcactttgggaggctgaggcaggggatcacttgaggccaggaattcaagatcagcctgcacaacatagtgataccccatctctacacaaaataaaaaattatccaggtgtggtgacacatgtctgtagtcccagctactcgggaggctgtggtgggaggatcacttgaacccaggagttcagggctacagtgagttatgattgcatcactgtgccccagcctgggcaacagtgagaccctgtctctaaaaaaataaaattta

SEQ ID NO: 688477 - DNA, 738 bp, Homo sapiens
ctgtaatttaccagttcctttactaaaaccatcactttagtttttaaaggccctgtcctgctcattttaatacttcagtctatattgctgaaatgggggtgtagttaaaaaaaaaacccatgaaagaaagaaagaaaaaagaagaaaaaagaaagaaagaaagaaaaagagaaagagaaagaaaagaaaagaaaaagaacgcttcagtcttacattggatagaaagccttttcctgcacttgccctggggcacgcatgaactatgattcctggggtgaggaggggaagtgaggatgattctctcataccctttgccctctctcctccttttgttgactcctcgagggtgggggctggcaggaaggagaggaaatgcctcccacatctcttgcctggacctgctggtgaggctgtgggcctctctttggtggcttagagctttcrttgctccagggttctgtgggcttcatgtcgttggccttgcaaggggctcacttctcagcatctcccagggtgttgttggttccttcctagacctgcccacacctcctagctgaccccaccataatcctctctgtgaggatgtagggtctttgctcttctatcttccatggccaactttgggacctctgggtttgtatgaactccaactgtacacttctgaaaaactagggaactagactgagctagggactctctttctcatggactccattatgccatcccaccccaatttta

SEQ ID NO: 688478 - DNA, 611 bp, Homo sapiens
aagttagcatctaaataaatttcatataactgtacgattaccacatacatacatgtgtatatgtgtgtgtgctattgttttgcattattagatttcatattaatggcagcataccagtcatatcattttgcaacaatataaccaactaaagattagtatccagaatataaaartatctttaaatgaataataaatagataagcataccaacttttaaaaaggacaaagattacaggcaggcaattcaccaaatgaacaacagatatatgaaaacatgctcattctcactagtaattaaattaattaaaacagcaataaggcaccatttttcagtcctcagactggaaaaattaatgtctggattcaccaaacactgacataagtgtgaagaagtaaaaacccttggacatagctggttagaatgtaaattggtacacatattttggataaaaatatattttaatacatttaataacattttaataatgtttaatacacttgtgcatatcctagcaattttacttcaaaatatttacctttgagacacccttctatgcttgagacacttaagaaaaccatttttcttagcagagattgtaacaataaaaaag

SEQ ID NO: 688479 - DNA, 611 bp, Homo sapiens
aagttagcatctaaataaatttcatataactgtacgattaccacatacatacatgtgtatatgtgtgtgtgctattgttttgcattattagatttcatattaatggcagcataccagtcatatcattttgcaacaatataaccaactaaagattagtatccagaatataaaagtatctttaaatgaataataaatagataagcataccaacttttaaaaaggacaaagattacaggcaggcaattcaccaaatgaacaacagatatatgaaaacatgctcattctcactagtaattaaattaattaaaacagcaataaggcaccatttttcagtcctcagactggaaaaattaatgtctggattcaccaaacactgacataagtgtgaagaagtaaaaacccttggacatagctggttagaatgtaaattggtacacatattttggataaaaatatattttaatacatttartaacattttaataatgtttaatacacttgtgcatatcctagcaattttacttcaaaatatttacctttgagacacccttctatgcttgagacacttaagaaaaccatttttcttagcagagattgtaacaataaaaaag

SEQ ID NO: 688480 - DNA, 2751 bp, Homo sapiens
gttgttgctgttattactactattgagatgggaaatttgataacataagaagaagttaaaataatgcgtgcatcttataaattttaaaaccgatctactggccaataaacattaattaaagtcaaatatatacctgagtctcataacaaataaagtgttacacagaaagtgctgatgagttgtacaacagggaacacatttacagcttagagtctagtcaaaaggggttctttctgggagggagtggaatattacctctgattattacagcagagaaaaacgctgatattgccaaaggcgctagatacagaatcagattctcaattagaaagatggctactgtgccacacaaactgataacgtggttcttgggattaatacatcaaacaggagccctacaagttacgaagaatgtaggaaataaaaaatataaaaatcagtaaattaaaaactgattcttcaattgaattgtgaaaagattaagttcaattaaaaatatgaagtcttcacgcactaaggaggtcagagaaaacgttggtttctaaaaataagaaaaaagtgggccaaggatgaggatgagcaatgcctgaggaatctgagtagatgattcctgactcactctgggtagaggaggatctgaaagtggcatgagaacaacatgaattgaagtgataggcctattctaaaaaataattgttattattaacattgtattggttagtaaaatatgtacagtgaatgttgattatcaatgtgttcaagtatttttaaccagtatttctgtaatttccattaaacgccacattaaaaaaactgttctagtttttactacaccatggctagattatggaatgatgaattaactagactttacttttctgagtatgctgcagtgaaaattgtgttgcaaattcctatccttattgacaattcatcacaagatgtatcttaatctcaagagaactttcccactgtgtcttgaatgcttattcccattatcctctaagacacattcacacacacacacacacacacacacacacacacacacctgacaggcaccattctgtcacatcctcccattctgcagcagaaacaggctagctaaagacattatctttttatttttgtataatctaaaaaattcccttttatctacrccatgttcagtaatttagttacttaacaatatatttatatttttgaggtgactcaagaagtatcacagaaatcaatcaaggtaggaagagtgtggatttggcacccaaaataagtttgagtgatttcttatctacttgctgttaacatgcctttttcactgccatgagccacagcttgcttatttgaattaaaaaaaaccctataatatctggcttatagatgtgattaccattttgtaacacaacgcaaataaaacattgtgtaatgcggtagaaatccaacgatgtcttctataaatggtactcgtcaaatcctacatccatacgggcaaaattgaaccaggattcttatctcttaccaccttaattttaaatggaccatagacctaaatgtaataggtaaaccaataagccttctagaaaaaaattaaaatgtagaaaaatacttttatgctattggattcagaataccttgttaaggagatcataaaacaaaaaaaatctggactaattttcagctcaaactgtgctgtgactgcagtgcagcagaatacctttgaaaccgtccagacagtccctctgtctttctgatagtccttgggttggctgctagtagtctaaacctggagactgagattgccttcagattcatgttgatttgggggtaagtaaactagacgctttgatctctaaatcagttattggatacagtccactccctgggaaaaggctgattttacctaattttcagagatcaaggtggggaagagctcttgtggccctatattatagtatgaagattttctcttaataccctctttcagccccatgccagtgccattaattggtcctattcttatgaggattcttgtcccaaagattcagtggtgtactatcactaggaaacaagcctctcctctcctgcatggctatgcatttggtataataagaaacttatttctgaacttgagaataaaaaagaaatagaatactaaatgtcagggaaattctctaaatcactccatagtcaaatgcaaatattttaaaagacatttcaagttatgaaaatgaatttccattacaatataataaccatcattatgtaatcaaatatttttagcttattgaaattggatatcatgaaataaatgtttatttcccccattttttttttcttttatagagacaagatctcactgtgttgcccagcctggagtgcagtggtgtgatcacagctcactgcagccttgaaatcctggtctcaaataatcctctagccttggcctcccaaagtacaagaattacaggcaatggtcactgcacctggcctggatccacttttaaatttgtcaagaggttatgaccaagaaaatttagaatgatttatcattctaaatatataaaaatattatgtattctcatgcaatgtatcgactctacaaaagagatgccctcccccacagacacacacacactcacactcactcttatctttacttccactaaaacacactcctgtctcaattttaactgtagttggtatctccagtagaaagaagttattttaaaaaataaagaaaactacacctca

SEQ ID NO: 688481 - DNA, 2751 bp, Homo sapiens
gttgttgctgttattactactattgagatgggaaatttgataacataagaagaagttaaaataatgcgtgcatcttataaattttaaaaccgatctactggccaataaacattaattaaagtcaaatatatacctgagtctcataacaaataaagtgttacacagaaagtgctgatgagttgtacaacagggaacacatttacagcttagagtctagtcaaaaggggttctttctgggagggagtggaatattacctctgattattacagcagagaaaaacgctgatattgccaaaggcgctagatacagaatcagattctcaattagaaagatggctactgtgccacacaaactgataacgtggttcttgggattaatacatcaaacaggagccctacaagttacgaagaatgtaggaaataaaaaatataaaaatcagtaaattaaaaactgattcttcaattgaattgtgaaaagattaagttcaattaaaaatatgaagtcttcacgcactaaggaggtcagagaaaacgttggtttctaaaaataagaaaaaagtgggccaaggatgaggatgagcaatgcctgaggaatctgagtagatgattcctgactcactctgggtagaggaggatctgaaagtggcatgagaacaacatgaattgaagtgataggcctattctaaaaaataattgttattattaacattgtattggttagtaaaatatgtacagtgaatgttgattatcaatgtgttcaagtatttttaaccagtatttctgtaatttccattaaacgccacattaaaaaaactgttctagtttttactacaccatggctagattatggaatgatgaattaactagactttacttttctgagtatgctgcagtgaaaattgtgttgcaaattcctatccttattgacaattcatcacaagatgtatcttaatctcaagagaactttcccactgtgtcttgaatgcttattcccattatcctctaagacacattcacacacacacacacacacacacacacacacacacacctgacaggcaccattctgtcacatcctcccattctgcagcagaaacaggctagctaaagacattatctttttatttttgtataatctaaaaaattcccttttatctacgccatgttcagtaatttagttacttaacaatatatttatatttttgaggtgactcaagaagtatcacagaaatcaatcaaggtaggaagagtgtggatttggcacccaaaataagtttgagtgatttcttatctacttgctgttaacatgcctttttcactgccatgagccacagcttgcttatttgaattaaaaaaaamcctataatatctggcttatagatgtgattaccattttgtaacacaacgcaaataaaacattgtgtaatgcggtagaaatccaacgatgtcttctataaatggtactcgtcaaatcctacatccatacgggcaaaattgaaccaggattcttatctcttaccaccttaattttaaatggaccatagacctaaatgtaataggtaaaccaataagccttctagaaaaaaattaaaatgtagaaaaatacttttatgctattggattcagaataccttgttaaggagatcataaaacaaaaaaaatctggactaattttcagctcaaactgtgctgtgactgcagtgcagcagaatacctttgaaaccgtccagacagtccctctgtctttctgatagtccttgggttggctgctagtagtctaaacctggagactgagattgccttcagattcatgttgatttgggggtaagtaaactagacgctttgatctctaaatcagttattggatacagtccactccctgggaaaaggctgattttacctaattttcagagatcaaggtggggaagagctcttgtggccctatattatagtatgaagattttctcttaataccctctttcagccccatgccagtgccattaattggtcctattcttatgaggattcttgtcccaaagattcagtggtgtactatcactaggaaacaagcctctcctctcctgcatggctatgcatttggtataataagaaacttatttctgaacttgagaataaaaaagaaatagaatactaaatgtcagggaaattctctaaatcactccatagtcaaatgcaaatattttaaaagacatttcaagttatgaaaatgaatttccattacaatataataaccatcattatgtaatcaaatatttttagcttattgaaattggatatcatgaaataaatgtttatttcccccattttttttttcttttatagagacaagatctcactgtgttgcccagcctggagtgcagtggtgtgatcacagctcactgcagccttgaaatcctggtctcaaataatcctctagccttggcctcccaaagtacaagaattacaggcaatggtcactgcacctggcctggatccacttttaaatttgtcaagaggttatgaccaagaaaatttagaatgatttatcattctaaatatataaaaatattatgtattctcatgcaatgtatcgactctacaaaagagatgccctcccccacagacacacacacactcacactcactcttatctttacttccactaaaacacactcctgtctcaattttaactgtagttggtatctccagtagaaagaagttattttaaaaaataaagaaaactacacctca

SEQ ID NO: 688482 - DNA, 2245 bp, Homo sapiens
ccatttctgtgttattagtacagaatctggtgaaatcaaatcctcagtctttgcttgagacaccagatattttcaactataatgatagccagaaccatagacacacattccaagattacaataatgctacactagaagacagtatcaaaaaatacagtcagaaataaaatttattatgaacaatttctacctttaagcatattttcttggcagttctaagattattgtacttaatataataaattaaaatgagggtatgagaatgccaatttgataaaagtaaaaatttaaaagtttaaaaagacaactactaaaataatctattttaaaaagacacaaatatattattagtaataccatatgacctcagtgtattagtaaattttcacactgctataaagaacttccctgagactaggtaatttataaaggaaagaagttaattgactcacagttctgcagggctgaggaggcctcaggaacttacaatcatgggggaaagtgaaggggaagcaggcaccttcttcacatgatggtaggacagagagaaaagaccaggggaaactgccatttataaaaccatcagatctcgtgagaacttctttagcatgggggaaaatgcccccatgatccaatcacctcccacgaggtctctccctcaacatgtgaggattactggggttacaacttgaaaggagatttggttggggatgccaaaccatatcactcagcaataaaaactaaacagaaaacacttgaaattcttgcacaaatttataatatttctagtgataagctaaagggaaatgaataaagctgtacaaaaacctaaaacgagagacatagacactagctgctgggaatccctcaaatacaatgttagcctttcaattattatgcaattattgcaacttgtttaattaacaacatatttgaactgacatgtgggatatgtataaaatatacctctcggtgctattgagaaaactgtcatttccaaagcaagaggaaaatcacttaaattggactaaatcctttgttaatatttaacattctatttccgagggagccctagtgaatattcagatgctttgatcatcttcttctgcccacgaatacacaacataattttctgtttgagatttgcttgtggatatgttgttttacaggctgtcagttatccccctgactggaagctagaagtgtggcttcaaactgagtctctgggaatgtgcaagaaaattggactccatgctctggtgtaagacttccagatgctgttctagaattcttctgttctttcttatttgagtatgtcactttgagcttgcttgggtgatgaccactcactgatctcacattctctcatttatgtgctttggtttagtgatttaaaaacatgtgtgggaatttcatttaactaattaaataaaataggcatttaattcatcattcattgrttgtacttatggggaagaccttgaaaggcacacaaatgattctaaaggggaaatctggcttaattatttatgttatatattctttcattcactataccaggtgagctgtcttatttaaccaatagcaacagagtgaatgagtagattcacacctaaccctagtaattctaaccagtgaagaaaattgattcaaactgatgggttttctttgatatttgctgagagtttatgttctttttgattgactcacagattttgacaactgacaacaaattcacaataaaagatatatcttactgtcctgtcttaccacttgttccagtatctttttagtgtcatttgtaaaatattctgcagattgtctgactgacatcttattttcttcctacctttgtagggcaagcaagggcaaaaagtagtaatgtctgcttattttataataagaaaaaacattatccatctctttcactgcactaagaatctcgaagctatatgaaaaagaaacaatttgacctattttctattactagcttggcaaaatattttgataaagtttgcattttgactaagtattaagggtaaatagcaaaaataattggaggaaaataatatcatcaaaaaattattcaggaaaatttaattaactgaaaggtcaactctaggttgaactgaccatcaaagtgtccagcatagtgaataaaaatgatcccaggctgagggaaatcatgttaaattttagaacatggaaggttagaagaagctttactaagtttcataaattattg

SEQ ID NO: 688483 - DNA, 582 bp, Homo sapiens
cacgcttcctttttcaaatatgaaaagatttttaaagrtatgtattttgagactggataagactgaagcccaactttgtcttcattcactgtcattctcttgtatatatttgtatgaccttacactgcagtagtccccaacagaactggcaaaggtcaactaaaaatatactatgatttggatatttatcttttagtaattttttaaatagtttttgcttattaacttttacccagtatattcaggtcagaccacttggttgaaacaaagagataaaggtaccactgcagataattcaagtgatcatattggataatacaggtaattgaggcaaaagttcatgggttattctgcaaattgccttaattccttgaattatttggcctcggatatgtgacttaggtgctaccattaaactctgttgaaaaaatgcctattttcttacagtaaaagcacaaataatttagcaggggtttttttggtatttgttttaatacttcagtgggattcttagaagcttcccagcagtgatagtaatgtgaaagtggaggtggaacaaatggagctaaagtggtagcaata

SEQ ID NO: 688484 - DNA, 582 bp, Homo sapiens
cacgcttcctttttcaaatatgaaaagatttttaaagatatgtattttgagactggataagactgaagcccaactttgtcttcattcactgtcattctcttgtatatatttgtatgaccttacactgcagtagtccmcaacagaactggcaaaggtcaactaaaaatatactatgatttggatatttatcttttagtaattttttaaatagtttttgcttattaacttttacccagtatattcaggtcagaccacttggttgaaacaaagagataaaggtaccactgcagataattcaagtgatcatattggataatacaggtaattgaggcaaaagttcatgggttattctgcaaattgccttaattccttgaattatttggcctcggatatgtgacttaggtgctaccattaaactctgttgaaaaaatgcctattttcttacagtaaaagcacaaataatttagcaggggtttttttggtatttgttttaatacttcagtgggattcttagaagcttcccagcagtgatagtaatgtgaaagtggaggtggaacaaatggagctaaagtggtagcaata

SEQ ID NO: 688485 - DNA, 582 bp, Homo sapiens
cacgcttcctttttcaaatatgaaaagatttttaaagatatgtattttgagactggataagactgaagcccaactttgtcttcattcactgtcattctcttgtatatatttgtatgaccttacactgcagtagtccccaacagaactggcaaaggtcaactaaaaatatactatgatttggatatttatcttttagtaattttttaaatagtttttgcttattaacttttacccagtatattcaggtcagaccacttggttgaaacaaagagataaaggtaccactgcagataattcaagtgatcatattggataatacaggtaattgaggcaaaagttcatgggttattctgmaaattgccttaattccttgaattatttggcctcggatatgtgacttaggtgctaccattaaactctgttgaaaaaatgcctattttcttacagtaaaagcacaaataatttagcaggggtttttttggtatttgttttaatacttcagtgggattcttagaagcttcccagcagtgatagtaatgtgaaagtggaggtggaacaaatggagctaaagtggtagcaata

SEQ ID NO: 688486 - DNA, 1606 bp, Homo sapiens
gtgaaacatatttaaaaggcatgcattttgcaggacttttgggttttccaggcagtatcacacacagttaacatgttttgctgatttctgttatgcagaaatgtttgctatacttttgcttttcattcttaaaataggaaagtgctgggctgttcaggaagttattttttgcattctcaaaacttcagggctaaaattaatgacaacatgtaagcactaagaattaactgagaaatatttatccatttgtgctgagaggtaacttgccttgttagttcttatgaaatgcattgaacaccaagatggagatgtttgattctagcaaatgatcatgctgatctgctctgatctttatatcttttctttatgtcttataattcttaatatcttctctctacatattaactttgaatgagtgataacttaaataatttactttaggaagaaacaccctatctcttgctttgaataaaatcccagtgaatgtgatctgcactacccaaaatattctggttatctctcaacctgggtttttctggagagatggcagcctcaccaccaggcctacccctaaattttgcagggcccaaaataaatttgcatatgaaagcccayatatgtcatgtctaaatatttaaatattataagtaaaggtcattatctgctaaataaaatatattttatactcatactttgacaaatataccttcattaaaaaaatacccaaaagtgtgaactaaggtttattgaagtcttgagagggagggagtcaaggggtgaacaactagctattggatattatgttcactacttgagtgatgggatcattagaagctcaaacctcagcatcatgcaatgtactcatgtagcaaacatgcatatctaccccatgaatctaacattttttttaaaaataatatacattcagattatttttaaaaaaagaagactgcagttaagtattagtatacatagctatgtatactattgataagccaacaacggtatgattagaaataaaataacaatattcacaagttatgtgtttatttcatgttatttttatttcccacatgtacacaaaattactgatattagtcaagatttttacataatccatgttttattagaattgatctgggtattcagcaacaaaatataatgaaggcataattaaagatgcaaattacacaaaatttataaacaaaaaatgtagttactttcatttcttttcaaaaggttatttttattctaaaatgttaaatattacctatcaaaactaagtggaaaaatacgagttccaagtataagttataatattaaaaatttaattcaagataatttaaacttaactgactttcatttttgaaaatgtaattaaagcatttaaaatagaaaataaaactatgctctattatagcaaagattggttcacgtgagaatatttaattaacgctaaacctagtttcaatgaagagtaggatatttgcatcatcttaaattgtcctttcacagattgcttaatttttgcataagaaaaatataactttaagatggagaaattggaaaaatccctagacttggtgatcaagataaacattaccag

SEQ ID NO: 688487 - DNA, 960 bp, Homo sapiens
ttggttctcaatcctagctgttaaataatactaacgccgccttcccctcaacacatacacagaaaccatttaattaaatcagaatctctgggagtggtctttgagtaggaataagttttttaaattcctcaggtgattttsaaatgcagccaaggttaagaatcactgtgttaaactgtagagatctttaggcataatgtctgccttccaagttattccagacaacaacttataaaaattgctcccctttataacatagtttatttccagcccctaatagaagggtcctgcccatgggccaaacactaagtcaatgccacctgcactgatttgtatttttgttatatcatcaacaccctaccaccacattgaaattcaaaggtcatgttagagtgtttgctctggcaaatactttgcaaatttcagtggcttaacacaagaaaagctttatttctcatgcaaacggagtgcaatgtgcttggtagggatctctgctcctcttagggttctagctgcttctggctagagaccctgccatcccgcagtgcctccaagtactgtgccagatccctctacattcaaccagtagaagagagaaaagaaaaagcatggaggattacatgagaagtgttttaggggcccggataaggcacgcattaactcctactgcacagagcttggtcatattagccacaacaatacaaagaaggggccgggtgcagtggctcacacatgtaataccagcactttgggaggccgaggcaggcatattgcctgaggtcagaagttcgagaccagtctggctaacatggtgaaaccctgtctctattaaaaatacaaaaaaattagctgggcgaggtggcacacacctgtagtcccagctactcaagaggctgaggcaggagaatcgcttgaacccaagaggcggaggttgcagtgagctgagatcacgctactgtg

SEQ ID NO: 688488 - DNA, 653 bp, Homo sapiens
aaaaaaaaaaaaatttaaaatattatgccaaacaacttgcaacaaagttttatatcattataatcatttcggtttcatattaataaagtatatcggtacctccattttagcatttgtccaccgaggtatttctacaatcatattaaacagattctgcagttaaaaacaaaacaaagagagaacattaaaaattttaccttttattttttccgttacctcccttataagaataccttagatgttttcccccgacaaaaaaaatgttgagtctccatcatacatctacctatgccttaaattttttctagaaattagagttgtctaaaacacagccaaatttaggccaccatgtcacttgagcacttacacacagtgtcagaggttacgagtctgagaatatctttgatgwgtagtgacaaaactagaatggagtcaagaaatgtgtttcaatttttattttccaactaaaatagaagtgagagaaccagtccctcatgtaaggattcagtctcacttttccaatctgtaaagtaagtgtgatcatctctgtcccactcaccacatgaggttgttacaaagatcaatgacaatatacagaaaattatgaagtaaaatatattttaaaatgataaaataataattaaatccaagtt

SEQ ID NO: 688489 - DNA, 860 bp, Homo sapiens
gtgttatctttagtacccccacaggactgcttttgcctcctatacttagacttaccaagagtcagtttttagttcttaaatgtgtttgtcaattgtacttgttactataatttcaaaatttaagtattaattatgttcacagatgaactgtaaaagagtgtggaagaactgtttctatgaacattaagtaggttataaaactaacgaggctttaaacaatactgaggccctaaaaagcctcaataaaggtgaatcactacaaaaatttggtgtakataacataatttaaatgattttttttaaaagaaccctaaaaatctgtcaggaattttaagttacaaggagcttaaggattacagaatctttattttctatcctgtgttatgttagagtatatataaaatctatatggaatctatattaaaaggggctcagccctatatccaaaaatgggtgaatatacatttaaatgttttaaattaaatgtttatgttactgttacttaattcctcttaatcaatcaattagtgatcatgatgaataaggaggctttcactttctaagaaattatatggtagttattagattttaaagaaactgcatagatttacatgctgaaaaattgcgtttttcatctttgcacaatgtatttcaattaaatgtccatttatttatcagtattcccactaaattataaattccttgagaaaaaagatcacgtcaattcctagtttaatagtgcccaacacttagtaatgcccaatgaataggtagataatctgtattgtttaaattaaaaaaaatgcaaaaatctgaaatctgattattatgtggctgtttaataccaattaatataaaat

SEQ ID NO: 688490 - DNA, 631 bp, Homo sapiens
ctatctgttttaagcagataataaagtcagctaaaccttcccttactgttacacactgagtaagtgcaatttggatggtttgaagatattaaatctttcagcccagatttaagaatacctgtttgagagaaattacaagagcttttaatgcttgctacagaaaggtaatgtcttatcttttctgtttagtattttgcattccaaaaaatgagaaaagttattccataagttgataattgaataaaagaatcaaaacatgcatggaggtttttaaatgtttcattttaaatttgatggcaaagatgctatgaaaatgtattaatagctaacatttattgaacagaaggcactccaagtggtgctcatagattatggcacttaatcctcacaagaactttatgagatatgtattgtatyagtctgttcttgcattgctataaaggaatacctgagactgggtaattaataaagagatttaattgtctcatggttctgcaggttgtccaggaaacatggtgctggcatctgctcagcttctggggaggcctcaggaaacttacaatcatggtggaaggcaaagggagagctggcacttcacatggccagagcaggaggaagagagtggtgagaa

SEQ ID NO: 688491 - DNA, 610 bp, Homo sapiens
tataagatgccaaatacggtacatgtgaaagcatttttgtttacattatttgggagacagttctcgttatctcctaggtagatggctttgctactcgcctctgagacagtcaccaagacagaaggttctggaatcttgccaaactaaatatctttcacatcaggaaaataccctaaattgagattggcacctttttattgagtaaatatacactgtattcaacagggaactagaaaagactatttaaattgtttaaagagctgatggtgccctgagctaaattactgaatggaagtctttaagagctacatccaagcttgtttttttttttttttaattgattcactttggaagtgagagtgagacactgaagttattgaacagcagtgggggtgttctgacctcaccttcccaagactctgaatgcccctcattgatcatcccgagtggataattgccaaatcttgccattccttatggaattgtggacacaacttaaaggtgatgcagtttgccctgaaccatcctcattgtttgggggcacctgatctgaattaacgagaaacaaaagtggttgtgattttaaaaraaaccctctgattcttttccc

SEQ ID NO: 688492 - DNA, 2142 bp, Homo sapiens
agaattgtttggaggtctgtaattgaacatacagaactatctcttgtagaaccaaaacagtttgctcttgaaaaagggcctagtttttcatttattttatttaacaagcccttgtattttattaacttttaggagaagttctgagtactttacaaataataacccatttgatctccttagtcacttaataaggtattattattctcattttagtgatgaggaaactggggcacacaaaggttaactatgtagtttaaggcaatgagactaataagtagttaagagctatgttattcacaggtagaacaattagaaaatggcactacatcctttctgctgactgatctgtgcgagggtacaggatctatcaaacggagcttgagtgggatttcagagccttgtccagtggctcttcctttatgtaatctgttaatccttaggaaaattttacacagtcctaagccaccctcccccattgcttgctcatgtaataatctctgctccttgtgagagatataaagagtattacacttgatcctatacaaaatatgccaaatgtcaatgcatcctgtgatttttgtcattccttttttggaacaggagctatatttacacttgaatgaataacagatgcaaattttgtacttaaatttccttggtttaagtatttttttgacttatccttttgtctcccctatttaggaagaggattactcttgcatttaaggtcaaatagcatcaacaagatgagaaataatgtgtcttttctcaaatcatatctactgagaataagctttgagagctgtaggagagagctgaataccagcaactatctccccttttagccaagaagagagttaaaaagaggtcccattacccctccatttgtaccagtagttctcaagtctgcctgtacattagaatatagtgggaagtcttctaaaatatattttcatggcaaacatcagactatttaaattagaaattctgagaaggagttctgagactatgtgtttttaaaaagttgcctaggtgattttacaggtcaaccaaaactgagaaacactgatctaaaatgtagaaaaccttgtcatcagtcctggactaaactctcttaaaatgcagccactcaccttcagcctgagagccaaagaagtacagaaaatatcaactaataagttaatattttcttattagggagtaaaatatttggtgaaaccctttggctagtctttgctggtgtcctgaaatttacagccactgtcatcaataaaaggatcaaaatatcatctggtctagtaaggggagccacctctaatttcctataacaactttcttagtgtaatgtctggtacacaatatgcctgtaataaatggtagtagttattagtagttccacagaaaatttatcttaagtttatgaaccttytgctattaaattatgatgtttataatgcattcataattttttatggcttatttcccagctaagtcagagggaaattttaatgagctagttaaatctagattctttgttcattgtatgatgttttcattttgtacatatgtgcttgcttgcttatatcatggttgattttgaaatcaaactatactgactgaaaatgaatacataaataactctttaagactacaccatcaaatatttattaaaggtaaaatatacgtagggctaatggttagttaaagaagacatttacaaaatgtttttctataggtatttttttagaggggtagtacattacagaaaaatgtcttgcatactttctactttttaagaaattttataaagaaaatttataacccaagtcataacagctaaggaccataactgatagtttgtaggacagcattaatatagatcaccaaagccaaaataaaaatcaaaatacatcacattttacttcatattttacagtatgacttaatatcagaatacacatttttttttttttttggtcggggggatggagttttgctcttgttgcccaggctgcagcacaatggtgcaacctgggctcactgcagcctccgcctcctgggttcaagcaattcttctgcctcagcctccctagtagctgggattacaggtgcccaccaccatgcccagctaaattttgtaaa

SEQ ID NO: 688493 - DNA, 2269 bp, Homo sapiens
cagataacccatgtacacaatttggcatatatgaagtcttgccctaatagtggcatttacagtcttttttctatgtacttaaatcagcagaagaggtaatgtcacagtatgtagtcagacagcagcagggcaggagagggcccccttcccccaccaccaggaatgtcaggcgaccatcaggtgatgctcaggaggttgttaaactctctctctaaattaatarttggttgcagctggcaccagggaaagtcagtcttccaatagatgggaaaatcctgaaactcgttatcagtggcttcccaataagatctcaggagttgagcacgtggcctcaagcatacgcactaagaagcaaaatggtggtgtttaactggtatatgaccttcctctaggaactctcaaatggtaggggggaaaacagctcaagtgagtacgtgcacacaatttgactttataaaatttagatgcctaaaaaagtcattatattttcgagactcaatttactattttatcaattttactgaatttattttatcgatttatgtaatatttttaaatattaccaaatattttgaccaataaccataaatatgtagtatgtgaaactttctttctatagatctaaaaataattgtctgagtcttggtcattaataaaagcaaaagctttacttaaactcttatggtacttcagagctttttacaaagaatcccacttgtgaacattactttcagtagagttgtaaaaggaagatacatatactgacttcatcatttatacagaaaatgacaagattatatttatttttaactcttgagtttttctattttctacttctacctctagttttcagtaaaacaccttatattggtcaatcatttattttaaatgtaagtagttaacatttacaaattaaaacatacacataccttcagcatagaccaagtacatggttaaaaggaagaagaacatgtacacatttttatattaaaaattaccaggttatttttctatgtaaataatatatactgagatattaaatatctatatttcagaagattaaaggcaattatattgtgttatggtacatgatgtcatagaaaatttagatagccttgtcactgaaatgaagttagacacaaattacacttagtttttgtagacccctaatgaaatttaaaataattatttctaaagcattacttcaactgtttgattagaatatttaaatgatataaagacctaagtataatgcatactttataatttaactctaatagcataaatggcaataaaccaaacagattaatgagtttatagcaacgcaattggcacatgaaacaaataaccccagaataaatccttcttatcatgttatgctatgtgaaacactggctgatacaaaagtaatttgtatttctattgtatgatataccttatatatacatacatcataaaattatataaaattaaatacatacttctcataattctaagaaacttgaagaattccatattatttgctgattgttacctttagtatttctgacaagagctttgttcacataggtctcttctgcatatcagtaataaatttgggtagcgttgactttcaagcttcttctataacaagcttcttcaataactataataaatggagagtcataaagactccatgaaaatagttctgtacaacatgtttttgaggtttcacatgagaaataattctgcattctatgcccatcaagaaattcaacattaattagttaggattttctattgtataggttgattatttatatccctcacattttttaatatgttttaatttagacattcagctttgcttggcactttataaattatttattcttgcatcttctacttttttttacgtttattttattgcatttcttttctatttgtcttttttgcttggtttaggttatttttaattaacttcaggcagaaatggaggaaaaccagcaatgtgctcacattcataatgcatgtaaggcagtccccgcatccccccgtcctcccccatttaactcttcaaagcccttcaaagaagactgaaagccctacaacaaaacacaaagctcttggttttctgctgaaatttggtttaaaattatttcctgtaaataaaatatccccacttctaaagaaactcaagagtgcaaaaggaaataaaaagagtgcaaaaggaaaataattacctttttatattcagaactatcattttactcttcaaataattgtttca

SEQ ID NO: 688494 - DNA, 2171 bp, Homo sapiens
tctattaaaaagtaggagtttatgatctattgtccctcactgttcaaggaccacttcaatgttccctgaccactattctgttatggaaaattaaatgaaaccctttttacccattagcaaaggaatgcatattatatgcaaagagcattatctctggactatttttaatatagattttgaactatgatatctcatgactatgcttacttatatttatattagccttgcttttcctgtaacatgcagttttgtaaaaatgtttctcagagttccatttctctttttgtcaggaatgcatttcattgcaaataacagaaagccaactaacatgtatagatttatttttctcacttaataagaaatctgtcagtaacagaccagagctagtgtacgagcttcatgaggctatcagaaaccagagactttttaatatttggagtgccatttctagcatatgtctttccacgcccagcccaagttgcaagatgattgctgtacttatttatatgctcctagcaagaaaaaataaaaaaaaggcaaagggggcaaaagaggaaggcctaacaagcctctttcttctaagaaggcttcccggccaggcatggtggtggttcccagcactttgggaggccaaggtgggcgaataatttcaggttaggagtttgagaccagcctggccaacatggcaaaatcctatctctactaaaaatacaggccaggcatggtggctcatgcctgtagtcccagcactttgggagtctgaggtgggcagcttgagatcaggaattcgagaccagcctggccaacatggcgaaaccccatctctactaaaaatacaaaaattagccaggtgtggtgacgggtgcctgtaatcccagccacttgggaggctgaggcaggagaatcactggaacccaggaggtgcaggttgcagtgaactgagatcgcaccattgcgctccagcctgggcaacaagagtgcaactgtgtctcaaaaaaaaaaattagccaggcatggtggcacattcctgtaattccagctactcaggaggctggggcaggagaatcgtttgaacctgggaggcagaggttccagtgagccaagattgcgccaccgcactccagcctgggcaacagggcaagactccatctcaaaaaacaaacaaacaaacaaatgaacaaaaacaacaacaacacaaaggtttccttcctggaagctttacccagagattcccactgtactggctggaactgggccatgtggccacttctagacaaattttactagaggttggcctaagaaaaggaattatgaaaagggtttggttaatataaccacagcattaattacatgccttttgccttttatctttgatctctatgtctgtgtaacactttcttggatacatatggtcttggactcaaataccattattcatattatttattcagatttatctatacattttatgaggatacttgaacagttatttcaataatagctcatatttattagccatttactcagtgctagagaaatgttttgcataacattatttaaacttaattctatagggtatcaatgatgaattgtgtcttaggttgaatatgttaccacaagtttaataagtttctatctttctttttttttttggttaaggatatattaaacctatattcctccttctcttccttcttttgtttctctttctaktttggtcaatcttttctttgtgaaagatctcactggtagggaagaagaaagtactatagcatagtatttcttaaagtgtgtttcaagggttgttaaacgtgatacacattaaaaatagttaatcaaataattttaaaaatatgctatataaaactaagtttaaaatatttatttaggcaaaaaagtaagaccctgtttcaaaaataaaactatttatatgattattatttgctttcccagctgaagaacaagctttctgagagtggtggctgagtcactgttgctcctgcttataaatccagggtctagtataacgttctgtataaggtacaacataagttattatctttagttgaatcctagacctcctgatatgctaatgtactgagtgaaaatctgagaaagaaaatgcagtgtttaagtctctgaaccaaaataactactgtataattttaaaa

SEQ ID NO: 688495 - DNA, 630 bp, Homo sapiens
tgagttcatttttagaaatgcccaatctgagatgtttgtggggcttcccggttgtgatgtctagtgggtacttataagttgatttagtcatctaaaatattcattatatatatttaccatcaaaccctgtgtttggtgctaggcataagacagaatataggccctgcttccatgaataacctagattttaacatcaggaattgaatagatagaatgtttttattctttgagaaaacttgttttgaaatatataatttatttagaaattttaaaaagcaaccttctttcctttttataagaacacaagaatagaagccaagtactaagtcatttgcataataccaatattttactttattttgatctggctaaattagtcaaaagcttaaacttttttttagtccatttagtttcatgttaatgtttktacattcataagtaaatgttttgcttctgtcctatgacagcacgacaaaaaatatttaacaaatattcataattaacctgttgaattggagatggtgcaacctcccacagacttcagaaggatcttctccattgattgattaacttttggaggtgatgaaagtcatcatatttctgatagtacagcatcagtaatccaaaaac

SEQ ID NO: 688496 - DNA, 937 bp, Homo sapiens
ccatcatatctcataagacttattcactatcacgagaacagcatataaaaacccacccctttgattcaattactccccactgggtccctcccacaacacatggagattattacacttcaaggtgagacacacacaaactgtgtcagtaccctgcaatgcacaggacacctccaaattatctggcccaaaatgtgcatatagctgaggctgggaaaccttgagctgcattagagaattattttaaaaagaaaattagcgaaaaaaaatacatgcaaataagatttctaaaggacttgctgaaagggtttcagttgatcattattcaaagttattggtaaatagactcttttttaacttttaaatttgatgtttaacatcttagttttgtctactgttctctgagacttgttagtacgactctttgtaaaaggcttggagcatttcaaggagagaagaagatgttatttggctttacaaatatcatgtggacatttccctatgttagtagaattccctcagaaaacactcaggatgccagacatgattcccaaggccactgtgaataatgctgtgccaaacagttatacttagagagagtactttggggttttttttctaactaattgtatttgtgattcatgtctctttgagacactggcagacaggaaaatgctgttgctccctcatccaagtgcccttcaaagtataggggcacttcttcccccacagctgtcatgattgttggttgctaaggtctcatagctgcctccttcttagagaattgtcctccatggaatgggggagctcttyaccagggaggtgacaccccatcctatggagcggccaaaggccaaggattgccaaagggtatgaaaggctggtttccttgcttttaggaggaccaattctgcagtatactttatgtgtcagagctctg

SEQ ID NO: 688497 - DNA, 1263 bp, Homo sapiens
ccccaacaccacccatcgcagggtccctccccaagggcctcaagagctccccagggcgatgctgtctccaggctgggggccctggactgttctgtttgaatgacctgtgaggtccacgccagcctgagggtgccaggaagtgctgcccaatcctcatcataagacaaggctgttgccttatcacatcctcagaacacagcaggctgacagctggaccttaaagtattttgtggggagggcgggggccatctctgaaagccctgggggctaattccacacctacytacaagtgtacactgagatccatgcggggtctgccctgtgccaggctccccaaagctggtcaccctgagtgccctctgggagccccaagcctgggggactgaggagtggaccctggccatgtcttggtatcccccaggctgttcatggccagacccacatgaggacaatgaaggccaagccagatgtggaaattgattgagaaagaggacccctggtccaggcccagcccaccctaatcccttaccagccaggagaatcccagcagccagaagccactgcacgcccatgctgaaggctctcaaggcttctaaggcttcagaagcaggtggcaaacacgaagacactctcgaatttcccttcaagaaaggactgatgttgcccagcctttcccacatttccacccctgtggctgggggtgcaagcctggctgccctaactcgccgggtgcccttcagcaaagcccttgacctctggggctgcagagtcttgaatgggggcagcctgtgcctgccccacagcctgggaggttatgggcctgaaaacacattgaggaggagttcagagtcctatccagtcttcaaatggaggtggtgaccatgccggtgatgggggtatgagtgtgggtttgggtgtgatgtggaatgactgtggtgagtgtagttgtgaggacagtggctgcagggatgctggaggtgctgattgtggctgtggtgggagctctatgtccaggtggtatggagctcgctggggaggggttggtccatgtcccatcccctggccagctcctgtcccagtttggtcctgctcctattccatcgggctgcgtgggggtttggagaggggaagatcagaagagaatagtcctcctcctgcagtgcttttcccgtgtggaatcctgatcagagccctggactgggcagggtgagtgtggaggtgggcgcacctggatagaaccatccttctcgggtcccctgcgca

SEQ ID NO: 688498 - DNA, 1371 bp, Homo sapiens
atacagttgtccatgagtgattgttttcaggaccaccccctcgtatccaaatccacagatgctcaaatcccttgtgtaaaatggcatagtattcgcatataccctaccctgtatattttaaattatctctagattacttagaatacctaataaaatgtaaatgctgtgtaaataattgttatactataatgtttagggaataatgacaagtaaaaatgtctgtacttgttcagtacatatgcaaccatccattttttaaatgttttcaatctgatgttggttgaattcaaagataggaaattcatggatacagagagctctccactatcaactttgaaaatagaatagctgagttttacatttagcaattgaaaataagagaagtaatttgcagatataagtatgtattagattaattggatgacttcaaatctctgtccagcaattgtcaatttgtttacatgtaatccaaatgcaattttcttaaatatcaagggagtgagttagagtcctatttgtttcttaatttgaattgtcttgtgaatcagccaaggtacagaaaataaaacatgataagccaaagtacagaaaaatttttattttcatttcaggcaggcagtcaagggtattaagatttgagctctagctttaggtcaaattgcccctacaattctactgttattatttttacctattacattactttgtatatttctgtttccctgtattggtatctgtttaatgagaccacaaacagtaaaacagtaaagaacaaagagataaggagaatgaaacaacagtagaatttagaagttaaataaaacacattcaattttacctctttccagaggagcctataccagctctaagttcaactgcctgagaccaaagtaatgattctgtcaacctatttgccttgatcagaatgcttatttggcctaaccattacatatgacaaaagataacttgtatatgttgcatgtgtgtgtgtgtttacatgggtcaaatacatttcttatgtcaataataatatagtaaacatttatgccaaatactgttctaaatgctttatagtttrtcctcccaacgaccctatgaagtaagtactattagtacttatcttttataggtgaggaaaccgagacttagcagggttaagtgaactgcccatggcttcacagatgcaggaggcagaaccagaactcaaaattgcctggctctagagtctatgttctctcaatgccaacactcacttatgcaactatgaactctgaaatccattgattaataggttgaggcagaacaaaattaacaaaataggattatattttgcttgatccccagtctattcaaatctgtgtaatagataga

SEQ ID NO: 688499 - DNA, 668 bp, Homo sapiens
aaataaaatgttaatgtaacatttggaatgattcctcactttgactttttaaaccgtctgataacaattctcaagagccttttactacacaccatttacatgctcaccttccaaatgttatgttcattaatttctcgatgcctattcaatgaactctaaactttgtggtctagcaaatctacacatttttacctaactccatgttctatttttattttttattcatataccttatctttagtccaattagacttattattctctgagcacatgctttaattttaagctcatgttatactatttaggaaaggaawgaaggaaggagggaaggaaggaaggaaggaaggaaggaaggaaggaaggaaggaaggaaggaaggaaggaaggaaagaaggaaggaaggaagggacggacctgggtgcacctttggagaataggatgaggaggctccagttacaggttgaggcagtagcaatgtcatcccatcatgggtgggatagttgtaaagtgaattaggagaaactaaaggactctggggtgggaaggaaaagacaggaccctctattagttgaccatcagttgagtcccaaccaagaggttctagaacaaccaatggactatgtgatttcaaaacaatttccaaaataataaatcttgaagacttgaat

SEQ ID NO: 688500 - DNA, 618 bp, Homo sapiens
ccatctgtcacccggtgtgggaggaggggacccaaatacactaggatggcttgcttgaaatcaagacagggcagagaaggccatggagggcctaaggtcacctttaccttgtctctgcagggcatcccgggtccctcaggccccccaggcaccaagggcctcccaggagaaccggtaagagccctttccttccctcttctgcttctttgccgctggcacctgggggtgtgggccaggtggtcagataaggagaagggttggaaagggaccatgcctggcctctaacccgctgtgggccacgccttggggttggtggcgagcactaagccaggagctctgggtttgaggctcagctcacttggcctccagcctgttttcttgccaggaaaatgggggtgattgtctctgccttgccattctgttgtgaagatgaaatgcgaaaatgtatagggagtgcttggcacagggaaaggcaggagggagggaggtgaagataagagtaaacgaacaagctgacygggaactgcagagtccagcatggctgaagtggaaagcgggacctcagaaagggcaggaggaggcagcaggctccagtcgcccaaggccacggggacactg

SEQ ID NO: 688501 - DNA, 3155 bp, Homo sapiens
tgacatagccacaacctttccagggcccgagggagggtggatggacttatccatcccataggtgttgctcgtggctgggtgacttgcttctgccaacgagattttcacagacacggcacaagcagaagcctggaatgtgtgggcactgccaggcctgccctctaaggttcttgattttccccatgagatgcacgtgccccagggaacggccgctctggctgtgggatgagaggcatgtggagcaggcatggttcccatgcttagcctggagtcaaggccagactagatcagcctaagcccagccacgccatgggtgcaggagtgaagagcaaatgctaactgtccatggaattgactttcaaaggggcgtgtcatgtgcctcatcccagcaacagggaaggcatttctctatcagtcagttggtaaatgattattgacaaacaatgtgctgggaaggtggagtgatttgagtagatttggcctctattctcatggagcttcctttctagaggggaaggcagatgatggatggataaatataaatgattctaataggttggtgcagcagtcattaaaagtgatggcaaaaaaaaaaaaaaaagaaacggggaggagccgttgctgcagttcattaatagtaatggcaaaacccgcgatgacttgtgcgccaacctaacccagtaaccacgggtgtgcaaatgtggcgatgggcaagttccgagtgctaggagagcatctagcttcccggagtcaggagacgggggttggcaacctaaccaaggttaagtccaagtgaggggggtgggcagggagcgatatttcagtggagactccaaggatgaatggtatttagagagtaaaccccgatagagggtttgtgtctggcacagagaagagcctgtgcaaaagctggtggggcgagaggacaccgtgtgttcatccacctgacgggcgaccagcaggctggagctcagcgggttgagaggaggatgcagaacccgggaaaggcaccctaggcagagggcacagaagcgcaaaggcctggagtcaggcctgagcctgtgtggtttgaggaacggacagaggcctgtccgtcaggaagggaacggcacaggggagagaccttaggccacagcagagggcagggcagagggcagggccgtgctgggcagtgtgggctgtggatggtgctggcatttaagaggggagaccatagaccagggcaaagggcagggccgtgctgggcactttgggctgtggatgggagctggcatttatgctcaggtgatgggaatgtgttaaaagattttaaggaggggagtaacagttgggattaatgtgtattctgggaatctcaacaaagtaaattcatagtttgaattttcataagacttctgcacaggcagagagaaataagatcrtgtctacagctgtgtgatgattttattgaaaaacattactaagtttttaaacgtgatttcaaatggtgtgtttctgtttcaccttggacataagtagattgcaaggctaatggaaagtagaaaagttaactcatgaacataaaagagatatcaatttgaaaacaaaacatttattcatttacttccgctgcagatttcttgactgctgaatttcatgagaagggattgttcagggagggacgtggggctgaagacctggagaggaggtggtgctaccgctgttcaaatctgagggtggtggagatggagccttggggaggagcaggtgctgccttttaagtctatgagagtcgttgagctggaggtccagggaggagccggtgctcccactgatgtcttaggttgtggagctgaagacaacgaaggagccagtgtggctgttctgtgagactcgtggagctggagatccaggtgggagaggtgttttagctcggggaagagctgatgttctaccttgagggtcctgcagctgcagacctggggaggagctaatgttctagtttgagtgtcatgcagctgcagacccggggaggagctgatgttctagtttgagtgtcatgcagctgcagacctggagaggagctgatgttctagattgagggtcgtgcagctgcagacccggggaggagctgatgttctagattgagggtcgtgcagctgcagacctggagaggagctgatgttctagattgagggtcgtgcagctgcagacccggggaggagctgatgttctagattgagggtcgtgcagctgcagacctggagaggagctgatgttctagtttgagggtcatgcagctgaagacccggggaggagctgatgttctagtttgagggtcatgcagctgcagacccggagaggagctgatgttctagattgagggtcgtgcagctgcagacctggagaggagctgatgttctagattgagggtcgtgcacctgcagacccggagaggagctgatgttctagattgagtgtcgtgcacctgcaaacccggggaggagctgatgttctcatttgagggtcgtgcagatgcagacccggagaggagctgatgttctagattgagggtcgtgcagctgcagacctggagaggagctgatgttctagtttgagggtcatgcagctgaagacccggggaggagctgatgttctagtttgagggtcatgcagctgcagacccggagaggagctgatgttctagattgagggtcgtgcagctgcagacctggagaggagctgatgttctagattgagggtcatgcagctgaagacccggggaggagctgatgttctagtttgagggtcatgcagctgcagacccggagaggagctgatgttctagattgagggtcgtgcagctgcagacctggagaggagctgatgttctagattgagggtcatgcagctgaagacccggggaggagctgatgttctagtttgagggtcatgcagctgcagacccggagaggagctgatgttctagattgagggtcgtgcagctgcagacctggagaggagctgatgttctagtttgagggtcatgcagctgaagacccggggaggagctgatgttctagattgagggtcgtgcagctgcagacctggagaggagctgatgttctagtttgagggtcgtgcagctgaagacccggggaggagctgatgttcta

SEQ ID NO: 688502 - DNA, 3155 bp, Homo sapiens
tgacatagccacaacctttccagggcccgagggagggtggatggacttatccatcccataggtgttgctcgtggctgggtgacttgcttctgccaacgagattttcacagacacggcacaagcagaagcctggaatgtgtgggcactgccaggcctgccctctaaggttcttgattttccccatgagatgcacgtgccccagggaacggccgctctggctgtgggatgagaggcatgtggagcaggcatggttcccatgcttagcctggagtcaaggccagactagatcagcctaagcccagccacgccatgggtgcaggagtgaagagcaaatgctaactgtccatggaattgactttcaaaggggcgtgtcatgtgcctcatcccagcaacagggaaggcatttctctatcagtcagttggtaaatgattattgacaaacaatgtgctgggaaggtggagtgatttgagtagatttggcctctattctcatggagcttcctttctagaggggaaggcagatgatggatggataaatataaatgattctaataggttggtgcagcagtcattaaaagtgatggcaaaaaaaaaaaaaaaagaaacggggaggagccgttgctgcagttcattaatagtaatggcaaaacccgcgatgacttgtgcgccaacctaacccagtaaccacgggtgtgcaaatgtggcgatgggcaagttccgagtgctaggagagcatctagcttcccggagtcaggagacgggggttggcaacctaaccaaggttaagtccaagtgaggggggtgggcagggagcgatatttcagtggagactccaaggatgaatggtatttagagagtaaaccccgatagagggtttgtgtctggcacagagaagagcctgtgcaaaagctggtggggcgagaggacaccgtgtgttcatccacctgacgggcgaccagcaggctggagctcagcgggttgagaggaggatgcagaacccgggaaaggcaccctaggcagagggcacagaagcgcaaaggcctggagtcaggcctgagcctgtgtggtttgaggaacggacagaggcctgtccgtcaggaagggaacggcacaggggagagaccttaggccacagcagagggcagggcagagggcagggccgtgctgggcagtgtgggctgtggatggtgctggcatttaagaggggagaccatagaccagggcaaagggcagggccgtgctgggcactttgggctgtggatgggagctggcatttatgctcaggtgatgggaatgtgttaaaagattttaaggaggggagtaacagttgggattaatgtgtattctgggaatctcaacaaagtaaattcatagtttgaattttcataagacttctgcacaggcagagagaaataagatcgtgtctacagctgtgtgatgattttattgaaaaacattactaagtttttaaacgtgatttcaaatggtgtgtttctgtttcaccttggacataagtagattgcaaggctaatggaaagtagaaaagttaaytcatgaacataaaagagatatcaatttgaaaacaaaacatttattcatttacttccgctgcagatttcttgactgctgaatttcatgagaagggattgttcagggagggacgtggggctgaagacctggagaggaggtggtgctaccgctgttcaaatctgagggtggtggagatggagccttggggaggagcaggtgctgccttttaagtctatgagagtcgttgagctggaggtccagggaggagccggtgctcccactgatgtcttaggttgtggagctgaagacaacgaaggagccagtgtggctgttctgtgagactcgtggagctggagatccaggtgggagaggtgttttagctcggggaagagctgatgttctaccttgagggtcctgcagctgcagacctggggaggagctaatgttctagtttgagtgtcatgcagctgcagacccggggaggagctgatgttctagtttgagtgtcatgcagctgcagacctggagaggagctgatgttctagattgagggtcgtgcagctgcagacccggggaggagctgatgttctagattgagggtcgtgcagctgcagacctggagaggagctgatgttctagattgagggtcgtgcagctgcagacccggggaggagctgatgttctagattgagggtcgtgcagctgcagacctggagaggagctgatgttctagtttgagggtcatgcagctgaagacccggggaggagctgatgttctagtttgagggtcatgcagctgcagacccggagaggagctgatgttctagattgagggtcgtgcagctgcagacctggagaggagctgatgttctagattgagggtcgtgcacctgcagacccggagaggagctgatgttctagattgagtgtcgtgcacctgcaaacccggggaggagctgatgttctcatttgagggtcgtgcagatgcagacccggagaggagctgatgttctagattgagggtcgtgcagctgcagacctggagaggagctgatgttctagtttgagggtcatgcagctgaagacccggggaggagctgatgttctagtttgagggtcatgcagctgcagacccggagaggagctgatgttctagattgagggtcgtgcagctgcagacctggagaggagctgatgttctagattgagggtcatgcagctgaagacccggggaggagctgatgttctagtttgagggtcatgcagctgcagacccggagaggagctgatgttctagattgagggtcgtgcagctgcagacctggagaggagctgatgttctagattgagggtcatgcagctgaagacccggggaggagctgatgttctagtttgagggtcatgcagctgcagacccggagaggagctgatgttctagattgagggtcgtgcagctgcagacctggagaggagctgatgttctagtttgagggtcatgcagctgaagacccggggaggagctgatgttctagattgagggtcgtgcagctgcagacctggagaggagctgatgttctagtttgagggtcgtgcagctgaagacccggggaggagctgatgttcta

SEQ ID NO: 688503 - DNA, 3155 bp, Homo sapiens
tgacatagccacaacctttccagggcccgagggagggtggatggacttatccatcccataggtgttgctcgtggctgggtgacttgcttctgccaacgagattttcacagacacggcacaagcagaagcctggaatgtgtgggcactgccaggcctgccctctaaggttcttgattttccccatgagatgcacgtgccccagggaacggccgctctggctgtgggatgagaggcatgtggagcaggcatggttcccatgcttagcctggagtcaaggccagactagatcagcctaagcccagccacgccatgggtgcaggagtgaagagcaaatgctaactgtccatggaattgactttcaaaggggcgtgtcatgtgcctcatcccagcaacagggaaggcatttctctatcagtcagttggtaaatgattattgacaaacaatgtgctgggaaggtggagtgatttgagtagatttggcctctattctcatggagcttcctttctagaggggaaggcagatgatggatggataaatataaatgattctaataggttggtgcagcagtcattaaaagtgatggcaaaaaaaaaaaaaaaagaaacggggaggagccgttgctgcagttcattaatagtaatggcaaaacccgcgatgacttgtgcgccaacctaacccagtaaccacgggtgtgcaaatgtggcgatgggcaagttccgagtgctaggagagcatctagcttcccggagtcaggagacgggggttggcaacctaaccaaggttaagtccaagtgaggggggtgggcagggagcgatatttcagtggagactccaaggatgaatggtatttagagagtaaaccccgatagagggtttgtgtctggcacagagaagagcctgtgcaaaagctggtggggcgagaggacaccgtgtgttcatccacctgacgggcgaccagcaggctggagctcagcgggttgagaggaggatgcagaacccgggaaaggcaccctaggcagagggcacagaagcgcaaaggcctggagtcaggcctgagcctgtgtggtttgaggaacggacagaggcctgtccgtcaggaagggaacggcacaggggagagaccttaggccacagcagagggcagggcagagggcagggccgtgctgggcagtgtgggctgtggatggtgctggcatttaagaggggagaccatagaccagggcaaagggcagggccgtgctgggcactttgggctgtggatgggagctggcatttatgctcaggtgatgggaatgtgttaaaagattttaaggaggggagtaacagttgggattaatgtgtattctgggaatctcaacaaagtaaattcatagtttgaattttcataagacttctgcacaggcagagagaaataagatcgtgtctacagctgtgtgatgattttattgaaaaacattactaagtttttaaacgtgatttcaaatggtgtgtttctgtttcaccttggacataagtagattgcaaggctaatggaaagtagaaaagttaactcatgaacataaaagagatatcaatttgaaaacaaaacrtttattcatttacttccgctgcagatttcttgactgctgaatttcatgagaagggattgttcagggagggacgtggggctgaagacctggagaggaggtggtgctaccgctgttcaaatctgagggtggtggagatggagccttggggaggagcaggtgctgccttttaagtctatgagagtcgttgagctggaggtccagggaggagccggtgctcccactgatgtcttaggttgtggagctgaagacaacgaaggagccagtgtggctgttctgtgagactcgtggagctggagatccaggtgggagaggtgttttagctcggggaagagctgatgttctaccttgagggtcctgcagctgcagacctggggaggagctaatgttctagtttgagtgtcatgcagctgcagacccggggaggagctgatgttctagtttgagtgtcatgcagctgcagacctggagaggagctgatgttctagattgagggtcgtgcagctgcagacccggggaggagctgatgttctagattgagggtcgtgcagctgcagacctggagaggagctgatgttctagattgagggtcgtgcagctgcagacccggggaggagctgatgttctagattgagggtcgtgcagctgcagacctggagaggagctgatgttctagtttgagggtcatgcagctgaagacccggggaggagctgatgttctagtttgagggtcatgcagctgcagacccggagaggagctgatgttctagattgagggtcgtgcagctgcagacctggagaggagctgatgttctagattgagggtcgtgcacctgcagacccggagaggagctgatgttctagattgagtgtcgtgcacctgcaaacccggggaggagctgatgttctcatttgagggtcgtgcagatgcagacccggagaggagctgatgttctagattgagggtcgtgcagctgcagacctggagaggagctgatgttctagtttgagggtcatgcagctgaagacccggggaggagctgatgttctagtttgagggtcatgcagctgcagacccggagaggagctgatgttctagattgagggtcgtgcagctgcagacctggagaggagctgatgttctagattgagggtcatgcagctgaagacccggggaggagctgatgttctagtttgagggtcatgcagctgcagacccggagaggagctgatgttctagattgagggtcgtgcagctgcagacctggagaggagctgatgttctagattgagggtcatgcagctgaagacccggggaggagctgatgttctagtttgagggtcatgcagctgcagacccggagaggagctgatgttctagattgagggtcgtgcagctgcagacctggagaggagctgatgttctagtttgagggtcatgcagctgaagacccggggaggagctgatgttctagattgagggtcgtgcagctgcagacctggagaggagctgatgttctagtttgagggtcgtgcagctgaagacccggggaggagctgatgttcta

SEQ ID NO: 688504 - DNA, 3155 bp, Homo sapiens
tgacatagccacaacctttccagggcccgagggagggtggatggacttatccatcccataggtgttgctcgtggctgggtgacttgcttctgccaacgagattttcacagacacggcacaagcagaagcctggaatgtgtgggcactgccaggcctgccctctaaggttcttgattttccccatgagatgcacgtgccccagggaacggccgctctggctgtgggatgagaggcatgtggagcaggcatggttcccatgcttagcctggagtcaaggccagactagatcagcctaagcccagccacgccatgggtgcaggagtgaagagcaaatgctaactgtccatggaattgactttcaaaggggcgtgtcatgtgcctcatcccagcaacagggaaggcatttctctatcagtcagttggtaaatgattattgacaaacaatgtgctgggaaggtggagtgatttgagtagatttggcctctattctcatggagcttcctttctagaggggaaggcagatgatggatggataaatataaatgattctaataggttggtgcagcagtcattaaaagtgatggcaaaaaaaaaaaaaaaagaaacggggaggagccgttgctgcagttcattaatagtaatggcaaaacccgcgatgacttgtgcgccaacctaacccagtaaccacgggtgtgcaaatgtggcgatgggcaagttccgagtgctaggagagcatctagcttcccggagtcaggagacgggggttggcaacctaaccaaggttaagtccaagtgaggggggtgggcagggagcgatatttcagtggagactccaaggatgaatggtatttagagagtaaaccccgatagagggtttgtgtctggcacagagaagagcctgtgcaaaagctggtggggcgagaggacaccgtgtgttcatccacctgacgggcgaccagcaggctggagctcagcgggttgagaggaggatgcagaacccgggaaaggcaccctaggcagagggcacagaagcgcaaaggcctggagtcaggcctgagcctgtgtggtttgaggaacggacagaggcctgtccgtcaggaagggaacggcacaggggagagaccttaggccacagcagagggcagggcagagggcagggccgtgctgggcagtgtgggctgtggatggtgctggcatttaagaggggagaccatagaccagggcaaagggcagggccgtgctgggcactttgggctgtggatgggagctggcatttatgctcaggtgatgggaatgtgttaaaagattttaaggaggggagtaacagttgggattaatgtgtattctgggaatctcaacaaagtaaattcatagtttgaattttcataagacttctgcacaggcagagagaaataagatcgtgtctacagctgtgtgatgattttattgaaaaacattactaagtttttaaacgtgatttcaaatggtgtgtttctgtttcaccttggacataagtagattgcaaggctaatggaaagtagaaaagttaactcatgaacataaaagagatatcaatttgaaaacaaaacatttattcatttacttccgctgcagatttcttgactgctgaatttcatgagaagggattgttcagggagggacgtggggctgaagacctggagaggaggtggtgctaccgctgttcaaatctgagggtggtggagatggagccttggggaggagcaggtgctgccttttaagtctatgagagtcgttgagctggaggtccagggaggagccrgtgctcccactgatgtcttaggttgtggagctgaagacaacgaaggagccagtgtggctgttctgtgagactcgtggagctggagatccaggtgggagaggtgttttagctcggggaagagctgatgttctaccttgagggtcctgcagctgcagacctggggaggagctaatgttctagtttgagtgtcatgcagctgcagacccggggaggagctgatgttctagtttgagtgtcatgcagctgcagacctggagaggagctgatgttctagattgagggtcgtgcagctgcagacccggggaggagctgatgttctagattgagggtcgtgcagctgcagacctggagaggagctgatgttctagattgagggtcgtgcagctgcagacccggggaggagctgatgttctagattgagggtcgtgcagctgcagacctggagaggagctgatgttctagtttgagggtcatgcagctgaagacccggggaggagctgatgttctagtttgagggtcatgcagctgcagacccggagaggagctgatgttctagattgagggtcgtgcagctgcagacctggagaggagctgatgttctagattgagggtcgtgcacctgcagacccggagaggagctgatgttctagattgagtgtcgtgcacctgcaaacccggggaggagctgatgttctcatttgagggtcgtgcagatgcagacccggagaggagctgatgttctagattgagggtcgtgcagctgcagacctggagaggagctgatgttctagtttgagggtcatgcagctgaagacccggggaggagctgatgttctagtttgagggtcatgcagctgcagacccggagaggagctgatgttctagattgagggtcgtgcagctgcagacctggagaggagctgatgttctagattgagggtcatgcagctgaagacccggggaggagctgatgttctagtttgagggtcatgcagctgcagacccggagaggagctgatgttctagattgagggtcgtgcagctgcagacctggagaggagctgatgttctagattgagggtcatgcagctgaagacccggggaggagctgatgttctagtttgagggtcatgcagctgcagacccggagaggagctgatgttctagattgagggtcgtgcagctgcagacctggagaggagctgatgttctagtttgagggtcatgcagctgaagacccggggaggagctgatgttctagattgagggtcgtgcagctgcagacctggagaggagctgatgttctagtttgagggtcgtgcagctgaagacccggggaggagctgatgttcta

SEQ ID NO: 688505 - DNA, 600 bp, Homo sapiens
tactcctttcttactataattatagtcatttttaaaaccctcaacagggctgggcgcgatggctcactcctgtaatcccagcactttgggaggctgaggcgggcagatcatgaggtcaggagttcaagaccagcctggccaaaatagtgaaaccctgtctctaccaaaaatacaaaaattagccaggcgtggtggtgggtacctrtagtcccagctactggggaggctgaggcaggagaatcgcttgaacccaggaggcagaggttgcagtcagccgaggtggcaccactgcactccagcctgggtaacataacgagactctgtctcaaaaaaaacaaaacaaaaaccctcaacaaagtagccattaaaggaacatacctcaaaatcataagagccgtctatgacaaacccacagcaacatcatactgaatgggtaaaagctggaaacattccccttgagaaccagaacaaaacaaggatgcccactcttagcactcctatttagcatagttctggaagtcctagccagagcaatcaggtaagagaaagaaataaaaggtatcctaagaggaagagaggaagtcaaactctttctttgca

SEQ ID NO: 688506 - DNA, 1430 bp, Homo sapiens
ccatcttggctctatttttagagaactcggccacagcatcagggctctcttctatcatccatcaatcaacaagcccatgctgagtacaggctgtgcccagcatggtgtatgggcaattgcagggcattgtgacatggggccagaggcccaggtgctcacccctgctcagcatgtgacattggtcagggtgttcagccttgctgagacttcgttttcccttccatgatggcaacaacgtgccctttcccgaatggtgtgatatcaaagtatttggaaaagcacaaagtgctattaaacttctttatacatttgcctgytctgaacatcccaaagaaatgaaatcctacaatatgccagggtctcactatgttggccaggctggtcttgaacgcctagtctcaagcaatcctcctgtcttagcctcccaaagtgctgggattacaggtgtgagccaccacacctggccttttttgtttgtttgtttttcttgtttttgttttatgagacggagtcttgctctgtcacccaggctggagtgcagtggtgcaatctcagctcactgcaacctccacctcccaggctcaagtgatcctcctgcctcagcctcccaagtagctgggattacagtcgtgcaccaccacacttggctaattttttgtatttttagtagagatgatgtttcgacatgttgcccaggctgactcctgagttcaagtgatccacccacctcggtcttccaaagcgctgggattataggcatgagccactgtgcctggcctattgtttttttctttttcttttcgtttctttttttttttttttaaacgtcttgtcttaagccacccagtttgtggtattttgttatggcagccacagcaaatggatacacctcctatcagtgtgtcctgagaagcgggggcttgtgatccaggttctcaaagttcacagcatatctatgattaagggggaagactttgaccttgaacttgaagaaatattgtactgtaccacatcagaacaaagactccctaaggaatgcccataggaggtgccctagccaaaccacaaaaggaataaatacggtggagggcatagagaaacgaaacgaaactaaactaaacaaaaaagtaacctactatatagtacttttgagtcaaacagacctaggtgaggaaatgtgttttctgatgggtagaatgataacttaactcatttgagttgttgaaacaatgtaaatcagatactgcctgtaagtgcttttcacaatgattaacacattttaaaaactaaacacatcttagctattgttttattattattgcaaatggtgtgagctcttggaatataacttctctgagccgtggcttctttgttcataaaacaagaataatagaaggttgggcgcagtggctcacacctgtaatcccagc

SEQ ID NO: 688507 - DNA, 1430 bp, Homo sapiens
ccatcttggctctatttttagagaactcggccacagcatcagggctctcttctatcatccatcaatcaacaagcccatgctgagtacaggctgtgcccagcatggtgtatgggcaattgcagggcattgtgacatggggccagaggcccaggtgctcacccctgctcagcatgtgacattggtcagggtgttcagccttgctgagacttcgttttcccttccatgatggcaacaacgtgccctttcccgaatggtgtgatatcaaagtatttggaaaagcacaaagtgctattaaacttctttatacatttgcctgctctgaacatcccaaagaaatgaaatcctacaatatgccagggtctcactatgttggccaggctggtcttgaackcctagtctcaagcaatcctcctgtcttagcctcccaaagtgctgggattacaggtgtgagccaccacacctggccttttttgtttgtttgtttttcttgtttttgttttatgagacggagtcttgctctgtcacccaggctggagtgcagtggtgcaatctcagctcactgcaacctccacctcccaggctcaagtgatcctcctgcctcagcctcccaagtagctgggattacagtcgtgcaccaccacacttggctaattttttgtatttttagtagagatgatgtttcgacatgttgcccaggctgactcctgagttcaagtgatccacccacctcggtcttccaaagcgctgggattataggcatgagccactgtgcctggcctattgtttttttctttttcttttcgtttctttttttttttttttaaacgtcttgtcttaagccacccagtttgtggtattttgttatggcagccacagcaaatggatacacctcctatcagtgtgtcctgagaagcgggggcttgtgatccaggttctcaaagttcacagcatatctatgattaagggggaagactttgaccttgaacttgaagaaatattgtactgtaccacatcagaacaaagactccctaaggaatgcccataggaggtgccctagccaaaccacaaaaggaataaatacggtggagggcatagagaaacgaaacgaaactaaactaaacaaaaaagtaacctactatatagtacttttgagtcaaacagacctaggtgaggaaatgtgttttctgatgggtagaatgataacttaactcatttgagttgttgaaacaatgtaaatcagatactgcctgtaagtgcttttcacaatgattaacacattttaaaaactaaacacatcttagctattgttttattattattgcaaatggtgtgagctcttggaatataacttctctgagccgtggcttctttgttcataaaacaagaataatagaaggttgggcgcagtggctcacacctgtaatcccagc

SEQ ID NO: 688508 - DNA, 900 bp, Homo sapiens
cagcattttggtgttttagtaaattcaataattccaaggacccataaataaaacaaaacagtttctgttagagaaaattacctaggaaagtgaaaagaagtatttaaagcagaataaaattaaaacaggaaaactcaaaatatttattttcactgaaaaggcttttgttactcttttccctattgaacaacattaactgataaataagttgtatttttgtggtggtctgtatcatgaccttacatccattttcttattttatcaccatcctatgtgagatagatagagcttgtcaaaaactaagaaatgaaagacaccrggcgcggtggctcatgcctgtaatcccagcactttgggaggccgagacgggtggatcatgaggtcaggagatcgagaccatcctggctaacacagtgaaaccccgtctctactaaaaatacaaaaaattagccgggcgtggtgccgggtgcctgtagtcccagccactcgggaggctgaggcaggagaatggcgtgaacccgggaggcggagcttgcagtgagccgagatcgcgccactgcgctccagcctgggtgacagagtaagactgtctcaacaacaacaaaaaagaaatgaaagcatgagacctcttgagcaacttaaaaaaaaaaaaaacagtacaaggtaaatctatttttcaactagtacatgcagtttttattccgccgtgattagtacagtgaagttaggcaactacggatacagtaatggcaggtcagctcttctgaagtcaaatctaatgttctttcatagctatcacagaatttcatttcaatcctacctcactttttcttcctgccacccatttccaaacacataaggaatgtaaagcacataagaagttataacttccccaagatt

SEQ ID NO: 688509 - DNA, 900 bp, Homo sapiens
cagcattttggtgttttagtaaattcaataattccaaggacccataaataaaacaaaacagtttctgttagagaaaattacctaggaaagtgaaaagaagtatttaaagcagaataaaattaaaacaggaaaactcaaaatatttattttcactgaaaaggcttttgttactcttttccctattgaacaacattaactgataaataagttgtatttttgtggtggtctgtatcatgaccttacatccattttcttattttatcaccatcctatgtgagatagatagagcttgtcaaaaactaagaaatgaaagacaccgggcgcggtggctcatgcctgtaatcccagcactttgggaggccgagacgggtggatcatgaggtcaggagatcgagaccatcctggctaacacagtgaaaccccgtctctactaaaaatacaaaaaattagccgggcgtggtgccgggtgcctgtagtcccagccactcgggaggctgaggcaggagaatggcgtgaacccgggaggcggagcttgcagtgagccgagatcgcgccactgcgctccagcctgggygacagagtaagactgtctcaacaacaacaaaaaagaaatgaaagcatgagacctcttgagcaacttaaaaaaaaaaaaaacagtacaaggtaaatctatttttcaactagtacatgcagtttttattccgccgtgattagtacagtgaagttaggcaactacggatacagtaatggcaggtcagctcttctgaagtcaaatctaatgttctttcatagctatcacagaatttcatttcaatcctacctcactttttcttcctgccacccatttccaaacacataaggaatgtaaagcacataagaagttataacttccccaagatt

SEQ ID NO: 688510 - DNA, 621 bp, Homo sapiens
tcattgaatctctctaagtctcwattttccaagttgagaaatggcgataatggagtctcatagtcctgctgagatgatggaataatcgtattttgaatacctgccagatagaggcaccttacctgttagaactctttctccccaccttcatctttctcatgcaatgtatatacatgattagaatgacctcatacatccagcatataaaataaaagcaagtgaatatcttatcgtatattgtgacaagggattgaaaattctaaagaggtgtttataaatacctgaaaaaaaagcttgtaaggatgaggccacattatttcagagtccctattgcctccaaccttgccaaaactgctattagcatttagctgtttagctaaaatgggccttttcttcattgtggacttcctcttatgactttcgtattggcgaggggactttggaaaattcatgcaaagacctaccacatagtcgttttctgaactgcagaattttgtctaagattataaaggccagaaatgtccaaagggaggagacactggatataaacaaaatgaacaaggggaaagtagaaagagcatttaaatgcttccatgtccaggcccagtgtgcacaggcttt

SEQ ID NO: 688511 - DNA, 1260 bp, Homo sapiens
ctcttaatgaattgatcaatttatgtttatgtaattatttctactatgttctcttatgctaagcatcctgttttctattcttttgtttttgcattcttgtggactgatttttagcttcattttccaattagttcatttggaaattatatacgctttttattcttaatggttatcctaatttttattatacatactcaaaatacaaggatcttaaaacattataaaaacaattgtattctctattcttacttattatgttacatggttttaatatcttttgttagcctcccagtgttattcattattattgtgttatacggccaatgtttgtctgaattttacccatatgtttattaacttcgtctttgctatttttccttgcatctcagtatttcctttgaagtcattttwctttttcctaaaaaatacatttcaagcatccttttagaatatttggatagtgataagctcttcgttttcaatttatctgtacatttttcttttttctttaaggatttagctagattaacctgtattttatctcaaaatagttttggtttctattgttgctctaatgattccactcattctaatgtaatttcgctgtagataatttatcatttctcccaagctgaagttttaaaatttcatttcagtaggtatttactgagttattactaagtgttggatgtttgattaaatgatggggacaatagatgaataaggtaacatccccactctaaaagaactcacagtctagtgatgggtatgtatgtacaatcataatataatgggcatcaagaaaagtatgaaccgggtgttctaaaagtgagtggagaatatttaacccattgtggggggtaggatgattgggaaggcttgttggccaaagtgggaaacttaatcgtaaaagagtattgtaaggtaaaaggcaggaaagaagacagtgacaagtatgaagagttgggttgtaccataatttaagttatgaagaagtagcaggaacaaaatctgaattgcgtaagacctctcaggactaaagtatttcaggtatctcagtaattacatcatattagctccacctctcttactgtactggaagttctcaaaggcaagaaccatacttacatgatttttgcaatctccccattgcctagtatagtgcatgacatctttgctcaatacatataaaactaataaatcataatctctaagtgttatgataccactatgagatcagataatcccactgggcatgca

SEQ ID NO: 688512 - DNA, 1260 bp, Homo sapiens
ctcttaatgaattgatcaatttatgtttatgtaattatttctactatgttctcttatgctaagcatcctgttttctattcttttgtttttgcattcttgtggactgatttttagcttcattttccaattagttcatttggaaattatatacgctttttattcttaatggttatcctaatttttattatacatactcaaaatacaaggatcttaaaacattataaaaacaattgtattctctattcttacttattatgttacatggttttaatatcttttgttagcctcccagtgttattcattattattgtgttatacggccaatgtttgtctgaattttacccatatgtttattaacttcgtctttgctatttttccttgcatctcagtatttcctttgaagtcatttttctttttcctaaaaaatacatttcaagcatccttttagaatatttggatagtgataagctcttcgttttcaatttatctgtacatttttcttttttctttaaggatttagctagattaacctgtattttatctcaaaatagttttggtttctattgttgctctaatgattccactcattctaatgtaatttcgctgtagataatttatcatttctcccaagctgaagttttaaaatttcatttcagtaggtatttactgagttattactaagtgttggatgtttgattaaatgatggggacaatagatgaataaggtaacatccccactctaaaagaactcacagtctagtgatgggtatgtatgtacaatcataatataatgrgcatcaagaaaagtatgaaccgggtgttctaaaagtgagtggagaatatttaacccattgtggggggtaggatgattgggaaggcttgttggccaaagtgggaaacttaatcgtaaaagagtattgtaaggtaaaaggcaggaaagaagacagtgacaagtatgaagagttgggttgtaccataatttaagttatgaagaagtagcaggaacaaaatctgaattgcgtaagacctctcaggactaaagtatttcaggtatctcagtaattacatcatattagctccacctctcttactgtactggaagttctcaaaggcaagaaccatacttacatgatttttgcaatctccccattgcctagtatagtgcatgacatctttgctcaatacatataaaactaataaatcataatctctaagtgttatgataccactatgagatcagataatcccactgggcatgca

SEQ ID NO: 688513 - DNA, 600 bp, Homo sapiens
ggaaaacaaatctgaaattcaatccatgcgttgatcactagttcccttcagacacagcgctttgcaggctgaggagcatatgaccagaaccggagagatgggagggtccatggatgaaggtctggaggtaaagtctccttggtcccatcctgactactccccaartgaccatgagaaaatccatcgcttttgcaagaatcacaaatctgacctcctaaagctgaagtacagagtagaattgggggagcattctaaggcttgctgtaaaattaatcaccacacaataataattttaaaaagccgttgccagagggagaaaggcataaagtcactgaggtcacagtatcaagctatcattttgatgtacagttcccaaagagatcagtctactctgacttagaacacattatttttgataaaattgcaacctgtcagggatagcaaagaacccggattcttcagattaaaaacctaggatgcagatggacagcctagggtactctgagaagggggttgtgtgtggtgggcggagggggcatatgaggactgtccttgctggagtggaatggaataccgaccaatctcttgttcgtctgttca

SEQ ID NO: 688514 - DNA, 600 bp, Homo sapiens
ggaaaacaaatctgaaattcaatccatgcgttgatcactagttcccttcagacacagcgctttgcaggctgaggagcatatgaccagaaccggagagatgggagggtccatggatgaaggtctggaggtaaagtctccttggtcccatcctgactactccccaaatgaccatgagaaaatccatcgcttttgcaagaatcacaaatctgacctcctaaagctgaagtacagagtagaattgggggagcattctaaggcttgctgtaaaattaatcaccacacaataataattttaaaaagccgttgccagagggagaaaggcataaagtcactgaggtcacartatcaagctatcattttgatgtacagttcccaaagagatcagtctactctgacttagaacacattatttttgataaaattgcaacctgtcagggatagcaaagaacccggattcttcagattaaaaacctaggatgcagatggacagcctagggtactctgagaagggggttgtgtgtggtgggcggagggggcatatgaggactgtccttgctggagtggaatggaataccgaccaatctcttgttcgtctgttca

SEQ ID NO: 688515 - DNA, 600 bp, Homo sapiens
ggaaaacaaatctgaaattcaatccatgcgttgatcactagttcccttcagacacagcgctttgcaggctgaggagcatatgaccagaaccggagagatgggagggtccatggatgaaggtctggaggtaaagtctccttggtcccatcctgactactccccaaatgaccatgagaaaatccatcgcttttgcaagaatcacaaatctgacctcctaaagctgaagtacagagtagaattgggggagcattctaaggcttgctgtaaaattaatcaccacacaataataattttaaaaagccgttgccagagggagaaaggcataaagtcactgaggtcacagtatcaagctatcattttgatgtacagttcccaaagagatcagtctactctgacttagarcacattatttttgataaaattgcaacctgtcagggatagcaaagaacccggattcttcagattaaaaacctaggatgcagatggacagcctagggtactctgagaagggggttgtgtgtggtgggcggagggggcatatgaggactgtccttgctggagtggaatggaataccgaccaatctcttgttcgtctgttca

SEQ ID NO: 688516 - DNA, 600 bp, Homo sapiens
ggaaaacaaatctgaaattcaatccatgcgttgatcactagttcccttcagacacagcgctttgcaggctgaggagcatatgaccagaaccggagagatgggagggtccatggatgaaggtctggaggtaaagtctccttggtcccatcctgactactccccaaatgaccatgagaaaatccatcgcttttgcaagaatcacaaatctgacctcctaaagctgaagtacagagtagaattgggggagcattctaaggcttgctgtaaaattaatcaccacacaataataattttaaaaagccgttgccagagggagaaaggcataaagtcactgaggtcacagtatcaagctatcattttgatgtacagttcccaaagagatcagtctactctgacttagaacacattatttttgataaaattgcaacctgtcagggatagcaaagaacccggattcttcagattaaaaacctaggatgcagatggacagcctagggtactctgagaagggggttgtgtgtggtgggcggagggggcatatgaggactgtccttgctggagtggaatggaataccraccaatctcttgttcgtctgttca

SEQ ID NO: 688517 - DNA, 513 bp, Homo sapiens
caaatatatggacaatgttgaataacatgagatgctcaaaaagcagagggggggcatctgcgttttctcaccacctgcttgggggctctgtaatgaatccaaactgttgcctatccatgctcccaggaaatgagctgcgggtctccatctttcctttctttctcccaagccatagaccccattcagcctcaccataccgcagcctcgtgccctttcctccccagcagaacaatgcagccacaccattgtacttcagttttcaaagactttgcacatccatcagtttgttgaaacctcatcaacaccccatgtggcaggctggcaagtacttattcaccccaatttagttaccagtgatkttttgcagtgggaaccaaaacttatgtctcacactttctctcctttgcttttactgatagctttctaattttcatggggtcacttactggcagggtggcctgggatgaaactgatcctcttgaatctcagcttccaccttggtcaacaacaaaa

SEQ ID NO: 688518 - DNA, 604 bp, Homo sapiens
attgtccattgttgacctaaatrtcattatgagatgcctaattgtgtatgtatgtatatgtaaatcaatcgcatattttaaatctttatgtatttgtttttgcattaagttctttaatttgtctgaaattctttttggtgtaggttatgaggttattattttctggaggctcagttgcctcaatgtttatcacataatccactgtttatccactaattttaactggtatctttttcgtatactaaattctctcatgtatttggtttgatttgtaggcttgctattctgtcccaatgatctatctgtctattaatatccagtaacatatcttttaaaaatatcctaacattatatattctaaagttcagctcatcttgttttgtttcaaaaacaatctgttgttaattttatttagtactgcattaaatttgtagatgaacttagggagaatcctcttgatttttgaattttctttttggcccagtcttttccttggcctgagcttgattactcaaattaatctgtcaggtctaggcctgttgatgtcacacctctgataggaacatcctggggcaaattggcctggagctgtctgggtgcagca

SEQ ID NO: 688519 - DNA, 666 bp, Homo sapiens
ttttcatttcaaaacttgtcatgtccttgctttgtcccccaaatagtggraacaaacatggctctaaatctacaagtgagttcaagtgtctcgagtgcccatattgtgctggacactagaggtggggtaggatgcaaacatagtagatataaagttcttgcctctaatcaatgtatgctctggagatgcaaaacatctcaaacacaaaataaaataatccaaatgctatatggcatggtaaaggagtaatctaggggtggactactctgagagtccaggaaagatggtttcagggactttgcattgttagtccctatagtggattaaatgatggcccaaaacaagatacatccataccaagcccccagaacctgtgaatgtgacctgatttgaaaaagggtttttgcagatgtcattaagttaaggatcttgagaagagatcattctggattacctaggtgggccctaaatccagtgacagacatctttataagagacaagaaaagcaagaagaggagatggtgacgtgaaaatagaggtagagattggagtcatgcaaccacaggctgaggaatgtgtggagccaccataagttagaagagaaaaaggaagattctgccctggtgactctggagaaagtgcagccctgccaacaccttcattcca

SEQ ID NO: 688520 - DNA, 601 bp, Homo sapiens
cttttccagttaactggaaatccctttcaaaatgtagattcagatcctttttatttctgataatttttcatggattataatgttaaatattctgttccattgttttttatttcttcttcaggggttccaattatatgtgagttatttatcttttgttcaactttctctttctgaccatttttccttcttttctgtatcgtatttatttgtttatttttgcatctatccagtgtctaagttttcattagtctgttttcctttggacaccttgtaatttagtcttcatttataattcccccccttccatttctttcttgaattcaataatctttmaatttactcgtggtttttttaatctatttctgttttttatattttgaatttccaattcacggtgctttttcatatccccaaatgcttatctgaggattttattcagtttgatatgttgtgttacaattttcttctgatttaatggttgctttttggtagagaattttcatcagccaatgcatgttaattattgtttgctgatttctcatactaccattatatagatttagtccatttccttccattcatttttttgaatttgaggggt

SEQ ID NO: 688521 - DNA, 1255 bp, Homo sapiens
  misc_feature 1154, 1155, 1156, 1157, 1158, 1159, 1160, 1161, 1162, 1163,1164, 1165, 1166, 1167, 1168, 1169, 1170, 1171, 1172, 1173,1174, 1175, 1176, 1177, 1178, 1179, 1180, 1181, 1182, 1183,1184, 1185, 1186, 1187, 1188, 1189, 1190, 1191, 1192: n = A,T,C or G
  misc_feature 1193, 1194, 1195, 1196, 1197, 1198, 1199, 1200, 1201, 1202,1203, 1204, 1205, 1206, 1207, 1208, 1209, 1210, 1211, 1212,1213, 1214, 1215, 1216, 1217, 1218, 1219, 1220, 1221, 1222,1223, 1224, 1225, 1226, 1227, 1228, 1229, 1230, 1231: n = A,T,C or G
  misc_feature 1232, 1233, 1234, 1235, 1236, 1237, 1238, 1239, 1240, 1241,1242, 1243, 1244, 1245, 1246, 1247, 1248, 1249, 1250, 1251,1252, 1253: n = A,T,C or G
ataatagcacactgtttatataaaatttgaaaatatgcaaacttaatccactatattgagattaaggatacacaatgagctagaccacactacaaagactggtccaggctggctctggagggctggctgggatgactcccacattggtttactgctggacccgtgtggaggtgagagtggggagtcatcttgctcggacctcccttgctcctcagggacgcatgcccgaagctctgtggtctcaacagccctcatggagtgaagaaatccctgacagtaggatctcttacctgtgggcccactggctttcatacactgactgggggccaatgtattgtcatacagggatttcttgctacaccacagttgtaaacacccacattttatttatttgccgaagcactgtaactgcccaatgggttcaccttgcccgctgcctacatagagctgatttatcaagacaggtgaattgcaatggagaaagagtaattcacacagagccggctgtgtaggagaccggaattttattattactcaaatcagtcttcccaagcattcagggatcagagtttttaaagataatttggtggataggggcttaggaagagctgattgttcaggttagggggtcgaagttaggttttcttaatgtcttctgttcctaggtgctatggcagcactgattgggccagattaccgatctggttggtgtcagctgatccatcgagtaccgggtctgcaaaatttctcaagcactgatcttaggctttacaatagtgatgttatccccaggagcaatttggggaggttcaaactcttggagccagattgctgcatgacccctaaattgtaatttctaatcttgtagctaatttgttagtcctgcaaaggcagactggtccccaggcaagaagggcgtcttttcaggatagggctattatcagctttgtttcagagccaaaccatgaactgaatttctccccaaagttagttcggcctatgcacaggaatgaagaaggacagcttgaaggttagaagcaagatggagtyggttaggactgatttctttcactgccaatatttcctcagttataattttgcagaggcagtttcagcatcagtcctcttcaagattctggttcaataggcttgannnnnnnnnnnnnnnnnnnnnnnnnnnnnnnnnnnnnnnnnnnnnnnnnnnnnnnnnnnnnnnnnnnnnnnnnnnnnnnnnnnnnnnnnnnnnnnnnnnntc

SEQ ID NO: 688522 - DNA, 1870 bp, Homo sapiens
  misc_feature 2, 3, 4, 5, 6, 7, 8, 9, 10, 11, 12, 13, 14, 15, 16, 17, 18,19, 20, 21, 22, 23, 24, 25, 26, 27, 28, 29, 30, 31, 32,33, 34, 35, 36, 37, 38, 39, 40, 41, 42, 43, 44, 45, 46,47, 48, 49, 50, 51, 52, 53, 54, 55, 56, 57, 58, 59, 60,61: n = A,T,C or G
  misc_feature 62, 63, 64, 65, 66, 67, 68, 69, 70, 71, 72, 73, 74, 75, 76,77, 78, 79, 80, 81, 82, 83, 84, 85, 86, 87, 88, 89, 90,91, 92, 93, 94, 95, 96, 97, 98, 99, 100, 101: n = A,T,C or G
annnnnnnnnnnnnnnnnnnnnnnnnnnnnnnnnnnnnnnnnnnnnnnnnnnnnnnnnnnnnnnnnnnnnnnnnnnnnnnnnnnnnnnnnnnnnnnnnnnncttcatcacagtgaatctatgatttcttctcatttcctgggatcacatctaagttcccagacacttacagatcatactggcatgaggccaggttgggggatatctggtttcccatcattaatctatacagacaggtgttgacttgtctttattccagctttgtcttagttgttgggtccacacgggttgtcttccttatcatgaccacaaggctgcatcaggtcagctctcctttagctacttctatacatgggaaacatttgactgatcccttaagcatgctgggctccacagaaactctgggatgctgggttagacccatttccccaggcactccatgtagacatctctcttctacttcccctccaatactgttgttgaaatttcattgccattctaacagtgttgagaggtggggtctttaagaagtaattaggccatgagagctccacccttttgaatggattaatgctattatcttgggagtgggctagttactgtgaacgtttggcctccttccctctctgtcttgggcacatgcttgccattccattttttgccatgggatgatgatacagcacaaaggtcattgccagatgccagtgccatgctgttggacttcccagcctccagaaccatgagccaaacaaacttctattgcttgtttataaattatgcagtctcaggtactttattatagcaacacaaaatggattaagacatggtgttaaagcataattctcaaactgttaagaaacataattctcatacatatagatgacaagctcatgaaggaaccagtaacaaaataagagctagtttgaaaaaaatttgaggaacagggattacatggctagtggggaaaggaatatagaaataagattgctaaatagatacaaaacaagttaatgctctatagagtaaaaaaaaccacacgcacaaatgcaggcattggagttatcttctctaccaagctgccttctcctccctcaaaaatcaccacaccttatcatttttctacaagttcatctctgacttttcaggatgaagacatgtgtagaccatggtcaaaagcactttccctgagtgaatcagatgacccttcacagactatttagaaatggcatgcagccattagatttgccttatttctaagttttagatactttttcctgcatagtgtcataaactttatgtcctgggtcctttagggtttatatttttgaaatgtcaaagctaatatttgattcttgctctcagcttttctgtcataataactcttccttcttaaacctaggaaagaataatcttaaaccagagctggtataygctcagaattcaaccgaaagtcacaggaacaagcagtaccagactcttctggaactgggggtgttaatggattgacaggcacagtgagtacctgaaatagggaattaagtgactgtatattttctcagtgctgaatgtagaaactcccagcccttccctcactcagtgccagaatgatgacactcagacctttaccatcttggaaggagatagaaaactctctggctcattttgccagtccaaaggaaagacctaaggtaggtcttccccaacaaatgggttactcacatcaccctacagtaaagtgtaggtttctcaagttcaaactacatactcagagctcccaagcagactttcagtttttgtgttagtctgtttttgcgttgctataaagaaatacctaagactgagcaatttataaagaaaagaggtttattgac

SEQ ID NO: 688523 - DNA, 1393 bp, Homo sapiens
agctgtttgtgcgtctttgtcatccctggactgtgattcacctctgagcagaacttacccatcttactcatcatactgtaggcgcttaataaatgttagctgcacgagagtgctgggacaggggttctttgcacaaacctcttattcccatctaatctcttccccaaatataaactacagagaacaacacttgcccattctgattcccagggacatggtacaaacaagggaggtataatctctaaacctgctcacaataaatacatagtgaactcaatgcctgggtttgcagggagggcaaggacactgaaattgcttagtagctcttcgtgaacaatagccacaaaatgcatcatcctctggcctacccattccatcttcaggaatgtatgtccagtgagctgacttaaagaaagaaaaagaaaaaaaacgcaaagatttttatagatgcactctatataacagctccaaattggaaagagcccaaatgcctagaattaagaaatggttaggtacaacccgttgttgtattgccatttaaactgacaaatgtgtggacaatgtaaccatatggaaagctccatataaaatgacatcaatcaaaaaaactggaacccaaatagtatacaaacagtgatcataataatcttgtaaactgtgtgaattagacacaacatgaacacctggtatttattttggtatgtatttgttacttactgcttatttttattgtgaagatggctaaatagtcaaaaaaaaagcaaaggagataatagctagaagcatttgttctcaaagaggagaaatccaagaaatgtactgagggactgtcaagcctcagccccaggaggcttctgacactctgggagcagctggggtttaccctccaccatgccagcagagcctacccgcccttaacctgcactctctgggcccctcacaggagggaatgggggcacaaatgctcctgggagaataatgccacgcctcaggcagcccctcaggcctggaatgcctggcctggacaaatgctttgaggcccaagcatccacaccagacatstgcacactgcaagcccccgagagcagcaggtaactctcaagagagtgcccaaaggaagctgagacgtagctggtggccgaggtcactttcccgcctcgccgcttctgacagcactcacacaccggaggcttctccttctgaggaccaagaggcagggcattctcctctcctccctctttcccattcagaggcacagagggcagctcccaggagacttcttcctcccagtcccaacctagcaccaacttatatagggattgagggcgagaaagggtggcaggaacaaaggagaagggaagaaatactagcataatagtaaaaagcggttaat

SEQ ID NO: 688524 - DNA, 1351 bp, Homo sapiens
  misc_feature 646, 647, 648, 649, 650, 651, 652, 653, 654, 655, 656, 657,658, 659, 660, 661, 662, 663, 664, 665, 666, 667, 668, 669,670, 671, 672, 673, 674, 675, 676, 677, 678, 679, 680, 681,682, 683, 684, 685, 686, 687, 688, 689, 690, 691, 692: n = A,T,C or G
  misc_feature 693, 694, 695, 696, 697, 698, 699, 700, 701, 702, 703, 704,705, 706, 707, 708, 709, 710, 711, 712, 713, 714, 715, 716,717, 718, 719, 720, 721, 722, 723, 724, 725, 726, 727, 728,729, 730, 731, 732, 733, 734, 735, 736, 737, 738, 739: n = A,T,C or G
  misc_feature 740, 741, 742, 743, 744, 745: n = A,T,C or G
acttgatagttataatattttatacattctatagatttttacatttttaatttattttatctgtgtacatatgtgtgtctgttgagagcgatacattggaaaccaatgtttaagaggctcttgactgttaaacatttttctgtaatcttcatgtgtctttccgtccagtgattctcaccaaaaccacagagcttctactccagccttggtcctttacactgacaaaaattcatcttggggaaagtgatttgacaactgtaacaaatttaaaatgcccttcctgtgggatgattctacctcaacactttcctcatatttctacatctagaatgatatattttagccaggtgcagtgtttcatgcctgtaatcccagcactttgggaagccgaaggggtgaatcacttgaccccaggagtttgagaccagcctgggcaacagggtaaaaccttgtctctacaaaaaatacaaatattatctaggcatgatggcctgcacctgtcatcccagctacttgggaggctgaagtgggaggatcccttgagcctgggaagccaaggttgcagtgagccatgatcatgccactgcactccagcctgggtgacagactgaaaacccatctcaaaggaaaaaaaaaaagatatatnnnnnnnnnnnnnnnnnnnnnnnnnnnnnnnnnnnnnnnnnnnnnnnnnnnnnnnnnnnnnnnnnnnnnnnnnnnnnnnnnnnnnnnnnnnnnnnnnnnnactctgtctcaaaaaaaaaaaaactacttaaagtcataattatataaaatgaagtcataattttgtagacagcatattgataattattccttggatagagaagatttttatgtgcaactgcaataagatcactaagattagctttataattggatcaatagaaacatctttatgtcaaattaataagcatattataaaatgtaacacgagttagaaaaactttactaagatttgagatttgaaaatttgacattctatcttctttattttgcttatagtctttttctaacttttttttttttttgagatagggtcttgttcgatcactyggactgagtgtagtggcacgatcatggcttactgcagctttggcctcctggtctcaagtaatcctctcacctcagcctcccgagtagctgggaatacaggcgtgtgccaccatactcagatatttttttaaaaatatatatttcgaagagacaggttctcacaatgttgttcaggctggtctcaaactcctggcctccagcaatcctcctgcttcagcctctcaaagtgcagggattacaggcatgagccaccacacctggccttgacattctaaat

SEQ ID NO: 688525 - DNA, 629 bp, Homo sapiens
tgaaaatagaatkatgtaataaatagcttcattatgggattattctgccctttctctctaaaataagacagtattctgtgaaaggaaattgaagatacaaaatacaacattctgttttcattactttatttttaatgttcagcaagatttaatatgcaatattttaaaaccctcagctcaagctttgcaagtcacagaacaccacagggacatgacggcaagaacattaatttctttctctcttggctattacagtggagcccttatgtgactacagaaactactccttatgttttaatcttattccattgtggactggaattttgttctgaagtatgtttcacagaactaatgtttcagtgattggaagtaatagtcttagagctattttatgcacatgaatttcatctccaaagttaccgtcctccttctcagccgctgctggagatggacacatggagattggacaagtgcccaagagcttcagtgccacgcaggaatgcttcagtcatgacagtttgcacaacacagccactgtcatctcattagaaggcatgagcatttttgccacatgccgattaatacagacacacctgctctcactaatgtcatccaaaagattggagttg

SEQ ID NO: 688526 - DNA, 1221 bp, Homo sapiens
ttgctaccaaacttacattttgaagtaattcagaatatataatacataatttaaaagtttcatcttttaaattagtcatctgataaaagatcaactacagataactaattttgcctttaatcattttaacattcaaagtggctattgctgttccgaattaggcataaacaaaattgtgaagtaactaaaattggcattggatattatttttcaacatgcaagtgttcatctcacttttaatttaaaaaaaatccataaaatgctcagtgctgttagaatataaaatctgaaaataaaatctaatatttatttagaatgtgacataaaagactgctaaatctcagtgttattctagaattgctctttgcacttatttttagccatggcttttaagtgcaacgaataatgaactcataactttggaggatttgattagcccaatgcagcatgctgaaagtagcttttagagcacacggtttaaataaaaagaaaatgcataagcttttacacttgactccacaatacattttagttaattttattataaaaattctccccatttattctataaaaatggtgctccaagatgatattttgttttattttttatttttaaattgagatcggttcttgctctgtcatccaggttggagtgcagtgtagcacaatcgcagctgactgtagcctcaacttctcaggctccagtgaccctcctacctcagccttccaagtagctgggaccacaggcatgtgtcaccatgcttggctaattyttgtatttttggtagagatgagttctcactatgttgtccaagctggtcttgaactcctgagctcaagctatccacccatttgggcctcccaacgtgccggaattacaggtgtgagccaccacacccagactctaagatgatattttaaaatatctgtgaaacagacacaaatttaagggcaaggcatgaatcacccattgttaaattcaacatggcagatgcattacacactttttcaactcatccacccactatatattttatatcagaacatcactatgtaccccacaaatatgtacaatttttatttgccaattaaagttaaaagtaaaagatacaaaaggcactaatgagaataaataaataaacaaatatacaaaagacaaaaaataaaaataagcagagtctcttgctggttttattaagactaggtgcagttgtcatctgc

SEQ ID NO: 688527 - DNA, 556 bp, Homo sapiens
caaatgcccatcagtgatagactggataaagataatgtggcccatatacaccatggaatactatgcagccataaaaaggataaattcatgtcccttgcagggacatggatgaggctggaaaccatcattctcagcaaactaacacaggaacagaaaaccaaacaccgcacattctcactgayaagtgggagtcaaacaatgagaacacagggacccagggaggggaacatcacacactggggtctgtcagggggtggggggctaggggagggacagcattaggagaaatacctaatgtagctgacaggttgatgggtgcagcaaaccaacatggcatgggtatacctatgtaacaaacctgcacattctgcacatgtatctcagaacttaaactataattaaaaaaagagtttctccattttcatagacccattattttccagtctgacatttaagacctgatcagaatggtttgtcacatctagcattagtggaggtttttaaaaattctattcagagaaaaatttacagttcttagctggagaaataatgctga

SEQ ID NO: 688528 - DNA, 601 bp, Homo sapiens
ggttgttttaacttgaaggatcacattattcatcatgaacaatctcaaaacgcagtcaacagaagccttcctggcagcttccttgtgtatacttggctccattttataaagacagaacagactatgtttggcatttttgccttgagttattgacatgttttaaattatgctgttttacgtccattcttaatagaacagaaatctgctacaaacgatctttattaacagactgcctcaggtgctgagcagactctccatttaacaacatctccaaacagacaggcagagagcttgctaataggcttttccaaccctttggcttctgtgagatgtaagtggattatggagrtttgtttgtcaggctatctttttacatcactgtctgagtaattgccacaaaggcctattgctttgccctaattaacaaaatgtacaaaatcctaagcatagaacttttattgatgagccatcttcatggaaagcttatgaacccccatgactcctggcccgagacagatgctcttcatcatgtcacacacttgactccagtctgttaatataccagggactcgtcttagcattttgagctactcagaaagtg

SEQ ID NO: 688529 - DNA, 595 bp, Homo sapiens
ggaatttaggctctgtgacagtcaggaagttatgccttccagattttccttcaaaagaacttgctgccaggggaggaggtgagataattgactgctagcctacagctgttgcatcttctgatccctcatgggattcatgccaaggccattcattctgaactgcacccagctaatgcctgagcatggggaaggtattagggcaagactatttctgcccagtatgaaactcctctaatggatgccctggagaacatcacatgaagccatttcatcgataacatcatgctgatcaggtaggatgagcacaaagtggctggtgcgcaggaggccaacttcagaaaatgatattctagttctactgctgtggctctgaatttytcaggtctctttataattctatttctacttcatactttgaaattctatgggtttattactgattattttctaagtagatcatttctatctgagtagcttacaaccttgagcaccacagtccaccccttgggccatgcagatctacttctccatgagagtttgaagagcagtaactctgtatttaccttgagccccttttcctgagaaggaaacaaac

SEQ ID NO: 688530 - DNA, 621 bp, Homo sapiens
ttagtgcaaattccagataatttcaatacaaagccagaagagcagtgaaataggtgaatcacaacctgagtttaagtttcataaaaaaaggatagctttattccttatagtatctctaacacttagatgagctcagtacgttttgatcttatcttgtcagagcaacaggatagagttactgtagtacatagtgccatcattttcakttattctctaccctctctgttgccatgtgacataaagcaccatcttatagggggagcttatgtcccaacccctttgatattaggcttggccatgtgacttgctttggctaatgggcagtgagtaaacatgaaatataccacattcaatcagaagttttgagaatctcgagtgccttagtctggtatttttctgttgcaaaagaatggcatgtccttttcagatctgctcctgcagcctagattctggaatgaaaaaaatatatatatgtcatagagccacagtcaacccgttaaaattgacataaaacctaagagagaaatgggctttttgtggtaacccactgaggcctggaggttatttgtcatgaagcaaagctgattaataaagttactgattgattttgatgttgttagg

SEQ ID NO: 688531 - DNA, 717 bp, Homo sapiens
catagctgatatgtaaatactaggccatgttatgtcagagacttgaggatccatggattttggcatccccrgggaccctagaactaatccatggataccaagggatgactgtataaactcactcaggaaggcttctcattggaggaaggtcccagttcaggacacacagggacatctccctggactactgtccattcatccatccattcatccattgtctccccccacccccccatctcggactgtcccagtgacagccctagcaagaagagacaagaaacaagttcacgttgtccagttttgaggtaatggaagaagttgcaccagtatgagaatagtgggtcagttttctacaggatgcagaaagcatatcgggcagcctcggggtgcggaaaggagcctggcctctctagcagccacacaggcctgcagtaggatggggctgtggctggccatgtggatcacttgggcctcatgaggggaaaggaaataccaggggggcagaagaggagcatgggggcagctggttgcctaaggagaaggcacctcagggaaggggactgtattcatttgttttcacactgatgtaaagaaatacctgagattgggtaatttataaaggaaacaggcttaattgacttgcagttccggaaacttacaatcatggcagaaggggaaggggaagcaggcaccttcttcacaagatggcaggaggga

SEQ ID NO: 688532 - DNA, 2552 bp, Homo sapiens
aaatgtctatggcccagtcaatttttccattttttttggagaatggaatcctgcagtagttggggtagctattctacagccattctcctttcgtagacattttgtggcccttaatatattgtcttagatctaggcaacaacccatctatggaaaaatctccatagcaaggggcaccaaattacaatgataggctaaaacaaccccagagagcgtggaaacaccaacaccctgccccccatccccaaactatatggctgatgcacagtcctctgggaaatgagctgagaaaaccaccataacatgtaataaattctcagtgaatgaatggataacccaatatgtaacactacagaagtagttatatctgagaaatatttaataaatgtacttgtggagacagcttacctttttaaaattctgaacagatatttttatggaggtaaaatacacataacataaaacttaacatttccccccattttaagtgtacaatccagtggtattaattacattcacaatgatgtgcaaccgtcaccactatccacttccagaactttgtattctgtacctattaaacaataactccccattgacccctctccccacccgtggtaacctctgtttctgtctttatggatttgcctattccaggtacctcatgtatgtgaataatataatatttgtctttttgtggctggcttattttaaactgcatatgctttccaggtttgcccttattagggcattatcagaattttattcccttttaaggctgaataatattccatcgaatattattgtatattaatatatacaccacaatttgtttgtctckttgtctgctgtgtaaaagggttgttccaccttttagctattgtaaataatgttgctatgaacactggtgtacaagtatctgtctgagtctgtgcttccagttgttttgtgtaaatcttagaagtgtaattgcatgatcatgtggtaattttaggtttaactttttgaggactctacatattgtcttccatagtggctgtattatttacattcctagcagcagtgcacagggatcccaaattcaggaagatattttactttttaaatcccacctctccctctgtgtgtgtcaagcatttattgaacatgtataatcaacaagatgtcagagtgagttaaggacaaatgaggcactgttaaacttgtgttctttgaattgaaaaaaaaggtcctgataagagtttgggtagttcaaaattaaaatcagatgttcattgatttatataaaagtatgtattgcttatcggtttaagttatttgcattaatagggtattttctttgctttattcctgtgcatattatttttagatcctagcaataacaaaaaatgagtacactaataaatattcatgttggctacagtcaactcattgcaaatattgtaacttattttagtctgcccaatatttagtaatactagaagaggcaagaacaagatagttattataaccactattatttttaaatgcttactaggtggtaaaaactgggttaagtgctttacatacattatccatgaattaggaactattatgtacatgctaggaatacagaaagtgagacttgaagacactggggaaattcatccaaggtcacatcgcttggtagatgtggtagagtttactcataccaactcatcctggtcagattcaagttcagaatcctaattgcctcatttattttgacagtgtttggtaatggttaaatacacaggagtttttatgagaggaaatattaagaaataattttcaagtttcatcctaattttcaagtttcatcctgactcttggcagccattaacagtgttccaattgcttctacacatagtttgaaacagctggaataggattatattgctattatttatcaatttagaatgttgttattatttacttctgggaaatcacatacttcctcagaatagtatgtatctatatttattgaatatatgaaagtttctttccacttttgaatataaagcccagcagaattggaactagaacatttaatcaatttaaggaatttcagaaagtttagcaaaaactcatctaaaaaatttttctacagataaactcttcctttggcttcctattttacttaaagtaaaatctcaaacctattacctaaaactcatctgtcagacctcatggccacaactcccacatcattcactctcctccaggtttacaggaccctgtggctgttgctctaacacaccaagcaaactcccacatcaggacattttcacttgctatctcctatttgaaatcctgtgcttcctggtattcacatggctcatttcttagttccttcaggtatcaatcaaatgtcacattcctgacaaccctctataaaataacaccacatatcccctcatctctatcagtcacccagtcttcactttgctttattcatctttatagtacatttcattatgtaatatattatatgtttgtgttagttatccatatccttccattagaaaatgagggtctt

SEQ ID NO: 688533 - DNA, 1959 bp, Homo sapiens
aatggggtcaataaagtattgggggaagggtatagaaatatatgctagaaagttatttacagaatgtgttatcttcaactactttttctgaagttttcgcaccctggactgtggcttttaataacttgactttaattcatctgaaagaactaatcttctccaaatatcttattcttagtaatttaagagaaaaagcttaaaacttaggacacatctagaaggatttccctaaaacgatgttyttcattttaagcaggcgcacacacatgcgcgcgcgcgcgcacacacacacacacacacacacacttgtaccaaggattattatctgcaaatggctgataataataatactccttcccaaagcaaaaccaaaaccctacaaacccatttccttgttctacttggcaattcttaaaaagtgtttggaatattttcgtttttcttttgctctggatactgcacctgggcttctggctgagtcagagagaaaaagactcaatcctgctaagggaagtctttgttctatacattctctctatagtttccactcacttctaggagtaaagaggaatgattgtttttgaattagacctaatggccaggaataccagagggaaaaataaagaactgagagaaggaagaggtatgggagaagaggacattagagaggtaatagtggctctttggataaaaagtagagaatagagaagcgactcttttcaactggacaaatgtggttattcaactcaacatttaattctttatttttctttgaaaaccttgttattttaaaagagtggatttaaaaatcaccaggagtaatccatatgcttataataatctatggaatactacttataaaaatatcaaatgaaattgcataaacagcctcaactctaaaggcatcattaatcagaaatattcaagtaacagttgtcaaatatatcaaatttgttcagttcaatgaaaacacaaaaagcttctctaaaattagatgcagcgattcatacatctgatgcaataaatcaagatttttcattagtaatgtgtataaaagtagctatgaattatgtaaactgaaatcaggacttagtgataaatcttttaacaatttataatttaaagaaattacaatgtaatagcataactttctcaacacatgaaaatatggtattataaagcatagagagtaatttattgagaatacactaaattttcataacatgcaaagctttatgtaacatgactattggtactacagtccttacataaccgagctttgtattttgtttaaatgccaagtcttttagaaggatcagacacatacctctgtttattttttatagaaagatcctccagtaaatgtagctttgtgtgagaaattttaagcaaatccattggtgaaaagatgacatgctggctatatatatacctttctaaatttgtattctgacaccctgagcagatgctacagtcaaaaataaaaaagcctgccaaaagccaaatacagtatcttataacacttattatggtttacaaacacagtgaacagtgttacagacttacaatttgataatatggaaattgtggaaagataaatacaattcccttttgtacatatctattaaactctgaggtaagatcatttatttgaggcaagcagttaaaaagtaagaggcctcaatgtcccttccatttcatggatttcctaataatatgcagtaaaaatcaaaatatggcacatgatcttatgtagaagatctcagcaccaaaatgaaaatgagttgtggtcaattttatctaaatcagagctattctatttatatgagcaatatttaagaagactaattacagtctgcctctgacttttttcctgcttcctacttttccagcagaggccaagatggatatgctaatgggatctagtgcttcttacctgatggacaggttctataccat

SEQ ID NO: 688534 - DNA, 1959 bp, Homo sapiens
aatggggtcaataaagtattgggggaagggtatagaaatatatgctagaaagttatttacagaatgtgttatcttcaactactttttctgaagttttcgcaccctggactgtggcttttaataacttgactttaattcatctgaaagaactaatcttctccaaatatcttattcttagtaatttaagagaaaaagcttaaaacttaggacacatctagaaggatttccctaaaacgatgttcttcattttaagcaggcgcacacacatgcgcgcgcgcgcgcacacacacacacacacacacacacttgtaccaaggattattatctgcaaatggctgataataataatactccttcccaaagcaaaaccaaaaccctacaaacccatttccttgttctacttggcaattcttaaaaagtgtttggaatattttcgtttttcttttgctctggatactgcacctgggcttctggctgagtcagagagaaaaagactcaatcctgctaagggaagtctttgttctatacattctctctatagtttccactcacttctaggagtaaagaggaatgattgtttttgaattagacctaatggccaggaataccagagggaaaaataaagaactgagagaaggaagaggtatgggagaagaggacattagagaggtaatagtggctctttggataaaaagtagagaatagagaagcgactcttttcaactggacaaatgtggttattcaactcaacatttaattctttatttttctttgaaaaccttgttattttaaaagagtggatttaaaaatcaccaggagtaatccatatgcttataataatctatggaatactacttataaaaatatcaaatgaaattgcataaacagcctcaactctaaaggcatcattaatcagaaatattcaagtaacagttgtcaaatatatcaaatttgttcagttcaatgaaaacacaaaaagcttctctaaaattagaygcagcgattcatacatctgatgcaataaatcaagatttttcattagtaatgtgtataaaagtagctatgaattatgtaaactgaaatcaggacttagtgataaatcttttaacaatttataatttaaagaaattacaatgtaatagcataactttctcaacacatgaaaatatggtattataaagcatagagagtaatttattgagaatacactaaattttcataacatgcaaagctttatgtaacatgactattggtactacagtccttacataaccgagctttgtattttgtttaaatgccaagtcttttagaaggatcagacacatacctctgtttattttttatagaaagatcctccagtaaatgtagctttgtgtgagaaattttaagcaaatccattggtgaaaagatgacatgctggctatatatatacctttctaaatttgtattctgacaccctgagcagatgctacagtcaaaaataaaaaagcctgccaaaagccaaatacagtatcttataacacttattatggtttacaaacacagtgaacagtgttacagacttacaatttgataatatggaaattgtggaaagataaatacaattcccttttgtacatatctattaaactctgaggtaagatcatttatttgaggcaagcagttaaaaagtaagaggcctcaatgtcccttccatttcatggatttcctaataatatgcagtaaaaatcaaaatatggcacatgatcttatgtagaagatctcagcaccaaaatgaaaatgagttgtggtcaattttatctaaatcagagctattctatttatatgagcaatatttaagaagactaattacagtctgcctctgacttttttcctgcttcctacttttccagcagaggccaagatggatatgctaatgggatctagtgcttcttacctgatggacaggttctataccat

SEQ ID NO: 688535 - DNA, 1959 bp, Homo sapiens
aatggggtcaataaagtattgggggaagggtatagaaatatatgctagaaagttatttacagaatgtgttatcttcaactactttttctgaagttttcgcaccctggactgtggcttttaataacttgactttaattcatctgaaagaactaatcttctccaaatatcttattcttagtaatttaagagaaaaagcttaaaacttaggacacatctagaaggatttccctaaaacgatgttcttcattttaagcaggcgcacacacatgcgcgcgcgcgcgcacacacacacacacacacacacacttgtaccaaggattattatctgcaaatggctgataataataatactccttcccaaagcaaaaccaaaaccctacaaacccatttccttgttctacttggcaattcttaaaaagtgtttggaatattttcgtttttcttttgctctggatactgcacctgggcttctggctgagtcagagagaaaaagactcaatcctgctaagggaagtctttgttctatacattctctctatagtttccactcacttctaggagtaaagaggaatgattgtttttgaattagacctaatggccaggaataccagagggaaaaataaagaactgagagaaggaagaggtatgggagaagaggacattagagaggtaatagtggctctttggataaaaagtagagaatagagaagcgactcttttcaactggacaaatgtggttattcaactcaacatttaattctttatttttctttgaaaaccttgttattttaaaagagtggatttaaaaatcaccaggagtaatccatatgcttataataatctatggaatactacttataaaaatatcaaatgaaattgcataaacagcctcaactctaaaggcatcattaatcagaaatattcaagtaacagttgtcaaatatatcaaatttgttcagttcaatgaaaacacaaaaagcttctctaaaattagatgcagcgattcatacatctgatgcaataaatcaagatttttcattagtaatgtgtataaaagtagctatgaattatgtaaactgaaatcaggacttagtgataaatcttttaacaatttataatttaaagaaattacaatgtaatagcataactttctcaacacatgaaaatatgstattataaagcatagagagtaatttattgagaatacactaaattttcataacatgcaaagctttatgtaacatgactattggtactacagtccttacataaccgagctttgtattttgtttaaatgccaagtcttttagaaggatcagacacatacctctgtttattttttatagaaagatcctccagtaaatgtagctttgtgtgagaaattttaagcaaatccattggtgaaaagatgacatgctggctatatatatacctttctaaatttgtattctgacaccctgagcagatgctacagtcaaaaataaaaaagcctgccaaaagccaaatacagtatcttataacacttattatggtttacaaacacagtgaacagtgttacagacttacaatttgataatatggaaattgtggaaagataaatacaattcccttttgtacatatctattaaactctgaggtaagatcatttatttgaggcaagcagttaaaaagtaagaggcctcaatgtcccttccatttcatggatttcctaataatatgcagtaaaaatcaaaatatggcacatgatcttatgtagaagatctcagcaccaaaatgaaaatgagttgtggtcaattttatctaaatcagagctattctatttatatgagcaatatttaagaagactaattacagtctgcctctgacttttttcctgcttcctacttttccagcagaggccaagatggatatgctaatgggatctagtgcttcttacctgatggacaggttctataccat

SEQ ID NO: 688536 - DNA, 618 bp, Homo sapiens
tagagaacctatctccaaataaggtcacatgacatacccctggttagggctccagcacatctcttttgggaggacaaaattcaacctataatggccatatttaggtaaactgtctaccctgaatactctattgtatgtattaaataagttctagattgtttggtcatggtcgtatatgctataaaagtgggtaaattgcagaacaacattctggaggtagatgaaataataaagggactctagcctgaagggctatgcaggaggaactgctggggtcatggaaacaaacagaacattgtcacaagcaactctagaatttcacacatacatcgtattgacacattaccagctgagaaacaaatgaggattttcataaaacactaaaaggtattatacctacaacaaaagtatctcctctataaaccacctcttgggtaatttatttgcattttcacttcagtgaaaaataatcacataatattcccattttaaaatttaaaataataataaagcaaaaaaagtggcttaatggctagtcattgtctaatcactcaagaatcacgtgggacgctctccaggaaaacaacacatagcattccaaatacatttagccrtaga

SEQ ID NO: 688537 - DNA, 1344 bp, Homo sapiens
ccaattacaaattatgtaaaaatggactccttaggcaaaaattatatattttaattctataaataattgttcatctatataaagcagtagaataattttctgttgaagactgtgtcatctgatcaaccccagaacagactgaggcttcagactatgctggcagcacagtatcctgctgctctctagtggcacatttcaatatctgcaggcagattgactaggcaatgttatttcatttttggatttctggcttggagcaaaggaaaaatcaaaaatgatccaaaagtttagagacagtcaaagctattaatttgctggtgttttatcaagttctgtgagagtgaattagtctgagtagtatctttttttttgttcaattcaaatagttgtttcaattaaatatataagactatttaaaaattaattcaagaaacattttattagcattagctaaatgccagacattatgctagccagtgaaaacacagttcagtaaaaggtagacctttattttgaaggaggtcacataataataacactgccataatgtgtcatactgaatataacagcacagtacaaagaaagtacaaaaaggaaaaataaatgtattcacattccctattcttgatcaatttcagatagaaggccttaatttacaatggtgttatttcctctagtgcttgacgtaaagttgacagagcttggtagaagagaatagtgtttttaatcagttttctcattttaagaccatttcctcaaaatatcacttaattcactatgctctagtcttttcgattaactttaaaagcgtgctaatccacatgaagcaactcctcgcccctatccttgactgggattttgtgctatttygtactaattggaggagaacctcatgtgtgctccaactgcatctcctttaggatcagatgtttttcctggtcattctaattactggagaaaatcctatttcaaaaaccaaagaaatctggaaccctaacacagtgccttcccactcctacccacttatttacaaatatccccattataagaggctttctacctgaaaccttttttccccaatagacatgaataacacctacaatcaccctccaggttgtcacactccacactggaatttgtacttttatttgtgaacactcctgcagggagggtaagctctacagatggcttagttcccttagtactgtgctcattcctcttccttccagcctccctggtccttagagcagaataatggctaagcctgaagagtgaggaaagggtccatgaaaaaggaaatatttgagctgagttttagatgacaactcagatttctcaaaagaa

SEQ ID NO: 688538 - DNA, 568 bp, Homo sapiens
ggaatgaaatggtaaatttttgaaatggcaagtttggcaaacacttgcttacaataacgcaacccactcaatggcaaggtttctgttacttaaaataattagggaagatagatgactagtgatgccatrcaagaataaacctcgcttaactgaattattcatggcattaaaccaaaaaaattttcaccatcattaatacaaagtattaatgttttaaatgtattcctactgtttatgtaccaaaatgacactatcaaagaaaaaatcatttatattttcaactaaaacatttactaaaaagagtagatacacatctacaaataataatttacattagtacatacatataccattattgccaatgtcttacctcttcccaattgggagaaaagttcttagactgatgtatattcacagacttttatgcagctctgatgaacacaatagatttcctctttggaaaaaatgtagatttttatgaaagagtgaagtagttaatagtttttatgctaattctgcagtggaattcgtcaataaatctcagtttaataaatctggctttgtctta

SEQ ID NO: 688539 - DNA, 645 bp, Homo sapiens
catcattccgggcagaagatccattaaatctctagtcatatgcatgaaattattagaggtatatgtatactgaaaaaatgaatttagtgctgaattttcatttgcctttcctatatatagtcctctgtwttaatgtcagcaatcagattaaaactgaaaatttgacttcctctgcttcctctaataaaatctcatttttaattccttattagagaattatttcagcactgaaggataatcatattttaaataaaaaactgtctcttatcagaaagccttattgctttaaatcattcttaaagatgcatttgaatgccttgttcaccagcgagaataggtactacaaggaaattcagaagaccaacaagtgggtcgggcacagtggctcacatctgtaatcccaacactttgggaggccaaggcggatggatcacctgaggtcaggagttcaataccagcctggccaacatggtgaaatcccacctctagaaaaaatacaaaaatcagtcaggtgaggtggcaggtgcctgtaatcccagctactcaggagctgaggcaggagaattgcttgaacctgggaggtgggggttgtagtgagctgaaaccatgccactgcactccagcctgggtgacaaagcaagacac

SEQ ID NO: 688540 - DNA, 683 bp, Homo sapiens
gatgaatatcatgattttttttcactagtaatatgaaagtaagcaagtgagcacatattactttttgttctgctataattcatttgaaggaataaaataggtataaaataataaaataatttctagtcatacagtacagtaacagctttattatcaacataaattcttttatgctgaagtctacattatttgaaaagaaagtatctggttagaaatatacatgtgaaattcttagtgggttaatatgctgttgaaatgagaatgaatataaaaattaaaaakttgaaattgtcagtccaatctcgttgcattcatatggtactgctaaatgtattactccatagtatcaagtcaattgtgctattttgagatagcaattatatttggcaggcaaaataacataaattattagcatgcatgggtttaatatggccttatcaacctttactcattgggccctaaatttgaaacataatgtttgcacaatttatacatgtaaatatttgttttatcatttactataattagggaaaaatgaaactagaaacttcaaaactttatgttccaggcaggacataaagccgtgttttcttataataaatcttaacatttaatttatatgtattagacctagcattataaaaagcataattaacaagattaaccataaaattttgcatcca

SEQ ID NO: 688541 - DNA, 1226 bp, Homo sapiens
tcatgcagccagagtacttgataattgccattttgatttctttttatgtgtattatacttttatgtgatcatttatctatgggaaactggataaaggaggtttcttttccatttaacatttataaggcttttcatataactgaaaagtgtayaatgatcagtctctcatgtgtattgcaaatattctcccaaatatttgtcttttagttttacatttttattgtattcttcttgtggatatttatctgtgtaaaatatacatgtatttgctatggaaactagaaatccataggtattctcttataagtagccaactcatggtagtacttattaaataaataattctttttttcaaattacatatatatcacatcaatttatttttagtaactgatatatttttaaaattcatatagaataataaagcaatttctcttaaactttttgccattctcatattttcctctgaatttttttcttcccactgaatactaaaaaattaatttgtaagatttttgttatttttttttccattttggttgtcattaaaattgttaatatatgaagtttacctttgaaatccaacataacattttgtgatgtgatgtctatttacatgtagtttttgtacttcagcaaaatcttagatctgaacttttctctctaaattattctttttcatttttcaatgttttcagtattataccagtattttagtttcagttgtattttgaacagattgtagctaaatttttaccttacacttagtcaactatttaattctaccttgttttcctcaagtctctcatgcttctaaggcagacaaaaatatactctttaaaatgtaagtacattttcagtatttatatgtataactttgtcttcttgtcttgtttcattagttagctcttccaaaatggtgttaaatgaaaatattgacagaaaatttatattcaaatttagtggaaatagcctacttagtgttggtatattaatcttttaatgtactactgtattcaatttatcattatctaatttataattctagcattatatttatgattacttaatctataattttctttttttctattattatttcaaattttatataaaggtaatctcttacataaacaaaattgatattttttgaaattcatatgaactgggatagtatttagaaagaaagtatctgttctttaaaagttagataaattttgtgttca

SEQ ID NO: 688542 - DNA, 1226 bp, Homo sapiens
tcatgcagccagagtacttgataattgccattttgatttctttttatgtgtattatacttttatgtgatcatttatctatgggaaactggataaaggaggtttcttttccatttaacatttataaggcttttcatataactgaaaagtgtacaatgatcagtctctcatgtgtattgcaaatattctcccaaatatttgtcttttagttttacatttttattgtattcttcttgtggatatttatctgtgtaaaatatacatgtatttgctatggaaactagaaatccataggtattctcttataagtagccaactcatggtagtacttattaaataaataattctttttttcaaattacatatatatcacatcaatttatttttagtaactgatatatttttaaaattcatatagaataataaagcaatttctcttaaactttttgccattctcatattttcctctgaatttttttcttcccactgaatactaaaaaattaatttgtaagatttttgttatttttttttccattttggttgtcattaaaattgttaatatatgaagtttacctttgaaatccaacataacattttgtgatgtgatgtctatttacatgtagtttttgtacttcagcaaaatcttagatctgaacttttctctctaaattattctttttcatttttcaatgttttcagtattataccagtattttagtttcagttgtattttgaacagattgtagctaaatttttaccttacacttagtcaactatttaattctaccttgttttcctcaagtctctcatgcttctaaggcagacaaaaatatactctttaaaatgtaagtacattttcagtatttatatgtataactttgtcttcttgtcttgtttcattagttagctcttccaaaatggtgttaaatgaaaatattgacagaaaatttatattcaaatttagtggaaatagcctacttagtgttggtatattaatcttttaatgtactactgtattcaatttatcattatctaatttataattctagcattatatttatgattacttaatctataattttcttttttyctattattatttcaaattttatataaaggtaatctcttacataaacaaaattgatattttttgaaattcatatgaactgggatagtatttagaaagaaagtatctgttctttaaaagttagataaattttgtgttca

SEQ ID NO: 688543 - DNA, 2566 bp, Homo sapiens
ttctttctggaatctacatagcaccaaactaatctgcacatacactgaggatgagaaaggaaaaaaaaaatcccaggtgataggggatatccttacatacacacacagtctcactgtcctctacctctcgacaaaaaacaaaacaaaacaaaacaaacacaaccataaatagaatggccaaggcttatttatggaaaggaaaaagggtagcacaggataacatgaaaatactgccaaagaagccttcatctcctctggcctaatttaaatagggttactcaagttcatggattggtaatggatgatgttgcaagataagataaatcaaagagtcatcactaaaatattattttattctaaggacagtctgcgtcgtatgttttgacctaaaagatatgactcacagggagcccaggattccttttcctttcttccctgaaatgtgagcaaaagcaaaaaggggtgaaggtgccatataccaagagtccaatgccacctgaatgatgatttcattgtgctattcatcagatatgtaacttggggaagtcacctaacttctgagcctcagtttcctcatctattaaatggggataactatacctaaccaaattaacttcctcacatggttaccattaggatcaaatgagataagagatctgcaagtactttgaaatcaccaagttctgctgattcgaccgcctatctctcaattctattcacttttttcaacccctactgtcactatcctaattctgatcaccaacattttcatcctagcctacatctccggtttacaaatatcagaccacatgccagtgcccattcatgaagaaaatgaaaacaaccaaaacaacaacaaaaaaccccacagtgcaatgccgtaaattctgcataaagctaaggtattctatttaaatatctaatattaatttgagattcctaaagggggatgtatatatgtggttatgtatgtgaaaatgtcctttaatttatgaaatgattctgacatgtaatatgctttttaatgtacttatttaacaaaattaaagggttgataactgtattatgttgatcttcaaaataaaaaaaaaattttgctggttcacaaaacagaaaagtctaggtaccacttgtcttgtctacattattctaacaaacaaaattattcaaacaaacagatctctcagtcttgagcacaactttycaatccagccacatcagccaaaatgatcatactaaagcaaatcctgttatacctgtgtttaagatactttctttgctcccatgtccttgagttagctgacaaggtccccagctcacttcaggctgccctctctgtaccctgtgcattttcatcctgacttttgcacgggagcagtcaccctcacctccactcctctttcccaaataaatattgcacatccttcctctcacccattatctttcttgctctaggatgtcttccttgactcccccaatcccagattatatgcatttcccatgtgcttttataagtgtttacatcccttgttgtagaccttctttcatacatttgattaatacttactgagcttctgctatgtcaggcactgctctaggtgttgaagataaaacactgaatgaggcaaatacccaccctccaaagagctgatattctagtaagagaaaacagactagaaactaaaagtcaaaataataataaggaagtaaaatatccagtgattactcatccctgtatctcatgaacctagtacaatgcctgggtcctggctggttctcaaaaaatatttgttgaatgaataaatacacacatgttaaacagtgctgtgtgaatgtgagggactgactactgtgtacataggtccatactggctattaaaatctctcagagtctggcccaagcttccagaagccaaagcatgctgtgtcagttagggcattcactactgtagacttgttttttaaaaaactgagtttgcctactttttaaaaacaaaaacaaaaaaacaagtttgcaaaagtagaaattttatcagtagttttcagaccaaatgagttcagcacggaagtctcaaaagccacatcttggcaaaatatgcatcttcctcaaactcaaaacacataaaattaaaagaaagccagttccttatatagttcagacacaaggatgttggcttcatgctgtatttaaaaggttgatactggaaaagtcagtaactaccctgaacaaggaccttgtcagatcactgtcaaggcataatcccccctgagttatcatttggtgaagtgaattaaagtcaagaaagtaaacctttaatgaaaacttacttgcctttgctcccaaaaggattttaaaaacaagctttttttttattaaaaaaaaaaaaaaaaaaaaaaaaaaaagtaagccagaaagctgaaatgagatctgaggaacacttccacatgggtcagccagtcagcataagaaagagttggcagtacccaggtgaaactgctccagactgtgactgtaacactattctgtccatgcaaagatttggaaaatacattttctggacagaac

SEQ ID NO: 688544 - DNA, 673 bp, Homo sapiens
tgaaggggaacagagtgaagaaaaccaagccctcatcacattttgtaccgaaacctattgaaggtatgaaaccaactgactgtctttgttggacccttatctgtgtgttgacatcaattctgcttcttgcccttttggtccagagagtttgcctggaatgcaacagatcagaagaaagattcaaaasaaatattcagagaacacaatagtatctcttcctttttttttttttttttcttttgaggcagagtcttgctctgtcgcccacactagaatgcaatggctcagtctcggctcactgcaacctcctcccggattcgagcaattctcctgcctcagcctccgtagtagctgggaatcttttcctattaaaaaaaaaaaaaaggaaaattctattacaaatacttggcacttaaaaaaaatgcctgaatatagaagccggaaaaattttgaaagtagaaaagaagtggtagttactatctagtatgcagtttcctccttttctaaacctaataatttcctttctcaagatacacccttgaaaaacaaatgatacttttatatttaccgtattgcactgtatccttctcaggtgagcctataaccttttctctcgtaatcatttaattctctgttcatttatttcaaactgaccattagaataaactttttt

SEQ ID NO: 688545 - DNA, 673 bp, Homo sapiens
tgaaggggaacagagtgaagaaaaccaagccctcatcacattttgtaccgaaacctattgaaggtatgaaaccaactgactgtctttgttggacccttatctgtgtgttgacatcaattctgcttcttgcccttttggtccagagagtttgcctggaatgcaacagatcagaagaaagattcaaaagaaatattcagagaacacaatagtatctcttcctttttttttttttttttcttttgaggcagagtcttgctctgtcgcccacactagaatgcaatggctcagtctcggctcactgcaacctcctcccggattcgagcaattctcctgcytcagcctccgtagtagctgggaatcttttcctattaaaaaaaaaaaaaaggaaaattctattacaaatacttggcacttaaaaaaaatgcctgaatatagaagccggaaaaattttgaaagtagaaaagaagtggtagttactatctagtatgcagtttcctccttttctaaacctaataatttcctttctcaagatacacccttgaaaaacaaatgatacttttatatttaccgtattgcactgtatccttctcaggtgagcctataaccttttctctcgtaatcatttaattctctgttcatttatttcaaactgaccattagaataaactttttt

SEQ ID NO: 688546 - DNA, 1423 bp, Homo sapiens
ttgatagtagaatagtaagcattaggttgttaatcttgattttttaagagtaatgcctatacaatatagccaatttatattaagaaaacagtcaggccttatatacttgtgcaaagtacttaagaaataactggaatcatcatcaaacattttgagtatttcaaatattttacattaaaataataaattgagtagagaggtgaagagtatgactttggaatcaaatatacctgatttaaatcccatcttcatttactatttaggtaatttgtctatttatttaattgcataatatgtcaattacctcacatgtaaaatttgcttcatggagttgttagaattctgtaatgcatttatcaaaatccttggcacataccaaataatattattataaagtgactatcattaactaatcttctatattaatcatttcacatacatcatctttaattaacagtactctatgtggcagttgtgataagctttattttcgatacaggaagattgatgtttggggcctcttccatgcagactgaatatctatactaattcataaatatgtattttagaaaaaagcctctcttgtacctataaagtaaaaatcaagaaatagataacaatttttattcactagactaatcaaggagtgtagagaaatgaataaaccaaagagggcggtgatccaaaattatatctacctgatgttcaagcatgaatcacctgcagcttccttcagcagatttgcttcctgattcaaaacaatgaaattgttttataccttatcagtcaacataactagtgcacaaccctcagttacttctgaaaaatgttagaaaacagaargaagttgagctcaaattcaaaactgtacaacaataatcctcaaaactgtacaacaataatcctcaacacacataattttcctaaagacaaccagaaattgatagactttagaaaacacactggcttctatggaattagtatagcaacaagaaattatcatgagtttccagttctgacaccaaatctttgtaagttttaagacacattaggacttgttaaaaaacaagtttgcttgttgttttaaatactagttttggacaaatcataattgacaaattataattgcattcatttatgccattatattttgcaattgcatacgtttatgcaattattacaatgaaataatataatatatgcaaacaatgtataatgattagatcaggctaattagcatatcaaattgcttacctacttttttaaaatggtaaaacatttgaaacttattctcttaattattttgaaatgtacaatatatttttattaactatagtcacgctgctatttttattaactatagtcattgctgtgcaatagagcccaaaacgcattcttcttctctgaaactttgtacctttga

SEQ ID NO: 688547 - DNA, 631 bp, Homo sapiens
cctttatccattcactcaacaatccactaaaacgtaatcagtatgtgccagaaaccaaacttatcttcaaaaaggagtagatgatgagatgtaaaatctggcactcagaaaaggtggtccaggttgaatatattgatmtaaaatatttttactgagactataatatccttaaaggtaggattatgttttattaattagatgttccatataatgaatcctatcatttgaataacactattagaaacactgtcattccatttaaaattgaagacatgcatatatatccctgaccaagcacttcttgtgactttaacactttttggctaggcgtggtggctcacgcctgtaatcccatcactttgggaggccgaggtgggaggatcacctgaggttgggagtttgagaccagcctggccaacatggtgaaaccctgtctctactaaaaatacaaaaaattagccaggcatggtagcgtacgcctgtaatcccagctatttgggagactgaggcaggagaatcgcttgatttcaggaggtggaggttccagtaagccaagatcacaccactcttctccagcctggatgacagagcaagactcagtctcaaaaacaaaaacagacaaacaaaaatt

SEQ ID NO: 688548 - DNA, 1553 bp, Homo sapiens
tttgctgtgttatatgttagctccgaacaatggttctcatttggctaagcatcaaaatcacctagggagtcggtgcaaaacaaaatatcccagtcccctcccctgaaacactgactcaggaggtttggttgggggccaggagtctgttcctaaatattccaggtagttctggtgcaggtaagtggccctgagacagtatgttgggaaatgctgacgtaaaggtatcagggccgggcgctgtggctcatgactataatcccagctgtttgagaggccaatgcaggaggatggttgagctcaggagttcgagatcagcctgggtaacatagcgagaccccacctctgccaaaaaaaaaaaaaatagggtatccaaatatctagattctgatcccttttgaggtcctagaccctttgagaaactgatgaagccaggcacctccttcctcaggaaaatgctggtgtacaaatacacacaaagctcttcaggcagctgatagatttcccccagagagctattcaaggacttcctaaggtgggtggactgcagggttaggacacctgctatagaggtgacatttttccaaggacaagcagggactttggtcttgactgttctctgggtgcttaataaataatactaattatgcaagttctagttttgatctcttatgtgcactcctgtcattgtctaacaccgtccattagggccagacatagtggctcatgcttgtaatcccagcgctttgggaggctcaggtgggaggatcgcttgagctcaagagcttgagaccaaactgggcaacatagtgagatctcatctctacaaaaacatacaaaaaaaagttggccaggtgtgctgatgtgtgcctgaggtcccagctactaggcaagcagaggcaggaggattgcttgagcccaggacccaggaggttgaggctgcagtgagctgtgatcacaccactccactccagcctgagcaacagaacaasaccctgtttttctttcttttttttttttttgagacggagtctggctctgtcacccaggctggagtgcagtggcgcaatcttggctcactgcaacctccgcctcctgggttcaagcaattctctgcctcagcctcccaagtagctggaattacaggcgcctgccaccatgcccggctaattttcgtatttctagtagacacggggtttcaccatcttggccaggctggtcctctcctgacttcgtgatccatccgcctcggcctcccaaagtgctgggattacaggcgtgaaccaccatgcccgtaaccttttatttcatgtgaccaagtaacacccgtgtgccagaatcaaggatgagtctcatgttctcagagcagaggcacagaaggctgcctggaagacggaaaggtaaagacctcagctataactctacacttgtgtgtgctccacccacaaatcgtcaccagaggagttccgacaagccggtaactctcatcccaaagtgttccctcgttggaccagaagctggaagggcacttggcagagtctgcctggccctggcca

SEQ ID NO: 688549 - DNA, 644 bp, Homo sapiens
agatgcaattgatgttctgcctaccttcactccacttctacctctatagcttgctggaggctgtgtgccaggaacacctgtgacgctttcccctagggcatttattctgtccccaaggttacacatggtaagcggagcagagtgcccgagaattaatggcctagagagttaatgtctctggaagcagtgcttagccaaagatgggtggaaagctggtggacaaataccccagcttccttccctctatcccccagggttgggaaaactctcagtggtgccccacactgttttccagagttgtccagagagactgagcttcatttgcccccagcagtaacgaaccctttgttggtggtcctcccactgtctcactttccggctcccctaccagtttcactggggtcacctcccagwtaaaccatttgcactgaaatcattgccccagggtctgtttctgggggaaaccaaagtaggacagggacaaatcaatccatggaacaagtgaaccttatttccatctggattcaaacaacccatctgccaaaaggcatttatgagttaaatgtggaaacatgatcatagatgggatattagatgattttaaataatcgttctttaatttctttaggtttgattgttgtttc

SEQ ID NO: 688550 - DNA, 619 bp, Homo sapiens
ttgagacatgtaayactatgaaattatttgtgagttttgacacaagtaattaagaatatgacatcagtttaacatcttgagcaaatattattctttgcaattagacgtccttgtaatttagcttttcttctagaatatagagagtagaatcaggaaaaaatgtacttgagaattaaaaactataaagaatttgagaactcctgtagtttaacctttctcatgtattttgtgcaattatttatgcttgaaaatctttttgttttcctataatttttgcccaaagataaaaagaatacttttttctacataatagctctttaattatttgaagataatggttcttcggtttctcacacagacatgattaaaggagacttcatcactcttattaggctcggcaggttaacaaccatcctcacttgtaatgttcaggtagagtttgaccaaaccaggaaaatgcaatcttaactttcttggtttggaaccaatacttctattaaaacagtcaccaaaaacactctaggttttcatttataaaatgcattcttttttttaaatatataattctgttttgtgaccttatgagtgaaataatacacaacgcctcccagctttgcgg

SEQ ID NO: 688551 - DNA, 608 bp, Homo sapiens
agggaaactgagaaacagatgttagatgcctagggtttcacagctaaggggtggagctacaacttccaaaggtatgggaggctccaggccctagaaggaaaatgggtagcagatcaagcagactgscagatgcttcagaggccagggcaatgctctgggcagagttagggcccatggcttgacttcacagagtcctagtgaaccagctactataatttccagcctccctggctctgcaaggaatgagaggaatggagccaggaagacagctcagctgtagacccaggcccaagggagagggatggattctttgacctcccatgatgcccactagccaggctgcatctctggccccctggactccaaatccagagaacacccatcccataaccttgtaataaaataagagagcgacacttccatttctgcagaagggctcgccttcactttcctcaaaaatcagcagccattcttccaaaaaaggaaaaacacaaagcaagctgtcaatctcgagcctcagacaaatgaaataaagttgcgacttttctctttgagagcacaattctcctcccttttccaaagtcacttactgtacattcaggctgtca

SEQ ID NO: 688552 - DNA, 608 bp, Homo sapiens
agggaaactgagaaacagatgttagatgcctagggtttcacagctaaggggtggagctacaacttccaaaggtatgggaggctccaggccctagaaggaaaatgggtagcagatcaagcagactgccagatgcttcagaggccagggcaatgctctgggcagagttagggcccatggcttgacttcacagagtcctagtgaaccagctactataatttccagcctccctggctctgcaaggaatgagaggaatggagccaggaagacagctcagctgtagacccaggcccaagggagagggatggattctttgacctcccatgatgcccactagccaggctgcatctctggccccctggactccaaatccagagaacrcccatcccataaccttgtaataaaataagagagcgacacttccatttctgcagaagggctcgccttcactttcctcaaaaatcagcagccattcttccaaaaaaggaaaaacacaaagcaagctgtcaatctcgagcctcagacaaatgaaataaagttgcgacttttctctttgagagcacaattctcctcccttttccaaagtcacttactgtacattcaggctgtca

SEQ ID NO: 688553 - DNA, 608 bp, Homo sapiens
agggaaactgagaaacagatgttagatgcctagggtttcacagctaaggggtggagctacaacttccaaaggtatgggaggctccaggccctagaaggaaaatgggtagcagatcaagcagactgccagatgcttcagaggccagggcaatgctctgggcagagttagggcccatggcttgacttcacagagtcctagtgaaccagctactataatttccagcctccctggctctgcaaggaatgagaggaatggagccaggaagacagctcagctgtagacccaggcccaagggagagggatggattctttgacctcccatgatgcccactagccaggctgcatctctggccccctggactccaaatccagagaacacccatcccataaccttgtaataaaataagagagcgacacttccatttctgcagaagggctcgccttcactttcctcaaaaatcagcagccattcttccaaaaaaggaaaaacacaaagcaagctgtcaatctcragcctcagacaaatgaaataaagttgcgacttttctctttgagagcacaattctcctcccttttccaaagtcacttactgtacattcaggctgtca

SEQ ID NO: 688554 - DNA, 1295 bp, Homo sapiens
gcttggaagaaatgagctatagttcaaacttactagtaactgtgggtccttaaataagtcactcttttgctccatgatttgtgtcttattccaccttttagcaaacacattcaagcatcttctatgtgccaagaacttgctggaaaacatcacaaaagttaatattttctggagatcaaggaatgaaactcagccctctgcaagtatgatttcatttgatgtcacaccagtttaattaaattagtgctataatccctcactttatagatggggaaactagtattaaagagtttgcacagtggtaagcygtgaaactgtaattcaaatcagactctagggctctaaaactctgacactaacacaacagactgctttcaaggagcccaggatacagacaattgcaaccctgcttggaacaataattagacaaaaaataaaaataaaagcaacccaaaataagtttttgaaaacatattttagtaaattggaaggagactagaaaaagcatataataaaaaggaagaggaaataaaacttatcaagatgatgttgtctgaagagtcaattagaatattctactctagatgctgaatgtttctcccatatgcataatgattgcccttttattgcttaggtctatgcatgatctcctctagtaccagcaagaaatttcctgaaatattcttgattatagcatggccctgacctgaacatagttctaaaatgtactctggccatcaaaagagaagatgtttgacagctttgccttcactgtgtgacaggtctatattcaagatttgcatgagaatatttgtacttttcattgggaacagatggaccagcagtttaacatgaaaatgaacccaggcgtagcagtcagtagtagagagttgaaagcaaagaaggcaagtcccaaagaagcctgggaagtgatgagcactggagctaagggaaggtgcattcactgagcacattccttcatctcaactgtttgtttattcatttaaaatgtaaagttggcttaatacacaagaccaaaaagtttctttaaaaaccacctctcatttaaggaccaatttgatgatcacctccacactgctgcctttgctgactaaaaatagattaggcccacagagctttgtacattttattaaagcatttatatgagtcatcacatttaattctatattaacactctgcctcctcagatggaacacaaacgcctggtacatggatgctacaatgaaaagaatatgggtgctgaaatcagagagaatcatccaaggtcagaattg

SEQ ID NO: 688555 - DNA, 1279 bp, Homo sapiens
ccccagtaaaattccatctgagtctgtttcccggaaatctgacctaagacagatgttgactttattcctagagattaaattgcaaaagccattcatatttgaggctgtgtctccctaggmccttttctaaactgagatcgcacttctctgcctcaatcttcttttgcttttttgcttctgaaactgtactggcaggtactgccacaccatctgtgcataacagcccagcaaattttgggggcatctgctacagtaaggtcacattcccagctgttgtgtcatgtcttcaacatcttctttgatttctctcactccttactttgcagagagcagttcaaggtaaaatctccctgcttgtttgtttctattatccacctgctgttgtagagaactgacattatcttatgtactctttaaaatggaaagacatggaactcactaattaaatttgcagatcaagctgaaataaaagtcatagcaaaatcactaaggacaggcacgttatgtaaagtggcttcagtgcttagaaatatagtcaggaaatgaccaaatgagctttagcaaggagacctgaaaattaatacatctggaggaaaggaacctgaaacacagctatttaaatttccagggagaaaactggaaagcaacaagaccagcaagaaaaaaaaagaataaaaagaacaggaaggtgatattagacacttcaacataagcttatggtgcagtgaaactgaataaaaaacagggtgcatttcttggctgtattttaagatgcgttactgcacatggttgcaaggtgatccctatatggagctgccatgtggtagaccatgttggttttcaggtgcttgggtaatagcatgaaatagacaaattgggagcaattggaagacagctatagaaataatgaataggagtgattgaattacaagaaaaggagataaatgggtgtaggtaatttcctccagtgccaagggagagtgaagatgaaggtcagcatgggagcaacattgctctaatgcagaaaagcctgtgctggagtgttacctgtcaaaatgggattaaggctgagacaggaaagggtagtttcaaaaagtcggcaagtacttccaaatgcgcagccactatggcacagtcatcaaaaaggagctgtaaaagaaacagcaccacacttgtagacgagtctgtgaacactgggcttcttggcatgagtctgaacctgaggccagcttcagcagtggacaaagttgcagctccattccaggcacagagttggtca

SEQ ID NO: 688556 - DNA, 608 bp, Homo sapiens
ttctcttatttaagtgttgtttttgaacactgagatgaaaagtttatcttaaatgttgattttaatggggccggaagtgtgcaaacctttacaaatgaggcaaaaacacagcggaataaactccagtctaggattctgtagattctgggcaaggcatttaatgtttctcgctgcatgctcttacgtaaaatgtgtacagttgcagccctggagattccgcattggctctgacrgtgtgtctgcccctacagaactcatgtgagtcgagagactgataagtaaacagattattataatacagtctcagaatgcagtggcagtagtgtgtaaaagacgcaatggtaagagtagagtggacccagctggggttacccaaggaggggaggctccaatggagggatgtgtttaaactgggactttaagttggaaaagaaggaatgtatctcagtgtccacagaaccatgcaaagtgagaacatggttctgatatgcacaagtttcagttaacaagcaaagcaaggattgactgtattaaagttcatagtacctactgcattctagtcaagtgacatttgctcatatgtaaaagaaagaatagcttaaatacct

SEQ ID NO: 688557 - DNA, 985 bp, Homo sapiens
  misc_feature 17: n = A,T,C or G
acaatctgggttaattntatgccattgttttttaagtagttaaattttatgtgtagtcaggatttgttgtttgtccttatgatatttaggaaatgttgatgaataacaaaatgtggcttttgatacctttttcagacaagtttgctctaagaacttctttcctccacacgtttacctgtggtaaaatatacggcccatgtgggtcaaggatttctgctcattttgttcactgatatattcctgccacataggagatacttgttgaataaatgaatggtgagcaaaaacgaaaaaaaaaaatccaaattccattgctggtcgggtagcactttaaggtaggattgttcttttcaaaccacaaaaatagtgcattatcaaaatatttgaaagggcatctaaaggttttggttgtaatagtttaatgaaatcattatctattcaacacttgctaattaagcttccattatggatcctgtcagatatggggcaggcagtaattagataaaaatcccaccctggaggtgttcattttataatggagtagaaagatacataaacaagcaattaaaagagacatttctctgtagtgccagatgacacacagaagagtaagtggtcagttgattctttcagggaaaaaaatagaacacaggattgaggaaagttctacagtgggatattcaaagtagggtttgaagagtgagtaggtgttcagcagatgatgtagatgtagccagaaaagtgcttatttagtgctttagtatgttcgagacctggtggtagtactttacacatattacctcatttaatcttcctgagtctgaggaatgggtctccttttgttgggtgtggaaacagttaaatggcaaggtcactgattacagagacaggattaaaaaaaamaaacaaacaaccttgagtcttttgctctgttaccctactgggcatttaaggtggagttaatagctggtgtaaaggcacagaa

SEQ ID NO: 688558 - DNA, 607 bp, Homo sapiens
ccaccagcctcggcctcccaaagtgctaggattacaggcttgagccaccgtgcccagccaattttaatttttgagacagggtcttgttctgtttcccagactggagtgcagtgatgcaattatggctcactgcagccttgaactcatgggctcaagggatcctcctgcctcagtctcctgactagctggaactagaggcatgcgcwtgacaaccagataatttattttatttttttgtagaaatggggtctcattatgttgaccagggtgatctcaaactccaggcctctagtgatcctcctgtctgggcttcccaaagtgctgggattataggcgtgagccactgtgcagagccaaaattttagcagtttctgaataatgtttgataggttccattcaatatgttaaaatatttttaagctatacttacaaaatattcaatttccttctttaatacttcacttgtataccttaaaatcctctcgaatataaaattagttcttaaaagatgataagcttttaaataatttgattcctaagttctcttaaatattttaatagatacccttaataaaggcttgacttaaagtctaaatcaataacaaaa

SEQ ID NO: 688559 - DNA, 2505 bp, Homo sapiens
tattggtctatttcataattttatcttcatttccttaaatcccaaatattgatatttcccaagggtttatttttgacacttttcccttcttgcttgagatcaatgattcttaattaatgtgtgttgggaaagagggcagaggggaattgaagggccctttcagaattactagaataattttttcagactaggtatcttccattcctgacccacagaccattctgatatatcccctttagggcataatatagtatattttaactttttttactagtttactggttgtgataactagcctttctaaatttataaagccttagtgtttctttttttttttggcacacataaatgcacatctagaaatcctcagtgataaatgtggagaaagttgttatcttcctctcttcacatttctttcttgggttgggtcataaaatagatactctcaccaaatcttctcgcctttcaagaagtactagtgaccttccttcaatacttaccctaccttggggatgttctggggaaaacgctgccatcattctgtccacccttttacttcccaaaagaagagagatttgtttaataggaaaattggggagaagctgatatctattgtcccatgtttctttactggacaaactagtgtattaaagttcattgcctatgagagatcttatttcttggaattaattgttcccttctgtctccctcccttcttctctttctctctctctctctctctgtgtgtgtgtgtgtgtgtgtgtgtgtgtgtgtgtgtgtaagcatgcacagaggaaaaaccacatgaggacacagtgagaaggcagccacctgcaaggcaaggagagaggctcagaagataactaacctgccagcatctttttctttgactttcagcatccacgactgtgataaaataaatttctgttgtttacctaatctgtggtgttttgttatggcaaccccagcaaactgatataaggctgttatgaagattaaaagttaatatatataaagtgcctggcaatatgcatttcttattgttattgcttccctcaaaattcagtttttgtatatctttaattcttagagctcacttccttcttctatataattagatttactagtttactgtttttcttttctggtagtttgtaagcctccaaaagaatgaggtaccacattggcctgttcaaatataaaagtgattggaacatattaaggactaaataaatatttattaaattaatgaaggccttatgaccaatgtaggtgctctgccaaattatttttgctaaacatgggccaattgatttgagcatgtcttctttctgacttgtcactgaattcatgttccatttacttaaaaaaacaaactgtatttaaggatataatatagattacagaactgaatcttatctttttactgaccttacagaaatatgttgaataggaaatgaaggaaatagttacaaagaatatgatgtcagaatgtttgggtaaagatagaaaacacatctgagtggcatcaataacaaacagcctcacaggaaggaaagcacattggctataggtattctccctcctactctctagtggagatagtttttaccttgaggacagtggcgcattcagcataagaataggggtcatctatgactcatgagtctgatgtactggggtcaaagccacccagataacatccccagtctggtcgcagaaccataggcttcatttactaaccttgtacatatcagtggttaagccctagagcttacattatgggataggccctctagagattctactgagatttatgttcctgagcatgaagtaggaagaagatgaaaaagcatgatttactttgatggaagcagtgtgttctgttcctcctgtcttatattgtacttgagagtgtggtggtgcccaagaggtagcaagaacagtatttgcagattgggcaatgcagccgggcctyaaaataataaataaggttcaactgggaaaaaagcaacataacctattgagggaaaaataatccatacgctattaataagacaaagactgtaactagcaaagacaggagcataattaggccttcaaaacatcagtatagggtattatttggtcaaaagaatcaataaaacaccagttatttttcagaaaggaaggaaattgtgaaacaggcaggttgtctagcttagtttctttagtatccacattgtctcaaaggaagtcaaaagaagttctgggtgaagaaactttaaagatgacttaacaaatctggagcggatcaaaggagaatactaaagtagcataggagacaaagttgcttctataggagcaaatacttatgactgtttagtctgaacagatgaaataaggtaaagtcaaagagcataatatgacgatggatgtagataggacacaggtaaacttcttcaccagaccaccaagttttagaataggaaaggacagactgatggaacattatcactgtgaaag

SEQ ID NO: 688560 - DNA, 2825 bp, Homo sapiens
ggaaaggaaaagtcccaaatcaaagaatcaaatgtctacatcactgctgtcagatgtgggagataatgagagccagggacattttcctgaactttctaaaattgtacgacctagataccaacgattctacaatatctgatcagaagtgacccatccatatatttttaatgattagtgatgacytcaatagtacatcaattatcaagtagaaaattgccaacatgttttatctagaagcatatcaaaggatccttttgattcttaaaatcacctataagtgatcctttgccttctcaacataactattttttttaaaacactaacatctatgaaaaaaaaacttaatatcttgatgtaacttggtttctcagctgaaaattgtatccttaattaaggctgccttgagatttaggccactaggtcattgaaaagggtaagcttcataactaaaagtgaaggaagagcctggatatgtggtcaacgatgtgcctcaagataaataacctatttcttatttttttctcaatttctgagactcttcttactgttggcaaagtcactgtagccccagaagcaaaagctgttgttgctccatctttcctggaatcaatgcttgcctttaattcccctttacagattcacctctaagaattttctttgaatgttcctgggatggatgaaatgaggggagtgaagaagatttgtactacttctaaagcagagtttacaattcaagctctgaagaagaaaaaataaataaacttaagtaaatgtaaacacaagttgaggcacattcaataatgaactctaactttgcatttaaaggaagaaagatctgcagataaatgaggtcaaaaatccctggggctgatggtaaagagaatcttgacagcatctcacttcatcaaacagagcttgagaaaattatccattccagataagcttctttaccttgatggcagtcatatagccaagcttaatgagcaaaatttcaagcaaatacacttttcttccaataatgtaaaaataaaacaagaatgcctacacttactatcactcatcatatatctaagcacacaatgttagaggtgattccaaggaatcatctctcatctgtcctccctactgaaatcatcccaaagtagaaaagatcctttacttatttgcttgtttgtttgtttattattttttgagacagggtctcattctgtcacccaggctggtgtgcagtggcacaaacacagaccactgcagctttggcctctcctggctcaagtgatccttccacctcagcctctcgagtagctggtattacaggtgagtgccaccagctccagctaatttttgtaaagacagggtttcgccgtgttgcccaggctggtcttgaattcctgggctcaagtgatacactctcctcgacctcccaaaatgttgggattacaggatcctttactttaaaatatcctggggctttatcaataactctgaaaaactttgtgaattttcttgaactgtggacttaaacattcttgtttaatttggagcttatgagtaaatatgttaaaaaatagtccaccagataactatcctatgccagaaaactttaaaatcgtgaaggggaagaaaatcatgtaatgttactatctttaacgggaacaaaatgtagttaagattgcaacagaattttccataaaatgcaaacatggtgtgataagcacttattaagtgctcaataaatatttgttaaatgaatgattgccttatgggaagaaagtgccacttaatgataacaatatgcatgtttgaaagtagaaaattttaggaacttgaagaaacaaccaaatgtcaatatatgttgaaatagtactattaaacatgcagttggtatattgcctcttgcttatgataattaatccaattaaataaggcaaggaaccttcatgagaaggttttggagaggtcttcagatgtggataactttgttgttaagactttgagatacagctaaaagcagcagaactagttttcctgctcatttggcataaaataataagttttaatagaatttaattggcctaaagggctctcctccaaaggaccacctacccaccaactttcaaatgaagtttcttagcatgaggagcaggtgatgtaatgagaaaagctcagagtttgtattccaacacacttaggcacaaatcatggcactaacgtttattgttgcaagtgaccaagggcaaataaatgtattttcttatcggaaaaattgagacaataatatgtacctttcagaactcttgtgaggattagtgataatatatgtaaaactcctaatatgtaagtattaaataaataatagctattatcaaaattataaaaaataattttaaaatgagaaaacatttaaaaataagacaaaattatggaataatcgttggcttaaaataatagcactcaagactacaattcttcatataaaacataatctagaatctgaaagaatcttttctactcattatactgtaaatgaaaagagtcaaactctgtaaaatattggatgagatttattttgagccaaatgtgagtgaccggtggcccaggacacagccccaggagatcctgagaacatgtgcccaaggtagttgggctacagcttggttttatacattttagagagacatctaaaatgtacattggtttggtccagaaaggcaggacaattggaagatggtgtgggggacttccaggtcataggtggattcaaagattttctgattggcaatgggttggttgaaagagttattatctgaaggcctggaatgaat

SEQ ID NO: 688561 - DNA, 1049 bp, Homo sapiens
atgtctcttggtttctgagtagacaatcaacagatgctgtttaatgctgttggtaaatctaaaaatgacaatcactgactgtgaaactaacgaaatgtgtttcaggaatcttgacttgcaggggccctttgcaaagcattgggaggagccctaacaatgtgtagttgtaattctgtgttctttttcttaaaagggtgtgctcccagatgagtaaattcggtacccacaaaatttggatgcactactgagcttctaccttcttttggaagggaactatgcatttggagggccaggaagctaaagtatccttagctgtagrgtaaatctatctctcttttctggcaaccaccaatataactaaagacagaaatcattgacattggttgcttcaggggaccatcttggtagagttggggtggggtgcagaaagaggcaggtgtgtacttttcattttatagacactgctgtgattttatgtgtttaattttaccctattatcttaaatatatatgtattttttaatagtgacaagtaatttacaattcactagtcaacatgctcttttctcttccatgcatacaaaagccataggttgaaggcaaaagataggactgcaatgtatgtatatatatgttttatcaatttttccacggctgttgtgacattccttatgttcttatacacacatttattctggctttggcgctacctttcaggttaatagaaatcccacatgggaaagcagcagtgagtaagataacaggaaataaaaacatccggcctcatattctagtccttaggatgagcaaccacagaaaagatcagcgatgacatttctttatcaaataaatactgttattcataggactcttaaagatacaggagtattttctttttacaaagagttttctcttaaatggagtttcttcttccccaagatgctttaaaaaaaaaaagacattcactatttttattatagaatctctgtagcattttaacaacaagattttgcttttgtaaatagctagtaatattgttttgggcagatg

SEQ ID NO: 688562 - DNA, 654 bp, Homo sapiens
caaaatgtatattcactaagtcgaatttccaaaacggtcagggatgaactaagaccacacagcagtagcaggaaaggttaaaatcagtgatcttgtattggaaaacattaggttttgtttagcattattttaaagcgctaaataggtgaggagatgctgaaaattgaagccatactgtgacaacatgattcttaatcgttttccttccataattaaggacagaaaggaattccatggacattttggggaatttaagtgctacattcatttatctaaatatcttttacacgaaagttattttttaaaatttgttatttgtactttcaatatatctctgattattaagaatattttatatagaatcaatttcacttatctctggtgaaataaaaagattacaaaygtcatttcaaattcccaagatgtagatgccatatagcatattcaagtcacttgttaagttttcattatagctgcctattgtggtaataacctatattttattttagctaccattacacactccataaatctggaaagtatgccctgttttgaggaatgccaactcatgaccatatatacacaggccatttctgactcttatttttttttttactgttttaaaatttatactgaatgatattcaagaaaatg

SEQ ID NO: 688563 - DNA, 418 bp, Homo sapiens
gagcattatgtttgtctacactgtaaataatgatattgaaagagcaaaaacattgtctgactcatgtaactttctggtagtcataaagtgatgtctcaacaaaaagtgaagggcaaatgtacccacaactctgagtaatcctatcatcctacaaatatttttttgtgacataataaaccacgagaccaagtttgtgtgactagaatttcarcatggaattacctcattaataggcttataatttgggaatattttagtacataagttaaaaacaaatcttaagcagaaaagattttttagttttttactcttctttctaccaatgttcaaaaaatttccaattaaggatgctttatcaaaatacacattccaaacattggttcctcattacctgcttccctgatgtaatcacttattt

SEQ ID NO: 688564 - DNA, 602 bp, Homo sapiens
cttaatagtgtagggtacaacaccatagaacaaaagggttttgtttgtttcctttttttgagatggagtcttgctctgtcacccaggctgcagtgcagtagcacaatcttggctcactgcaacctccgcctcccagattcaagcaattcacctgcctcagcctcctgagtagctgggattacaggtgcccgctaccatgcccagctaatttttgtatttttagtagagatggggtttcaccatgttggccaggctggtctcgaactcctgacctcaagtgatcagcccaccgtggcctcccaaagtgctgggattataagcgtgagccaccacgcctggcagaacaaaagttttgatggcatttctctgcactccaggggtgccctaagttcaaatcacccacagatcaaactgctggagggtatatatactgcatggtttccaggcttaaacattttcttttttggctcttatcaatggcagtatctacatacaagttcaaaaatcacaaagaaatcaattcagccaaacccattcttcgrtgaatatattcatcaaattattttactaaatatagccttttaaaaatctatagacagtca

SEQ ID NO: 688565 - DNA, 677 bp, Homo sapiens
tcaaaagacctacatatactgaacacaaatacaattaaccatgtctacattttatgtatatacaggaccttgacaattttaatatggcagatttactctacacttttttgaggggaggaggatatatgcctcttgggaaaactgggataataaaagcttcttcacttacactctgttcagacgtgtattatggattcatgttattatgggtacagwcataaagccactgctattgagcctcagatgtggcagcaaagaattaagagatcatcacaacctctctctaaatataatgaaaatctaactttacaacgctcctcttaaaggagctttcctcatgctacttggctatgcattaagtcttggcatacacaaaaaaataaaaacagagtaattctaagagttcatttatgttggctggattatgaagattaacttctcagatggttttccaaagaagtcatcaaatgtaagtacaattgaaaataaaatcctgagaaacatttcaatattgataggaaactgaagacaggatatagtcaagacaccactcttagctgtataatatcagtgtatattgcaaaggattaaacagtttaattttctaaagaatataataaagatttcagcttcactaaggcatattttatgaaaataatataattattctcatggca

SEQ ID NO: 688566 - DNA, 639 bp, Homo sapiens
atttaagaagaaaattaaaagtaggaaaaagctgacagtcagatcagaagcattacaggaagtttcttgctcattttctccagaggttaagccagaatatattttttaaaagggcagaagtttaaggtctagctagggaataaagacatgttttgtctgacacttcccaattcaaatccaacatttatcaaatgattcttaagtagtgtattaaaaaaaaaaggcaaccaggagctggcagcctgggtatattaagctttcattattgtaaatttgtattttaaaaacccaatatcttttctgtaaatatgcaagggtttctctgacaatttctcttttttaaagccacctctcaatgaaacattttaaataaaactcctatatctaaaatgaagtcttggcatttgggagtttaaaatctccccaaattcagagggggataaaaaaggtgcataattayacctcatctgagtgtaagtcaaaaagtaatcaaaaatgtttaaaaccaaaaagtaacatcttagagtggcattttaaacaaaaaaagtacttactggcattttctaaattttcatgcaatttgttattcattaaatcagaagaaaatgtgcactaccattttttgatatggcagatagc

SEQ ID NO: 688567 - DNA, 1247 bp, Homo sapiens
tagtatccccaacgagtatatattctaaaaacaactgctttatcttttatgaagagccttttcctgtgtcatttttcctgtgtcaaagtagatgatactctcaagcattcctttccccttgtcccagacaaccctaactctccaggtaagcctaaattgtttcttattccagttctgtgtgggcttccaccagttctacacaggacaacctgacagaacccagactcgtgcccamtgcctcacaatcacatatagtttattgggattatcaatcaaggtgttctctactcctatgccttgcggatatgtatgtggcttaaaccaggtgtcataaattggtcttacttgcctatttaaatctatatatatttgattttatcctatgcatataatttggtcaacataacaatcctcttccttccctctccctttctttcattctttaactaacatttatgttcaaattattgtgctagcgactcaaggttcaaagatgaataaaggaaaatagcattctcaaggaatcttgtggtgatagtgggaaagaggaacagcaataaacaattataaaataagggataggtacaactttaaaactatggaaagggtagggttaacatgcctcacaatgaaaggaaaagggacacagtacaaacgatttttaagcagagtcctaaagaaggagaaggattctgccaatcatacaagaagcaggaaagaaaatcacagaaatagacaccaccttgtgcaacaacatggaaataaggaaaagtatgatacgttcaggaacatgagtagttttgaaaggatggagcaaaaatacatagagaatatggctagatcatgaatgcccattctagggagttaatcttttattctgggagcatgaaatacaactaaagacttaaatacacctggggaaaaataaaatctcaagtgtgcatttaaggaaaataaaaatgaatggagcatggactatggattgggggatttggggtacaaaataggtaaacactatttagcaccactatttttaaaattatttaaggcatttgggacaaaaatcacaaaggcatgacctgagatagtaaaagtcagactgtaaagagtaacagatttctaaaaatattttattttagagacagaaataatattctataactaaatagatttaagatacaggaagaaatagtttgaagcactgagaggatacaatggtacaatcatttatgaaatggactaaaaaa

SEQ ID NO: 688568 - DNA, 583 bp, Homo sapiens
ggatactaagctcttatcagattttttatatgtatatttcagatatatttatatttatatatcatatatatatatatatatatttgcaggtattttcatcccacatgtttttctcccccattagtatcaggaagaaattcaagaacttaatgaagtcgcgagacatcggccacggtccacgttagttatgggaaacccgcaagaaaacagacaaatcagagagttgcaacaagaaaacaaaggtaagatacgttactttttgacattaatcccatttctagtctatattcctaaatcgtatttrttgctctttatcctgtcccacatatgaacatctgcctggttgacatcctcttagattctcacccttaatatccagttagcactgctgttgttagctatgaaataacccagcttcattctctgcagtcccactgcattggcccccagattagatgctcagtctcttgcctgaaatgtccaaactgatctccctgattccagtctctcttcccccttccaatctgtcttcaacataaccatcagattgatatttcaaaaatcagtctgatcatgtaattct

SEQ ID NO: 688569 - DNA, 604 bp, Homo sapiens
cttcaaaagttgaatgaattgggctatgaagttttgcctcatccaccgtattcacctgacctcttgccaaccaactaccacgtctttaagcatctcaacaactttttgcagggaaaacgcttccacaaccagcaggatgcaraaaatgctttccaagagttcgtcgaatcccaaagcacggatttttacgctacaggaataaaccaacttatttctcgttggcaaaaatgtgttgattgtaatggttcctattttgattaataaaaatgcgttgagcctagttataatgatttaaaattcacagtccaaaaccgcagttagttttgcaccaacccaatatcttcatagattgaaatataaattaaaattgcatttgaagtagattccacggactttattaagaatgtagaaatgtggcctggcatggtggcttacaactgtaatcccagcactttgggaggcccaggcgggcagatcacttgagtccaattgttcaggaccagcctgggcaacatagtgagaccctgactctaataaaataattttttaaaaaaagattaaaacatgtaccttgaaaagcattttggcccaagaataataacga

SEQ ID NO: 688570 - DNA, 1848 bp, Homo sapiens
atccttctgttctatgttccacagcaccctgtgctcattccaactttaggtcaaatgacatatcataatgatcagttaactgtgtgtctccctccttcattaattccccaagggtggagtagtgaatgtcactgactcaatactgagattgatgacaagtttattacttatgatgcttgcccaactgctcactcttccaaggacaaatagatataaactaggtctcgagagtgaatgtttcttttttttttcttacaagaaataaataaataaatgaataaacctccccttatttgagaaaaaaggtatgtgttgatgttggattggggcgatgtcctcatggagcaaacattttatgatagtccaatatactaatgggaaatgtctattacaggagacattaaatcccacatcttaaatcacatgtaacacttatgatacagaaggaaaatatgaacatttttattttctatgaagcatgtgtaaaatatgcttggctacgtggcttaataaatattaatataatgcaacccttttgaagagtataatataaaatgagagtatcatatatgtatatatgtacatatacacatatacatgtatagatataaatatattagatctttacaccaacaattcttgtggaacatggcaaccaaatgatatcattatgagttacccttgattcttcatgcaggggaacctactcttcggtcatgaagtccttacaaaccaatgctttcatctatagagtcttgaggctaatttatgtatttgtttctttagaagttatataataacatgcagaaaagtaaagttagctttacatgttgttcactcttttgaaatagtagctttaggtctaatttacttctaatatcattagcaaatattttctgcaaagattttacccttctttacatggctttctcagacaattggaagaaatgccttgtacttattgtgttgttttgttgtttttccgttccagactgaccactgatatcatggattctctatttaacatagaatgtattactaactgaaccatgagaaaataaaataaactaatagaagcagaaaatataataatgaaaraaatccaagataaagtgtgcattaggccattcttgcattgcgattttctgttttagtctgtttttgcactgctataaaaaaaatacctgagactgggtaatttataagaaaagaggttttattggctcacggttctgcaggttgtacaggaagcatagtggcatctgcttctggggagtccttagaatcaggcacttcacatggtgaaagcaggcgcaagagggagagtgtgtgccacacacttttaaacagccagatcctaaaagaagtctctcactatcatgaggacagcaccaagaggatggtgctaaaccattcatgggaaatccacccccatgatccattcacctgccaccaggtcccaccaccaatattaaggactacaattcaacataacttttgggcagggacaaatatacaaactatatcattctcccttttgatacaggcattttattatttttattttgttcaaatagaacgcttttcctgtaagttactcaaggcatcctaaaaatctgagttaacatgccctgactctcatgacacaggactacagatcttgaaatacagagcttagtctgctagggctgtcataacaaaattctacagcttgtgtggcttaaactacagagatttattttctcacagttctgaaggctagaagtccaagaggaaggttccttcagggttgatttttggtgaggtctctcttcttggcttgcagatgcctgccttcttattggatcc

SEQ ID NO: 688571 - DNA, 1010 bp, Homo sapiens
tactgccacagccaattacccaaggcacaagctggaaatcgggcttttcttaacttttcctacttacaaaatgttaccaaatttttccttagttattgcttgaaaaactttcatgtaaatatctcttaaatttcttcccttcatcttcattcccagttttaccacttacttgttctattactgttttggtctataacttttaggcaagttatttaaccattttctacttaagttttctcatctgtaaaatggggatagtaataggtcttactgtataggatttttgtgaatgttaaatgaattaatacatgttaattgcttaaaagggtgtctagaacagagcaggtgccacaatatgttaatttttttttttttttttttttttgagacagagtctcgcactgttgcctgggctggagtgcagtggcatgatcttggctcactgcagcctccacctgctaggttcaagcgattctccttgcctcagcctcccaagtagctgggattacaggcgcctgccaccatgcccagctaatttttttgtatttttagtagagatggggtttcactatgttggccaggctggtcttgaactcctgaccttgtgatctgcctgcctcrgcctcccaaagtgctgggattacaggcacgagccaccgtgcccagccaagttgtttttattattattgttattgctcttactattggtaccaacatacctaaattcaggttctgattaactgctgtctagagtatttcaccagcctcctaatcttcccttcagtatctattcttgttcgtctcaaatttggcttcaacaacccctcagagtacactgtctaaatcataaattggaccctacactgtttaagataggttcttaatagttgccaaaagtatcagtgaaacaataaatggattaaaatgtctccaatatcaatgtagcaaggtttcaatgaacagttttaaaattatgaataaatgaataaaatatttggaatactctttgc

SEQ ID NO: 688572 - DNA, 634 bp, Homo sapiens
tcgaattgctggatttattgccagcaggacccagaagcgcttctgtttctgtgaatgcagtgcattcattttaacaaaccccatttcaaggggtctgtcacaaagcaaacacacttcttatctggctgaatatttaacgtagcagctccasgtcccaatttatctcctttaaaatgggaactagaagtcagtttgaggggcttgttcagattatttttaataaattactttcaatgattacattatgatgtcatcctggctgaagtggattgatttttaaaaatatttctaatactccagtcacttttaaaaaaattcaactttgtttttctatgaggtttatactttcagacgttatagataagtctttgaacacattttacatccccagaatggaatgatgaggtcacactttaaaacctaccacaccgacagtgatggtgaattttcccttttcctgattatcagcctatcatgcacatctggcaaacaaagaatcccaaattattttttcttggttgaatttaagctgcaaactccagccttattgtcctaatttgttaatgtttatggtaaaaggaggcaatggagcttaaatgtacaggagatgatgaataggatggtctgtctgtgg

SEQ ID NO: 688573 - DNA, 609 bp, Homo sapiens
tcatttctaatactttatacttttgagagcattttgacattttaactcatactgtactatttcagaactcatgtgcttcccctgtggttagtataaggagacagaaaccagccaaggaagcaaaaaccctgacttttattccagatcacaatttttctagtctcattacacatttgcccagccactgctgccctctactatagctctcactcttgcaaggattttagtgatctttctttgtatcaactttgtatccagtatcaacttawaaggcaacagtaacatccatacagcagatgcacagaatcatattcttatggaagcttgcatacattttctttatgtcaaaaatttaatttcactaatttatttgctatatttcctttatagccataatatgccagcaccacattttaaaacctacgaattggaacaaattaaaacctatgaatgctaagattcacttagcatttattaggaaaaacataaaatctataaataggcaagacaatgtatttgaaaagttgttgtccaagttgtgattcatacacatttgttcatggaccttgaaattcacagagatgcttcagcttatgattgtgaggctct

SEQ ID NO: 688574 - DNA, 590 bp, Homo sapiens
taaaatatacatcattagtttaagtacacatttgagaatgtacaagatttctgcagcaatcgattttaactgtattcctactcagtaatattattatcaccattagctgtttgccagtagattcaggtgtaattttctttttttactgctcactggacccaagcctacccaatttagtgtagttggctgtggcgtctcttcctttcttaaaacacagggctttccaatttccaagaatgtttatggtataagagtaatttgaagcaggtgtttaagcttcacgcctatgctgtacaacasaaggtttatatatttgtcattatatattgagacagaccacagcacttggaatgaccatctgtcaccaaagcatgctgtgtgctgaatgtaagaggaataggattttttcactgcaaactcctttgaaaataaaggtttcactcccccaccatcggcatccttactcattattgttttggattaaaccaaaagaattatttttgtttctgtgcttgcaggctgtcaccaatgagagagcattagaatactgcacagcatttctgcttggtttggtttacaaaatcgtaaac

SEQ ID NO: 688575 - DNA, 336 bp, Homo sapiens
aggctttttgtgcaagaaggaaactaaaatctgaacaaaaattatacatggctttttagttttttgttcatttgactgcttatttcttaaattggttgctcttgcaaaagctatagaaaacagcagattaaaatgactaaaatatacgacagtttctggacccaaaactttccatggtagaaagctgtatagaaggtgctttttccagtgtatttacagaagagtgaaggaagctctatcagaaggcagaaamaatccttgcccccaggtgaaagaggactcgcagcatttactcaacagatttcagaatcactatggaccagaaacggctgttta

SEQ ID NO: 688576 - DNA, 680 bp, Homo sapiens
ttgtttttttgtttgtttgtttgtttttgtttttttgagacggagtctcactctgttgcccaggctggagtgcagcggcgtggtctcrgcttactgcagcgtctgcctcctgggttcaagcgattctcgtgcctcagcctcctgagtagctgggattatagttgcccaccaccacacccagctaattttttgtattttcagtagagacagggtttcaccatgctggccaggctggtcatgaacatctttggttttataagtagataatatagtatttattatatacgaacatattctgaaatataatattcagaaaaaaatttgctagatgccaggtgtttttggaagtctacactcttcaatacagtagccaggagcaacacgtggcgtttgagccctgaaatgcagccaactctaagttaaagtgtgctgaaagtgcctaacccaccctgggttttaaagactatgaagaaaagaatggaaaacagtttattatattttatatgggttacatttttaaattatgatgtatacatcatgtgaaaattttaaaaaattgataaaattcactttacccatttttttttcatgttttcatgtggctactagaaagcctgaagttaaatctctggctcaccttcttggcctgcaccatgtttctaggacaaagctgctgagtg

SEQ ID NO: 688577 - DNA, 680 bp, Homo sapiens
ttgtttttttgtttgtttgtttgtttttgtttttttgagacggagtctcactctgttgcccaggctggagtgcagcggcgtggtctcagcttactgcagcgtctgcctcctgggttcaagcgattctcgtgcctcagcctcctgagtagctgggattayagttgcccaccaccacacccagctaattttttgtattttcagtagagacagggtttcaccatgctggccaggctggtcatgaacatctttggttttataagtagataatatagtatttattatatacgaacatattctgaaatataatattcagaaaaaaatttgctagatgccaggtgtttttggaagtctacactcttcaatacagtagccaggagcaacacgtggcgtttgagccctgaaatgcagccaactctaagttaaagtgtgctgaaagtgcctaacccaccctgggttttaaagactatgaagaaaagaatggaaaacagtttattatattttatatgggttacatttttaaattatgatgtatacatcatgtgaaaattttaaaaaattgataaaattcactttacccatttttttttcatgttttcatgtggctactagaaagcctgaagttaaatctctggctcaccttcttggcctgcaccatgtttctaggacaaagctgctgagtg

SEQ ID NO: 688578 - DNA, 680 bp, Homo sapiens
ttgtttttttgtttgtttgtttgtttttgtttttttgagacggagtctcactctgttgcccaggctggagtgcagcggcgtggtctcagcttactgcagcgtctgcctcctgggttcaagcgattctcgtgcctcagcctcctgagtagctgggattatagttgcccaccaccacacccagctaattttttgtattttcagtagagacagggtttcaccatgctggccaggctggtcatgaacatctttggttttataagtagatamtatagtatttattatatacgaacatattctgaaatataatattcagaaaaaaatttgctagatgccaggtgtttttggaagtctacactcttcaatacagtagccaggagcaacacgtggcgtttgagccctgaaatgcagccaactctaagttaaagtgtgctgaaagtgcctaacccaccctgggttttaaagactatgaagaaaagaatggaaaacagtttattatattttatatgggttacatttttaaattatgatgtatacatcatgtgaaaattttaaaaaattgataaaattcactttacccatttttttttcatgttttcatgtggctactagaaagcctgaagttaaatctctggctcaccttcttggcctgcaccatgtttctaggacaaagctgctgagtg

SEQ ID NO: 688579 - DNA, 680 bp, Homo sapiens
ttgtttttttgtttgtttgtttgtttttgtttttttgagacggagtctcactctgttgcccaggctggagtgcagcggcgtggtctcagcttactgcagcgtctgcctcctgggttcaagcgattctcgtgcctcagcctcctgagtagctgggattatagttgcccaccaccacacccagctaattttttgtattttcagtagagacagggtttcaccatgctggccaggctggtcatgaacatctttggttttataagtagataatatagtatttattatatacgaacrtattctgaaatataatattcagaaaaaaatttgctagatgccaggtgtttttggaagtctacactcttcaatacagtagccaggagcaacacgtggcgtttgagccctgaaatgcagccaactctaagttaaagtgtgctgaaagtgcctaacccaccctgggttttaaagactatgaagaaaagaatggaaaacagtttattatattttatatgggttacatttttaaattatgatgtatacatcatgtgaaaattttaaaaaattgataaaattcactttacccatttttttttcatgttttcatgtggctactagaaagcctgaagttaaatctctggctcaccttcttggcctgcaccatgtttctaggacaaagctgctgagtg

SEQ ID NO: 688580 - DNA, 680 bp, Homo sapiens
ttgtttttttgtttgtttgtttgtttttgtttttttgagacggagtctcactctgttgcccaggctggagtgcagcggcgtggtctcagcttactgcagcgtctgcctcctgggttcaagcgattctcgtgcctcagcctcctgagtagctgggattatagttgcccaccaccacacccagctaattttttgtattttcagtagagacagggtttcaccatgctggccaggctggtcatgaacatctttggttttataagtagataatatagtatttattatatacgaacatattctgaaatataatattcagaaaaaaatttgctagatgccaggtgtttttggaagtctacactcttcaayacagtagccaggagcaacacgtggcgtttgagccctgaaatgcagccaactctaagttaaagtgtgctgaaagtgcctaacccaccctgggttttaaagactatgaagaaaagaatggaaaacagtttattatattttatatgggttacatttttaaattatgatgtatacatcatgtgaaaattttaaaaaattgataaaattcactttacccatttttttttcatgttttcatgtggctactagaaagcctgaagttaaatctctggctcaccttcttggcctgcaccatgtttctaggacaaagctgctgagtg

SEQ ID NO: 688581 - DNA, 638 bp, Homo sapiens
agagatgtttaataacttattctatcacggggcatgattagcactaggcagaatttctcatccatgaatttgtagattaagaaatattaataaggaaatctgcatgataaatagcatgatgtgaaatactcagtttatcatcaatcaytaagtattcacaatgtatgagaagcatccatcattcagccaaaagaagctcccacaaatacctgctcacgaacacagcaatccctaatactagatatgcttaattctctatcacaagagacaataaacagtccatgggaaagaccaaggggacgatctcacagcacgattttttcactgattacacatcagaaagctgtaagggactatgatttatgtaggaagcataacaaataattaagtcatttaaaatcatcatctgtatacaggaattaaaaattacacacaaattaatatacatgaagaaaatactggaaatagccttccctatgatacgatactattagcagtatagtattgaagtgaattttgctctctgtttctcaggatttctactttctttatgttgttatcagtttatttttctatgaatgctttctgtttgcccacagtctttgtgtgcccaggatagaaacggtatccacaataga

SEQ ID NO: 688582 - DNA, 638 bp, Homo sapiens
agagatgtttaataacttattctatcacggggcatgattagcactaggcagaatttctcatccatgaatttgtagattaagaaatattaataaggaaatctgcatgataaatagcatgatgtgaaatactcagtttatcatcaatcactaagtattcacaatgtatgagaagcatccatcattcagccaaaagaagctcccacaaatacctgctcacgaacacagcaatccctaatactagatatgcttaattctctatcacaagagacaataaacagtccatgggaaagaccaaggggacgatctcacagcacgattttttcactgattacacatcagaaagctgtaagggactatgatttatgtaggaagcataacaaataattaagtcatttaaaatcatcatctrtatacaggaattaaaaattacacacaaattaatatacatgaagaaaatactggaaatagccttccctatgatacgatactattagcagtatagtattgaagtgaattttgctctctgtttctcaggatttctactttctttatgttgttatcagtttatttttctatgaatgctttctgtttgcccacagtctttgtgtgcccaggatagaaacggtatccacaataga

SEQ ID NO: 688583 - DNA, 602 bp, Homo sapiens
tgaaatgaacattcaatgctatatattccctcccactaataaggctaaaatttaaccagaaagatgtaatcatacttttcatttaataatgtactttatggatatttcagactcaacctcgactaaaatttcttcttttgtatctttgtgatggttaattttatgtgtcagcttaacaaggctaaaggatactcagagagcaggtaaaacattatttcagggtgtgtctgggaaagtgtttccagaagagatgagcatttgaatcagtagrctgagaaaggatgccttcaccaatgcagatgaacaccagctagtcctttgagggcccttttaagaagaaaaaaggctgaggaaggatgaattcacctcttggcttaagctggaacttccatcttcttctgccctcagacaccagtacttcaggttctcaggccttcagacttggacagagacttacattattgccctccctgcccccaccacattctcaggcctttggaatcagtctgagacttacacatttggctctcctggttctcaggcctttggagttggactaaattacaccgctggctttcctggctctccacctggcagatggt

SEQ ID NO: 688584 - DNA, 480 bp, Homo sapiens
tggtggctcttaacaatgtagaaatggcaaatcactctgaatgggaggacttgtatcctgtggctttgggattatgtctctcctacagaatgtacataggaagcgttatgctctggtggccaccctaacaaccaagagggattccctcctgaggacaaagctaattcccagagagcagaacaagagaactgaagaaaaacagggccagaacctgcatgtagcactgctgaagcccaccttgcctcagaatccttactatgttacataataaacatgcagactcttgaggccaatttcacacaggttttaccatttttagcccaatgagccttcctgtctgatgatgctgttactgtcaggggttctcagtactctcacttgagaaagtctagggaacrgtttcgcaaggcaagtcacttctcctcacatcccactcccactgtctctcaagatcaccagaactgcgtgtagattcagatc

SEQ ID NO: 688585 - DNA, 800 bp, Homo sapiens
tatagaaactaaaaaaatgaatcaaatggatatcctggaactgaaaaatacaataccggaaatcaaaattggaagtgctttcagaataaaagtgtcagtgaaatggaagacaggtgaatagaagtttccaaacttatacaaagattttaaaatatggaaaaaaaaaaaaagaacagaggttcagtggcttgtggtacattcaggtacagtataggagttccagaagaggagagatataatgaagcagaataaatatttgaagggatggtggttgaacatttctcaaatgtgacgaaaaacatcaatagatccaagcaactcagcagactcccagtaaggtatattcagtagccaactaatcactttagtttgggtttgtcatggaccttatgactagcaagtttaaccattatcttttcatattgtttctttctttctttttttttttttttttgaggcagagtctgccctgtctcaragtactgctggagtgcagtggcgtgatctcccctcactgcaagctccgcctcccgcgttcacgccattctcctgcctcagcctccccagtaagctgggactacaggcacaagccaccatgcccggctaatttttttgtatttttagtagagacggggtttcaccatgttagccagatagtctcgatctcctgacctcgtgatccgccctcctcggcctctcaaagtgctgcaattacaggcgtgagccaccacacccggcctatgttatttctatgacacttctcacccttcaaagctgtctcttcattcctcaatgtttct

SEQ ID NO: 688586 - DNA, 604 bp, Homo sapiens
ccatcaacttaggggattgagcgaagatctctgccttcacagagcttatgttctaatgtcaatttagggcacagctcattattttctgcatatcagatcttcccaggagtattatgtgacgtgggaagagtggtcacctccatggattggatgagactcaaatatgctttcaaaactatggtattgttgctttctacaacatcacaaaaaatacaaggcagaagaatatgtgtgaagtaaaaacatagatatatttaaacagatttagagcacttatttgcctgattaattggaagaagaagaagagaggaggagtaagagaaggagaaggaaaaggaggtagaagaaaatgaaaaaacttttattaaaaacaataaaaattacctgtatactttcatccagataagctttattaacagttttcaaagtagcattcaagtatgtttttaaagttcagattatgtagtttwtatggctccttttggctttaatcttatattattttacataaaataataatgagaccagtaagcaaaaagtatgtgtaagaatattaatcacagcactgtttacaattgtctgtttaatctgtttaattcagctt

SEQ ID NO: 688587 - DNA, 598 bp, Homo sapiens
tcctttatattaaccaggccaggaatccctggagccacctggaatagtgtatggaccaagtaaagacaaaaggaaggatttctcataggctctgcagaagcactttactctgcgtggggttttcttgtttttgtttttytgagacggagtgtcgctctgtcacccaggctggagtgcagtgacgcgatctctgctcactcaagctccgcctcccaggttcacgccattctcctgcctcagcctcccgaatagctgggactataggtgcctgccaccacgcccagctaattttttgtatttttagtagagacggggtttcaccatgttagccaggatggtctcgatctcctgaccttgtgatccgcccgccttggcctcccaaagtgctgggattacaggtgtgagccaccgcacccagctgggattttcttaatgaatgcatcagacaaatctgagactcagtaagccacttgggatgggggtgggggagtcatgtgacctgggggccatctacaaccttggcttacctaaatgctattcatgaagtctgaagaggccccagaggttaaagcatggtaaaccccagaaatccttgaca

SEQ ID NO: 688588 - DNA, 598 bp, Homo sapiens
tcctttatattaaccaggccaggaatccctggagccacctggaatagtgtatggaccaagtaaagacaaaaggaaggatttctcataggctctgcagaagcactttactctgcgtggggttttcttgtttttgtttttctgagacggagtstcgctctgtcacccaggctggagtgcagtgacgcgatctctgctcactcaagctccgcctcccaggttcacgccattctcctgcctcagcctcccgaatagctgggactataggtgcctgccaccacgcccagctaattttttgtatttttagtagagacggggtttcaccatgttagccaggatggtctcgatctcctgaccttgtgatccgcccgccttggcctcccaaagtgctgggattacaggtgtgagccaccgcacccagctgggattttcttaatgaatgcatcagacaaatctgagactcagtaagccacttgggatgggggtgggggagtcatgtgacctgggggccatctacaaccttggcttacctaaatgctattcatgaagtctgaagaggccccagaggttaaagcatggtaaaccccagaaatccttgaca

SEQ ID NO: 688589 - DNA, 598 bp, Homo sapiens
tcctttatattaaccaggccaggaatccctggagccacctggaatagtgtatggaccaagtaaagacaaaaggaaggatttctcataggctctgcagaagcactttactctgcgtggggttttcttgtttttgtttttctgagacggagtgtcgctctgtcrcccaggctggagtgcagtgacgcgatctctgctcactcaagctccgcctcccaggttcacgccattctcctgcctcagcctcccgaatagctgggactataggtgcctgccaccacgcccagctaattttttgtatttttagtagagacggggtttcaccatgttagccaggatggtctcgatctcctgaccttgtgatccgcccgccttggcctcccaaagtgctgggattacaggtgtgagccaccgcacccagctgggattttcttaatgaatgcatcagacaaatctgagactcagtaagccacttgggatgggggtgggggagtcatgtgacctgggggccatctacaaccttggcttacctaaatgctattcatgaagtctgaagaggccccagaggttaaagcatggtaaaccccagaaatccttgaca

SEQ ID NO: 688590 - DNA, 605 bp, Homo sapiens
ttcaacctgagtgaatgtcccttgctttttaaaatatgtcttgttatcttgcctggggctttcctgctcctggtcctcagtgtcagtttcgctgtcactttctccaggaaggctgatgtccttagactaggctatgtgttctattgcattgctcctttaaagtaacattttaaatctttaaaaataacattcatctttaacatagttgctttttaaaaatcatctctcatggctgctcaattataacctcaaactgccatgccagagagcatatctgccttgtttactgatatggtttggctgtrtcccacccaaatctcatctttaattgtagttcccataatccccgtgtgtcatgggaggcacctggtgggaggtaattgaatcatgggagctatgctgttctagtgataatgaataggtctcaccaggtctgatggttttataaagggcagttcccctgcacctgctcttttgcctgccaccatgtaagacatgcctttgctcctcctctgccttccaccatgacgatgaggcctctccagccatgtggaagtgtgagcccactaaacggctttcctttataaattgcccagtcttgggtg

SEQ ID NO: 688591 - DNA, 650 bp, Homo sapiens
tttctatttctattttgtaaaatcaagaattctgggaagcagaaaccattaaagtcttaaatatcttaagactaatacctaattttgagttactgattttgtttaatccccacagtaaccctgtaaggcaggtgttctgatccttagtatttacagatgaggaaactaaggatgagaaaggtgacataatttagagctgagacctgaactttggtcggcttgagcctccaaatttatcatttcttttctcttcaccatgttgccttcctttcaactatataagggcagtggaatgtttactgtggaaggtactctaggactgaagacagatacatgtggttaattctaactttatatctaagtatctttgtgtctttggaaaattgacatagcctgggtctcactttaaaaaagttactgattttcttagagacacggccatgtctgtcacccaggctagagtgcagtggcatgatcatacctgattgtagcctcaaagtcctgggctcacgtgctcttcccgcctcagcctcccaagtaggcaggacyacagacatgtacagataagcctggaaatttgttttatttaggcaaggtctcacggtgttgtccaggctggtctcgaactcctaggcttgagcaatcctccc

SEQ ID NO: 688592 - DNA, 650 bp, Homo sapiens
tttctatttctattttgtaaaatcaagaattctgggaagcagaaaccattaaagtcttaaatatcttaagactaatacctaattttgagttactgattttgtttaatccccacagtaaccctgtaaggcaggtgttctgatccttagtatttacagatgaggaaactaaggatgagaaaggtgacataatttagagctgagacctgaactttggtcggcttgagcctccaaatttatcatttcttttctcttcaccatgttgccttcctttcaactatataagggcagtggaatgtttactgtggaaggtactctaggactgaagacagatacatgtggttaattctaactttatatctaagtatctttgtgtctttggaaaattgacatagcctgggtctcactttaaaaaagttactgattttcttagagacacggccatgtctgtcacccaggctagagtgcagtggcatgatcatacctgattgtagcctcaaagtcctgggctcacgtgctcttcccgcctcagcctcccaagtaggcaggaccrcagacatgtacagataagcctggaaatttgttttatttaggcaaggtctcacggtgttgtccaggctggtctcgaactcctaggcttgagcaatcctccc

SEQ ID NO: 688593 - DNA, 652 bp, Homo sapiens
gggactcaaatggtatttgaataaaatgacaatcaattacacgtatctgcgtatagcattttttagattatcacctgctaatgcttttactgtctccttaaaataattcactgtgatatcttgaatagagacgacagcttctccagcccgtmtggtccattcttcagcttctttctccagggcaactacccttctaggacctaggtcatcctcatccaaggacttctacagacagaagggaaaattatcttagtaagagctaatagttatgtagaaccattaggaaattgaaaggaaattggtcacatggattaatttaactacactactactcagtcagttaaattttcattcattcagcagtcccttactgcatatgaataaggctctaagctgagcaccacctggaagacaaaaggaccctctggggcataaagtggggggaaaaaaaactactttcacttcacatgcctagaataactttttctagagaggaatgttgtcaacttatgcttctctctattaataataatacacaattgtttaaatgagtgatctgtgttgtcaaacactcagcacagggcctggaaaacagcacttaagtgttagctgttgttatcatttcttttagggatatgtaatattatcacct

SEQ ID NO: 688594 - DNA, 618 bp, Homo sapiens
ttttttkgggagatggagtttggctcttgttgcccacgctggagtgcagtggtgcaatcttggctcattgcaacctccacctcccaggttcaagtgattctcctgcctcatcctcccgagtagctgggattacaggtgtccgccaccgtgcctggctaattttttgtatttttagtagagacgaagtttcactatgttagccaggctggtcttgaactcctgacttcaggtgatccacccaccttggcctcctaaagtgctgtattacaggtatgagccactgttcctggcccttttgccctttcttttttttttttttttttttggagacagagtcttgttctgtcacccaggctggagtacagtggcatgatcttggcttactgcaacctccaccttccgggttcacgccattctcctgcctcagcctcccgagtagctgggactacaggcgggcaccaccacacccagctaattccattttttaattgagttttttgttttgggttataggagttccttatcatggatggactttcataatctcttccctttctccaacccagtaaaacccatatatttattctttgcttacttttttgtgtgtaattgaatttt

SEQ ID NO: 688595 - DNA, 618 bp, Homo sapiens
ttttttggggagatggagtttggctcttgttgcccasgctggagtgcagtggtgcaatcttggctcattgcaacctccacctcccaggttcaagtgattctcctgcctcatcctcccgagtagctgggattacaggtgtccgccaccgtgcctggctaattttttgtatttttagtagagacgaagtttcactatgttagccaggctggtcttgaactcctgacttcaggtgatccacccaccttggcctcctaaagtgctgtattacaggtatgagccactgttcctggcccttttgccctttcttttttttttttttttttttggagacagagtcttgttctgtcacccaggctggagtacagtggcatgatcttggcttactgcaacctccaccttccgggttcacgccattctcctgcctcagcctcccgagtagctgggactacaggcgggcaccaccacacccagctaattccattttttaattgagttttttgttttgggttataggagttccttatcatggatggactttcataatctcttccctttctccaacccagtaaaacccatatatttattctttgcttacttttttgtgtgtaattgaatttt

SEQ ID NO: 688596 - DNA, 618 bp, Homo sapiens
ttttttggggagatggagtttggctcttgttgcccacgctggagtgcagtggtgcaatcttggctcattgcaacctccacctcccaggttcaagtgattctcctgcctcatcctcccgagtagctgggattacaggtgtccgccaccgtgcctggctaattttttgtatttttagtagagacraagtttcactatgttagccaggctggtcttgaactcctgacttcaggtgatccacccaccttggcctcctaaagtgctgtattacaggtatgagccactgttcctggcccttttgccctttcttttttttttttttttttttggagacagagtcttgttctgtcacccaggctggagtacagtggcatgatcttggcttactgcaacctccaccttccgggttcacgccattctcctgcctcagcctcccgagtagctgggactacaggcgggcaccaccacacccagctaattccattttttaattgagttttttgttttgggttataggagttccttatcatggatggactttcataatctcttccctttctccaacccagtaaaacccatatatttattctttgcttacttttttgtgtgtaattgaatttt

SEQ ID NO: 688597 - DNA, 618 bp, Homo sapiens
ttttttggggagatggagtttggctcttgttgcccacgctggagtgcagtggtgcaatcttggctcattgcaacctccacctcccaggttcaagtgattctcctgcctcatcctcccgagtagctgggattacaggtgtccgccaccgtgcctggctaattttttgtatttttagtagagacgaagtttcactatgttagccaggctggtcttgaactcctgacttcaggtgatccacccaccttggcctcctaaagtgctgtattacaggtatgagccactgtkcctggcccttttgccctttcttttttttttttttttttttggagacagagtcttgttctgtcacccaggctggagtacagtggcatgatcttggcttactgcaacctccaccttccgggttcacgccattctcctgcctcagcctcccgagtagctgggactacaggcgggcaccaccacacccagctaattccattttttaattgagttttttgttttgggttataggagttccttatcatggatggactttcataatctcttccctttctccaacccagtaaaacccatatatttattctttgcttacttttttgtgtgtaattgaatttt

SEQ ID NO: 688598 - DNA, 649 bp, Homo sapiens
aaaatttcacaaatggaagtgaaacaataacacctctattatacagatgtgaaaagagaggcccgatgaggtctagcaacttgccctaaatcatatccctagcagagcagatggagaggcaggattcaaacccagaattccttttttttttttttctttgagacagagtcttgctctgtcaccaggctggagtgcggtggcataatcttggctactgcaagctccacctcccaggttcacaccattctcttgcctcagccttctgagtagctgggactacaggcacacgccaccacgcttggctaatgtttttgtatttttagtagagacagggtttcaccgtgttaaccaggatggtctcgatctcctgacgtcatgatccgcctgccttggcctcccaaagtgctaggattacaggcgtgggccaccacacccggctaaagccagaattcttaacccgtacccagcagtccatccacaatcttaacaattaccctctattgccccttgggccscctgtccccagaagcctggtcagccaagactcacatccccaggtggctggcaaccaccagaagtggctgtctgagggatactgccatttgttttcctgttcctgttcgctcctgctggaactctagggctgttt

SEQ ID NO: 688599 - DNA, 751 bp, Homo sapiens
tgtatgtgaagttggaggacaggcacagtttaatccataaagtgtttgtgtgtgtggagagtaagtatgagaaatgtgagctgagggagtggggtgagtgtgcatgtgactgmgagtgagcacgtgtgagtgtgggtgggtatgtgggcgtcctccagtgtgtgtgagagcatgcgtgtattagtggtgtgctggagcgtccgcacatattgatgagagtgagtgtgttagcggtcgatgggcaagtggctgagcgtttgtgttgcaagtgtgatggtgtgtttgtagcatgtggttgtgtgggtgtgtgtatgtccatgagagcatgtgagtgggcaggtgactacattcaggtgaagtgggagtgaaagcgtcggtgcattgagccaatgtgtgtgtgtgagggtgagcacgagggaggcatgagtgtgagtgtgaggggattactgggtgtgcgaatgagacacccagtgtaagtgtaagtcagtgagggttggtgagtgtgaggaagtatgagtgggtggcaggcacaagtgtaagtgtgcgattgagtgtgagcatttgtgtaaatgtgtatgagtgccttgtgtcagtgtgagcacgagtgatgttattgtgaatgcgtgtgagtgaatgtgagcattttgcttgtgtcagtgaatgggaggttataacagtataggtgtgagtgtaaagtgagaaagtgtgtgggtaaaggtgtgagtgggtgagtaatcggtcattactagtg

SEQ ID NO: 688600 - DNA, 751 bp, Homo sapiens
tgtatgtgaagttggaggacaggcacagtttaatccataaagtgtttgtgtgtgtggagagtaagtatgagaaatgtgagctgagggagtggggtgagtgtgcatgtgactgagagtgagcacrtgtgagtgtgggtgggtatgtgggcgtcctccagtgtgtgtgagagcatgcgtgtattagtggtgtgctggagcgtccgcacatattgatgagagtgagtgtgttagcggtcgatgggcaagtggctgagcgtttgtgttgcaagtgtgatggtgtgtttgtagcatgtggttgtgtgggtgtgtgtatgtccatgagagcatgtgagtgggcaggtgactacattcaggtgaagtgggagtgaaagcgtcggtgcattgagccaatgtgtgtgtgtgagggtgagcacgagggaggcatgagtgtgagtgtgaggggattactgggtgtgcgaatgagacacccagtgtaagtgtaagtcagtgagggttggtgagtgtgaggaagtatgagtgggtggcaggcacaagtgtaagtgtgcgattgagtgtgagcatttgtgtaaatgtgtatgagtgccttgtgtcagtgtgagcacgagtgatgttattgtgaatgcgtgtgagtgaatgtgagcattttgcttgtgtcagtgaatgggaggttataacagtataggtgtgagtgtaaagtgagaaagtgtgtgggtaaaggtgtgagtgggtgagtaatcggtcattactagtg

SEQ ID NO: 688601 - DNA, 751 bp, Homo sapiens
tgtatgtgaagttggaggacaggcacagtttaatccataaagtgtttgtgtgtgtggagagtaagtatgagaaatgtgagctgagggagtggggtgagtgtgcatgtgactgagagtgagcacgtgtgagtgtgggtgggtatgtgggcgtcctccagtgtgtgtgagagcatgcgtgtattagtggtgtgctggagcgtccgcacatattgatgagagtgagtgtgttagyggtcgatgggcaagtggctgagcgtttgtgttgcaagtgtgatggtgtgtttgtagcatgtggttgtgtgggtgtgtgtatgtccatgagagcatgtgagtgggcaggtgactacattcaggtgaagtgggagtgaaagcgtcggtgcattgagccaatgtgtgtgtgtgagggtgagcacgagggaggcatgagtgtgagtgtgaggggattactgggtgtgcgaatgagacacccagtgtaagtgtaagtcagtgagggttggtgagtgtgaggaagtatgagtgggtggcaggcacaagtgtaagtgtgcgattgagtgtgagcatttgtgtaaatgtgtatgagtgccttgtgtcagtgtgagcacgagtgatgttattgtgaatgcgtgtgagtgaatgtgagcattttgcttgtgtcagtgaatgggaggttataacagtataggtgtgagtgtaaagtgagaaagtgtgtgggtaaaggtgtgagtgggtgagtaatcggtcattactagtg

SEQ ID NO: 688602 - DNA, 751 bp, Homo sapiens
tgtatgtgaagttggaggacaggcacagtttaatccataaagtgtttgtgtgtgtggagagtaagtatgagaaatgtgagctgagggagtggggtgagtgtgcatgtgactgagagtgagcacgtgtgagtgtgggtgggtatgtgggcgtcctccagtgtgtgtgagagcatgcgtgtattagtggtgtgctggagcgtccgcacatattgatgagagtgagtgtgttagcggtcgatgggcaagtggctgagcgtttgtgttgcaagtgtgatggtgtgtttgtagcatgtggttgtgtgggtgtgtgtatgtccatgagagcatgtgagtgggcaggtgactacattcaggtgaagtgggagtgaaagcgtcrgtgcattgagccaatgtgtgtgtgtgagggtgagcacgagggaggcatgagtgtgagtgtgaggggattactgggtgtgcgaatgagacacccagtgtaagtgtaagtcagtgagggttggtgagtgtgaggaagtatgagtgggtggcaggcacaagtgtaagtgtgcgattgagtgtgagcatttgtgtaaatgtgtatgagtgccttgtgtcagtgtgagcacgagtgatgttattgtgaatgcgtgtgagtgaatgtgagcattttgcttgtgtcagtgaatgggaggttataacagtataggtgtgagtgtaaagtgagaaagtgtgtgggtaaaggtgtgagtgggtgagtaatcggtcattactagtg

SEQ ID NO: 688603 - DNA, 751 bp, Homo sapiens
tgtatgtgaagttggaggacaggcacagtttaatccataaagtgtttgtgtgtgtggagagtaagtatgagaaatgtgagctgagggagtggggtgagtgtgcatgtgactgagagtgagcacgtgtgagtgtgggtgggtatgtgggcgtcctccagtgtgtgtgagagcatgcgtgtattagtggtgtgctggagcgtccgcacatattgatgagagtgagtgtgttagcggtcgatgggcaagtggctgagcgtttgtgttgcaagtgtgatggtgtgtttgtagcatgtggttgtgtgggtgtgtgtatgtccatgagagcatgtgagtgggcaggtgactacattcaggtgaagtgggagtgaaagcgtcggtgcattgagccaawgtgtgtgtgtgagggtgagcacgagggaggcatgagtgtgagtgtgaggggattactgggtgtgcgaatgagacacccagtgtaagtgtaagtcagtgagggttggtgagtgtgaggaagtatgagtgggtggcaggcacaagtgtaagtgtgcgattgagtgtgagcatttgtgtaaatgtgtatgagtgccttgtgtcagtgtgagcacgagtgatgttattgtgaatgcgtgtgagtgaatgtgagcattttgcttgtgtcagtgaatgggaggttataacagtataggtgtgagtgtaaagtgagaaagtgtgtgggtaaaggtgtgagtgggtgagtaatcggtcattactagtg

SEQ ID NO: 688604 - DNA, 751 bp, Homo sapiens
tgtatgtgaagttggaggacaggcacagtttaatccataaagtgtttgtgtgtgtggagagtaagtatgagaaatgtgagctgagggagtggggtgagtgtgcatgtgactgagagtgagcacgtgtgagtgtgggtgggtatgtgggcgtcctccagtgtgtgtgagagcatgcgtgtattagtggtgtgctggagcgtccgcacatattgatgagagtgagtgtgttagcggtcgatgggcaagtggctgagcgtttgtgttgcaagtgtgatggtgtgtttgtagcatgtggttgtgtgggtgtgtgtatgtccatgagagcatgtgagtgggcaggtgactacattcaggtgaagtgggagtgaaagcgtcggtgcattgagccaatgtgtgtgtgtgagggtgagcacgagggaggcatgagtgtgagtgtgaggggattactgggtgtgcgaatgagacacccagtgtaagtgtaagtcagtgagggttggtgagtgtgaggaagtatgagtgggtggcaggcacaagtgtaagtgtgcgattgagtgygagcatttgtgtaaatgtgtatgagtgccttgtgtcagtgtgagcacgagtgatgttattgtgaatgcgtgtgagtgaatgtgagcattttgcttgtgtcagtgaatgggaggttataacagtataggtgtgagtgtaaagtgagaaagtgtgtgggtaaaggtgtgagtgggtgagtaatcggtcattactagtg

SEQ ID NO: 688605 - DNA, 2466 bp, Homo sapiens
  misc_feature 669, 670, 671, 672, 673, 674, 675, 676, 677, 678, 679, 680,681, 682, 683, 684, 685, 686, 687, 688, 689, 690, 691, 692,693, 694, 695, 696, 697, 698, 699, 700, 701, 702, 703, 704,705, 706, 707, 708, 709, 710, 711, 712, 713, 714, 715: n = A,T,C or G
  misc_feature 716, 717, 718, 719, 720, 721, 722, 723, 724, 725, 726, 727,728, 729, 730, 731, 732, 733, 734, 735, 736, 737, 738, 739,740, 741, 742, 743, 744, 745, 746, 747, 748, 749, 750, 751,752, 753, 754, 755, 756, 757, 758, 759, 760, 761, 762: n = A,T,C or G
  misc_feature 763, 764, 765, 766, 767, 768: n = A,T,C or G
gggcatggtgtcacgcctataatcccagcactttgggaggccaaggcaggtggatcacctgaggtcaagagttcgagaccagcctgaccaacatgaataaaccctgtctctactaaaaatataaaattaaccaggcatgtggtgcatgtctgtaatcccagatacttgggaggctgagacaggagaatcgcttgaacccgggaggcagaggttgtggtgagccaagatcgtgcactgcgttccagcctaggcaacaagagtgaaacaccgtctcaaaaaaaaaaaaaaaaaaaaaaagacaccagtgctcccctgctagctccagctccccccatccccagccccacgtccacaggaggacacagcaagaaggcagccacctggccgggcacggtggctcatgcctataattccaacactttgggaggccaaggcgggtagatcacgaggttaggagatcgagaccatcctggctaacatggtgaaaccccgtctctactaaaaatacaaaaaaattagctgagcatggtggcgggcacctgtagtcccagctactcaggaggctgaggcaggagaatggcaggaacccgggaggcggagcttgtagtgagctgagatcacgccactgcactccagcctgggtgacagagcgagactctgtctcaaaannnnnnnnnnnnnnnnnnnnnnnnnnnnnnnnnnnnnnnnnnnnnnnnnnnnnnnnnnnnnnnnnnnnnnnnnnnnnnnnnnnnnnnnnnnnnnnnnnnntgaaaaaaaaaacctcaggtgttttgatagaaataacagacgtgcctaggaatcatcttccttgaagggagaggagggtcttattgaacttgaaaaaactaaataagcaaaattgatacataaggacacccttctctttacccttacctattcttaacaactttaattcatttctgacactgtcaccaactgaaaaacggtccaactaaaaaaaaaatcataaaggtgagaaaaattgtgacgtgttctatcctaatccaatatatctaaaccaattttactgatagagaaaatatattaagtgaatgatgtaaatacattaatataggtaacaactctttgaaagtaaagtttgcacataacatgaaatacatagagaattactgccgtctcgaaggagagaacccttgatggggagtggtagtcaaaaaggtgtacgagcaagtcatctgttgcaaggtgatgggaggagatatttttgcaggcattcaatatcagtcagaggttttaatgatttttgttttttatcttgagagttggagactagaagatctaaaataggaaaattttggcatatccatagatagaatggaagctcttcgccaaaaaataacgtgctccaagtcatgaaaaatagcacacatgcacaattaactacagagttacacaagatggtgtcttttcattcgattttatttgaactcttattcttctctatcttttacgctttgtatccttgttaattaactcttccattttttcctcatcctatgaggyactttaaacattttattcaataactcttaaggcaatttttacaattctattcacatataaaattgtcataagcatgttttgtgagtgaaaaattctaatttgtaatgcatatcaagtgaaaagcctcagttcagcactcgtcatatccaaaatctgtgttatataataatgtaaaagacatattttcacacatgtagctcaaatgagattcttacttaacatttctctctcttttttttttttttttgagatggagtctcgctctgttgcccaggctggagtgcagtggcgcaatctcagctcactgcaagctctgcctcctgggttcatgccattctcctgtttcagcctcccaagtagctgggactacaggtgcccgccaccacgcccggctaattttttgtatttttagtagagacggggtttcacagtgttagccaggatggtctcgatctcctgacctcgtgatccgcttgtctctgcctcccaaagtgctgggattacaggcgtgagccaccacgcccggcctacattttacaaaatttaactcaatcttttattttaaaaaatgtgcatatactgcctgttcaagtacttaatctttttatttattatttgaaattggaggtccatctttttagattgttagaaggtcttcacgtatttgaatgagttattaagttgatacaaccattttggaaaaataattatcattatctactacatttaaacacataatatatgaccagcagtttcaacagaaacacctggatattcatcaggatagaacggattggaaagctccatattcattcaacagggtgctacacaaaacaaaaaggaatgaatcactggtccttaacataaacagatttcacaaatgtaattttgagtgaaataagccagaaaaaaataaatacc

SEQ ID NO: 688606 - DNA, 2466 bp, Homo sapiens
  misc_feature 669, 670, 671, 672, 673, 674, 675, 676, 677, 678, 679, 680,681, 682, 683, 684, 685, 686, 687, 688, 689, 690, 691, 692,693, 694, 695, 696, 697, 698, 699, 700, 701, 702, 703, 704,705, 706, 707, 708, 709, 710, 711, 712, 713, 714, 715: n = A,T,C or G
  misc_feature 716, 717, 718, 719, 720, 721, 722, 723, 724, 725, 726, 727,728, 729, 730, 731, 732, 733, 734, 735, 736, 737, 738, 739,740, 741, 742, 743, 744, 745, 746, 747, 748, 749, 750, 751,752, 753, 754, 755, 756, 757, 758, 759, 760, 761, 762: n = A,T,C or G
  misc_feature 763, 764, 765, 766, 767, 768: n = A,T,C or G
gggcatggtgtcacgcctataatcccagcactttgggaggccaaggcaggtggatcacctgaggtcaagagttcgagaccagcctgaccaacatgaataaaccctgtctctactaaaaatataaaattaaccaggcatgtggtgcatgtctgtaatcccagatacttgggaggctgagacaggagaatcgcttgaacccgggaggcagaggttgtggtgagccaagatcgtgcactgcgttccagcctaggcaacaagagtgaaacaccgtctcaaaaaaaaaaaaaaaaaaaaaaagacaccagtgctcccctgctagctccagctccccccatccccagccccacgtccacaggaggacacagcaagaaggcagccacctggccgggcacggtggctcatgcctataattccaacactttgggaggccaaggcgggtagatcacgaggttaggagatcgagaccatcctggctaacatggtgaaaccccgtctctactaaaaatacaaaaaaattagctgagcatggtggcgggcacctgtagtcccagctactcaggaggctgaggcaggagaatggcaggaacccgggaggcggagcttgtagtgagctgagatcacgccactgcactccagcctgggtgacagagcgagactctgtctcaaaannnnnnnnnnnnnnnnnnnnnnnnnnnnnnnnnnnnnnnnnnnnnnnnnnnnnnnnnnnnnnnnnnnnnnnnnnnnnnnnnnnnnnnnnnnnnnnnnnnntgaaaaaaaaaacctcaggtgttttgatagaaataacagacgtgcctaggaatcatcttccttgaagggagaggagggtcttattgaacttgaaaaaactaaataagcaaaattgatacataaggacacccttctctttacccttacctattcttaacaactttaattcatttctgacactgtcaccaactgaaaaacggtccaactaaaaaaaaaatcataaaggtgagaaaaattgtgacgtgttctatcctaatccaatatatctaaaccaattttactgatagagaaaatatattaagtgaatgatgtaaatacattaatataggtaacaactctttgaaagtaaagtttgcacataacatgaaatacatagagaattactgccgtctcgaaggagagaacccttgatggggagtggtagtcaaaaaggtgtacgagcaagtcatctgttgcaaggtgatgggaggagatatttttgcaggcattcaatatcagtcagaggttttaatgatttttgttttttatcttgagagttggagactagaagatctaaaataggaaaattttggcatatccatagatagaatggaagctcttcgccaaaaaataacgtgctccaagtcatgaaaaatagcacacatgcacaattaactacagagttacacaagatggtgtcttttcattcgattttatttgaactcttattcttctctatcttttacgctttgtatccttgttaattaactcttccattttttcctcatcctatgaggcactttaaacattttattcaataactcttaaggcaatttttacaattctattcacatataaaattgtcataagcatgttttgtgagtgaaaaattctaatttgtaatgcatatcaagtgaaaagcctcagttcagcactcgtcatatccaaaatctgtgttatataataatgtaaaagacatattttcacacatgtagctcaaatgagattcttacttaacatttctctctcttttttttttttttttgagatggagtctcgctctgttgcccaggctggagtgcagtggcgcaatctcagctcactgcaagctctgcctcctgggttcatgccattctcctgtttcagcctcccaagtagctgggactacaggtgcccgccaccacgcccggctaattttttgtatttttagtagagacggggtttcacagtgttagccaggatggtctcgatctcctgacctcgtgatccgctygtctctgcctcccaaagtgctgggattacaggcgtgagccaccacgcccggcctacattttacaaaatttaactcaatcttttattttaaaaaatgtgcatatactgcctgttcaagtacttaatctttttatttattatttgaaattggaggtccatctttttagattgttagaaggtcttcacgtatttgaatgagttattaagttgatacaaccattttggaaaaataattatcattatctactacatttaaacacataatatatgaccagcagtttcaacagaaacacctggatattcatcaggatagaacggattggaaagctccatattcattcaacagggtgctacacaaaacaaaaaggaatgaatcactggtccttaacataaacagatttcacaaatgtaattttgagtgaaataagccagaaaaaaataaatacc

SEQ ID NO: 688607 - DNA, 2466 bp, Homo sapiens
  misc_feature 669, 670, 671, 672, 673, 674, 675, 676, 677, 678, 679, 680,681, 682, 683, 684, 685, 686, 687, 688, 689, 690, 691, 692,693, 694, 695, 696, 697, 698, 699, 700, 701, 702, 703, 704,705, 706, 707, 708, 709, 710, 711, 712, 713, 714, 715: n = A,T,C or G
  misc_feature 716, 717, 718, 719, 720, 721, 722, 723, 724, 725, 726, 727,728, 729, 730, 731, 732, 733, 734, 735, 736, 737, 738, 739,740, 741, 742, 743, 744, 745, 746, 747, 748, 749, 750, 751,752, 753, 754, 755, 756, 757, 758, 759, 760, 761, 762: n = A,T,C or G
  misc_feature 763, 764, 765, 766, 767, 768: n = A,T,C or G
gggcatggtgtcacgcctataatcccagcactttgggaggccaaggcaggtggatcacctgaggtcaagagttcgagaccagcctgaccaacatgaataaaccctgtctctactaaaaatataaaattaaccaggcatgtggtgcatgtctgtaatcccagatacttgggaggctgagacaggagaatcgcttgaacccgggaggcagaggttgtggtgagccaagatcgtgcactgcgttccagcctaggcaacaagagtgaaacaccgtctcaaaaaaaaaaaaaaaaaaaaaaagacaccagtgctcccctgctagctccagctccccccatccccagccccacgtccacaggaggacacagcaagaaggcagccacctggccgggcacggtggctcatgcctataattccaacactttgggaggccaaggcgggtagatcacgaggttaggagatcgagaccatcctggctaacatggtgaaaccccgtctctactaaaaatacaaaaaaattagctgagcatggtggcgggcacctgtagtcccagctactcaggaggctgaggcaggagaatggcaggaacccgggaggcggagcttgtagtgagctgagatcacgccactgcactccagcctgggtgacagagcgagactctgtctcaaaannnnnnnnnnnnnnnnnnnnnnnnnnnnnnnnnnnnnnnnnnnnnnnnnnnnnnnnnnnnnnnnnnnnnnnnnnnnnnnnnnnnnnnnnnnnnnnnnnnntgaaaaaaaaaacctcaggtgttttgatagaaataacagacgtgcctaggaatcatcttccttgaagggagaggagggtcttattgaacttgaaaaaactaaataagcaaaattgatacataaggacacccttctctttacccttacctattcttaacaactttaattcatttctgacactgtcaccaactgaaaaacggtccaactaaaaaaaaaatcataaaggtgagaaaaattgtgacgtgttctatcctaatccaatatatctaaaccaattttactgatagagaaaatatattaagtgaatgatgtaaatacattaatataggtaacaactctttgaaagtaaagtttgcacataacatgaaatacatagagaattactgccgtctcgaaggagagaacccttgatggggagtggtagtcaaaaaggtgtacgagcaagtcatctgttgcaaggtgatgggaggagatatttttgcaggcattcaatatcagtcagaggttttaatgatttttgttttttatcttgagagttggagactagaagatctaaaataggaaaattttggcatatccatagatagaatggaagctcttcgccaaaaaataacgtgctccaagtcatgaaaaatagcacacatgcacaattaactacagagttacacaagatggtgtcttttcattcgattttatttgaactcttattcttctctatcttttacgctttgtatccttgttaattaactcttccattttttcctcatcctatgaggcactttaaacattttattcaataactcttaaggcaatttttacaattctattcacatataaaattgtcataagcatgttttgtgagtgaaaaattctaatttgtaatgcatatcaagtgaaaagcctcagttcagcactcgtcatatccaaaatctgtgttatataataatgtaaaagacatattttcacacatgtagctcaaatgagattcttacttaacatttctctctcttttttttttttttttgagatggagtctcgctctgttgcccaggctggagtgcagtggcgcaatctcagctcactgcaagctctgcctcctgggttcatgccattctcctgtttcagcctcccaagtagctgggactacaggtgcccgccaccacgcccggctaattttttgtatttttagtagagacggggtttcacagtgttagccaggatggtctcgatctcctgacctcgtgatccgcttgtctctgcctcccaaagtgctgggattacaggcgtgagccaccacgcccggcctacattttacaaaatttaactcaatcttttattttaaaaaatgtgcatatactgcctgttcaagtacttaatctttttatttattatttgaaattggaggtccatctttttagattgttagaaggtcttcacgtatttgaatgagttattaagttgatacaaccattttggaaaaataattatcattatctactacatttaaacacataatatatgaccagcagtttcaacagaaacacctggatattcatcaggwtagaacggattggaaagctccatattcattcaacagggtgctacacaaaacaaaaaggaatgaatcactggtccttaacataaacagatttcacaaatgtaattttgagtgaaataagccagaaaaaaataaatacc

SEQ ID NO: 688608 - DNA, 2466 bp, Homo sapiens
  misc_feature 669, 670, 671, 672, 673, 674, 675, 676, 677, 678, 679, 680,681, 682, 683, 684, 685, 686, 687, 688, 689, 690, 691, 692,693, 694, 695, 696, 697, 698, 699, 700, 701, 702, 703, 704,705, 706, 707, 708, 709, 710, 711, 712, 713, 714, 715: n = A,T,C or G
  misc_feature 716, 717, 718, 719, 720, 721, 722, 723, 724, 725, 726, 727,728, 729, 730, 731, 732, 733, 734, 735, 736, 737, 738, 739,740, 741, 742, 743, 744, 745, 746, 747, 748, 749, 750, 751,752, 753, 754, 755, 756, 757, 758, 759, 760, 761, 762: n = A,T,C or G
  misc_feature 763, 764, 765, 766, 767, 768: n = A,T,C or G
gggcatggtgtcacgcctataatcccagcactttgggaggccaaggcaggtggatcacctgaggtcaagagttcgagaccagcctgaccaacatgaataaaccctgtctctactaaaaatataaaattaaccaggcatgtggtgcatgtctgtaatcccagatacttgggaggctgagacaggagaatcgcttgaacccgggaggcagaggttgtggtgagccaagatcgtgcactgcgttccagcctaggcaacaagagtgaaacaccgtctcaaaaaaaaaaaaaaaaaaaaaaagacaccagtgctcccctgctagctccagctccccccatccccagccccacgtccacaggaggacacagcaagaaggcagccacctggccgggcacggtggctcatgcctataattccaacactttgggaggccaaggcgggtagatcacgaggttaggagatcgagaccatcctggctaacatggtgaaaccccgtctctactaaaaatacaaaaaaattagctgagcatggtggcgggcacctgtagtcccagctactcaggaggctgaggcaggagaatggcaggaacccgggaggcggagcttgtagtgagctgagatcacgccactgcactccagcctgggtgacagagcgagactctgtctcaaaannnnnnnnnnnnnnnnnnnnnnnnnnnnnnnnnnnnnnnnnnnnnnnnnnnnnnnnnnnnnnnnnnnnnnnnnnnnnnnnnnnnnnnnnnnnnnnnnnnntgaaaaaaaaaacctcaggtgttttgatagaaataacagacgtgcctaggaatcatcttccttgaagggagaggagggtcttattgaacttgaaaaaactaaataagcaaaattgatacataaggacacccttctctttacccttacctattcttaacaactttaattcatttctgacactgtcaccaactgaaaaacggtccaactaaaaaaaaaatcataaaggtgagaaaaattgtgacgtgttctatcctaatccaatatatctaaaccaattttactgatagagaaaatatattaagtgaatgatgtaaatacattaatataggtaacaactctttgaaagtaaagtttgcacataacatgaaatacatagagaattactgccgtctcgaaggagagaacccttgatggggagtggtagtcaaaaaggtgtacgagcaagtcatctgttgcaaggtgatgggaggagatatttttgcaggcattcaatatcagtcagaggttttaatgatttttgttttttatcttgagagttggagactagaagatctaaaataggaaaattttggcatatccatagatagaatggaagctcttcgccaaaaaataacgtgctccaagtcatgaaaaatagcacacatgcacaattaactacagagttacacaagatggtgtcttttcattcgattttatttgaactcttattcttctctatcttttacgctttgtatccttgttaattaactcttccattttttcctcatcctatgaggcactttaaacattttattcaataactcttaaggcaatttttacaattctattcacatataaaattgtcataagcatgttttgtgagtgaaaaattctaatttgtaatgcatatcaagtgaaaagcctcagttcagcactcgtcatatccaaaatctgtgttatataataatgtaaaagacatattttcacacatgtagctcaaatgagattcttacttaacatttctctctcttttttttttttttttgagatggagtctcgctctgttgcccaggctggagtgcagtggcgcaatctcagctcactgcaagctctgcctcctgggttcatgccattctcctgtttcagcctcccaagtagctgggactacaggtgcccgccaccacgcccggctaattttttgtatttttagtagagacggggtttcacagtgttagccaggatggtctcgatctcctgacctcgtgatccgcttgtctctgcctcccaaagtgctgggattacaggcgtgagccaccacgcccggcctacattttacaaaatttaactcaatcttttattttaaaaaatgtgcatatactgcctgttcaagtacttaatctttttatttattatttgaaattggaggtccatctttttagattgttagaaggtcttcacgtatttgaatgagttattaagttgatacaaccattttggaaaaataattatcattatctactacatttaaacacataatatatgaccagcagtttcaacagaaacacctggatattcatcaggatagaayggattggaaagctccatattcattcaacagggtgctacacaaaacaaaaaggaatgaatcactggtccttaacataaacagatttcacaaatgtaattttgagtgaaataagccagaaaaaaataaatacc

SEQ ID NO: 688609 - DNA, 2466 bp, Homo sapiens
  misc_feature 669, 670, 671, 672, 673, 674, 675, 676, 677, 678, 679, 680,681, 682, 683, 684, 685, 686, 687, 688, 689, 690, 691, 692,693, 694, 695, 696, 697, 698, 699, 700, 701, 702, 703, 704,705, 706, 707, 708, 709, 710, 711, 712, 713, 714, 715: n = A,T,C or G
  misc_feature 716, 717, 718, 719, 720, 721, 722, 723, 724, 725, 726, 727,728, 729, 730, 731, 732, 733, 734, 735, 736, 737, 738, 739,740, 741, 742, 743, 744, 745, 746, 747, 748, 749, 750, 751,752, 753, 754, 755, 756, 757, 758, 759, 760, 761, 762: n = A,T,C or G
  misc_feature 763, 764, 765, 766, 767, 768: n = A,T,C or G
gggcatggtgtcacgcctataatcccagcactttgggaggccaaggcaggtggatcacctgaggtcaagagttcgagaccagcctgaccaacatgaataaaccctgtctctactaaaaatataaaattaaccaggcatgtggtgcatgtctgtaatcccagatacttgggaggctgagacaggagaatcgcttgaacccgggaggcagaggttgtggtgagccaagatcgtgcactgcgttccagcctaggcaacaagagtgaaacaccgtctcaaaaaaaaaaaaaaaaaaaaaaagacaccagtgctcccctgctagctccagctccccccatccccagccccacgtccacaggaggacacagcaagaaggcagccacctggccgggcacggtggctcatgcctataattccaacactttgggaggccaaggcgggtagatcacgaggttaggagatcgagaccatcctggctaacatggtgaaaccccgtctctactaaaaatacaaaaaaattagctgagcatggtggcgggcacctgtagtcccagctactcaggaggctgaggcaggagaatggcaggaacccgggaggcggagcttgtagtgagctgagatcacgccactgcactccagcctgggtgacagagcgagactctgtctcaaaannnnnnnnnnnnnnnnnnnnnnnnnnnnnnnnnnnnnnnnnnnnnnnnnnnnnnnnnnnnnnnnnnnnnnnnnnnnnnnnnnnnnnnnnnnnnnnnnnnntgaaaaaaaaaacctcaggtgttttgatagaaataacagacgtgcctaggaatcatcttccttgaagggagaggagggtcttattgaacttgaaaaaactaaataagcaaaattgatacataaggacacccttctctttacccttacctattcttaacaactttaattcatttctgacactgtcaccaactgaaaaacggtccaactaaaaaaaaaatcataaaggtgagaaaaattgtgacgtgttctatcctaatccaatatatctaaaccaattttactgatagagaaaatatattaagtgaatgatgtaaatacattaatataggtaacaactctttgaaagtaaagtttgcacataacatgaaatacatagagaattactgccgtctcgaaggagagaacccttgatggggagtggtagtcaaaaaggtgtacgagcaagtcatctgttgcaaggtgatgggaggagatatttttgcaggcattcaatatcagtcagaggttttaatgatttttgttttttatcttgagagttggagactagaagatctaaaataggaaaattttggcatatccatagatagaatggaagctcttcgccaaaaaataacgtgctccaagtcatgaaaaatagcacacatgcacaattaactacagagttacacaagatggtgtcttttcattcgattttatttgaactcttattcttctctatcttttacgctttgtatccttgttaattaactcttccattttttcctcatcctatgaggcactttaaacattttattcaataactcttaaggcaatttttacaattctattcacatataaaattgtcataagcatgttttgtgagtgaaaaattctaatttgtaatgcatatcaagtgaaaagcctcagttcagcactcgtcatatccaaaatctgtgttatataataatgtaaaagacatattttcacacatgtagctcaaatgagattcttacttaacatttctctctcttttttttttttttttgagatggagtctcgctctgttgcccaggctggagtgcagtggcgcaatctcagctcactgcaagctctgcctcctgggttcatgccattctcctgtttcagcctcccaagtagctgggactacaggtgcccgccaccacgcccggctaattttttgtatttttagtagagacggggtttcacagtgttagccaggatggtctcgatctcctgacctcgtgatccgcttgtctctgcctcccaaagtgctgggattacaggcgtgagccaccacgcccggcctacattttacaaaatttaactcaatcttttattttaaaaaatgtgcatatactgcctgttcaagtacttaatctttttatttattatttgaaattggaggtccatctttttagattgttagaaggtcttcacgtatttgaatgagttattaagttgatacaaccattttggaaaaataattatcattatctactacatttaaacacataatatatgaccagcagtttcaacagaaacacctggatattcatcaggatagaacggattggaaagctccatattcattcaacagggtgctacacaaaacaaaaaggaatgaatcactggtccwtaacataaacagatttcacaaatgtaattttgagtgaaataagccagaaaaaaataaatacc

SEQ ID NO: 688610 - DNA, 981 bp, Homo sapiens
tgcttcaccatccccggtggctccyggctgccttcagggtgaagggtaaagtcctgagctgaaagggtcactcctgggccctgtcctgcccacttctaggcctcttctcttgaatgagccaggatgaggatgaggtgaatgaggagcccacccaccttgggtgcagaatttaagggggcaccaaaaaactcagcaatcaaaataaataatgttttagtgcaatcttttaaaaaccaaaattaatgaaaaaaaatccatgatgaacagaatatgagtattgacgaagatgtggactgacaagacgggatcagagagagggaagtaaggtgaattgtgtaggtgtggggcagatcctgtctttatttagccctgccagcctcacccttgtgctgggtctgcatccagatatgcccagtcattctctacctttcagagggaccccaggaagtgcttagaatccccccatcacccaggcctttgtatgtgtcatcccctctgcctggaattctctcctgtcttccttcttctgttcttcattcctctaaaacttgggtctggaagcccctccctcactccctaagccaggttaggagcccttctctgtctcttccctgacttcccccctccaaccctagcacagccccacagcactgagatccagggctgtgaccactagcctctgaagccatgtggtaaaatcctgcagagcagaatggtgaggcattcatttctgcatccgtaaagcccatcatggagcctgacacagattttcttcaattacctttgattgaccgaatggataaatgaatggacaaataaaagaataacatggctgtgagtcacaggccatttcaatgaatacttcaaggatcaaaattaaataaaaccctcacggttcctcagatccagatggatccacaggctaccagcatcatagaataaatgctgcaacattttggtccaacaaaaaagattctagca

SEQ ID NO: 688611 - DNA, 981 bp, Homo sapiens
tgcttcaccatccccggtggctcccggctgccttcagggtgaagggtaaagtcctgagctgaaagggtcactcctgggccctgtcctgcccacttctaggcctcttctcttgaatgagccaggatgaggatgaggtgaatgaggagcccacccaccttgggtgcagaatttaagggggcaccaaaaaactcagcaatcaaaataaataatgttttagtgcaatcttttaaaaaccaaaattaatgaaaaaaaatccatgatgaacagaatatgagtattgacgaagatgtggactgacaagacrggatcagagagagggaagtaaggtgaattgtgtaggtgtggggcagatcctgtctttatttagccctgccagcctcacccttgtgctgggtctgcatccagatatgcccagtcattctctacctttcagagggaccccaggaagtgcttagaatccccccatcacccaggcctttgtatgtgtcatcccctctgcctggaattctctcctgtcttccttcttctgttcttcattcctctaaaacttgggtctggaagcccctccctcactccctaagccaggttaggagcccttctctgtctcttccctgacttcccccctccaaccctagcacagccccacagcactgagatccagggctgtgaccactagcctctgaagccatgtggtaaaatcctgcagagcagaatggtgaggcattcatttctgcatccgtaaagcccatcatggagcctgacacagattttcttcaattacctttgattgaccgaatggataaatgaatggacaaataaaagaataacatggctgtgagtcacaggccatttcaatgaatacttcaaggatcaaaattaaataaaaccctcacggttcctcagatccagatggatccacaggctaccagcatcatagaataaatgctgcaacattttggtccaacaaaaaagattctagca

SEQ ID NO: 688612 - DNA, 661 bp, Homo sapiens
tacatgccaccgggacaagcctggctaacagtatcagggcagcttgtatcccactctcattttttccttaagtatgtagctctctcatgaccctcataaaagaaatagttgatgcttcatgaagattctggcatcaatctcaaatatagttaaatgtaattctaacctacaaaraaaataagtctatttatgcctgaagcccttatggacaggcttatattctttgtcacaagactcctgagccccatgcaaatcaaacaatatggctggacaactctttcaattaccttcaataatctataatagcaaaggcatttcttgaacattgtatagtgggggagttatggcccaggacaatagaattcttttgagggaagtattgcctaagtcacatgctagtttaacaaaattacctgagccaaaatatgttgggaaatcaaggcacactacaggtaggagagaagaagagtgtttccaaatagcagaatccaagactcagagagtgaagtggaggggagaaaagaaggaggaggaaggggaagatgaagggaaataacaaaatagtaaggccaactctctgagatggtgctatttggcaagcggccaaaaattaggttcaggctctagaaaaatagagccaagaaagaggttcaggttctca

SEQ ID NO: 688613 - DNA, 661 bp, Homo sapiens
tacatgccaccgggacaagcctggctaacagtatcagggcagcttgtatcccactctcattttttccttaagtatgtagctctctcatgaccctcataaaagaaatagttgatgcttcatgaagattctggcatcaatctcaaatatagttaaatgtaattctaacctacaaagaaaataagtctatttatgcctgaagcccttatggacaggcttatattctttgtcacaagactcctgagccccatgcaaatcaaacaatatggctggacaactctttcaattaccttcaataatctataatagcaaaggcatttcttgaacattgtrtagtgggggagttatggcccaggacaatagaattcttttgagggaagtattgcctaagtcacatgctagtttaacaaaattacctgagccaaaatatgttgggaaatcaaggcacactacaggtaggagagaagaagagtgtttccaaatagcagaatccaagactcagagagtgaagtggaggggagaaaagaaggaggaggaaggggaagatgaagggaaataacaaaatagtaaggccaactctctgagatggtgctatttggcaagcggccaaaaattaggttcaggctctagaaaaatagagccaagaaagaggttcaggttctca

SEQ ID NO: 688614 - DNA, 1512 bp, Homo sapiens
  misc_feature 1293, 1309, 1310, 1311, 1312, 1313, 1314, 1315, 1316, 1317,1318, 1319, 1320, 1321, 1322, 1323, 1324, 1325, 1326, 1327,1328, 1329, 1330, 1331, 1332, 1333, 1334, 1335, 1336, 1337,1338, 1339, 1340, 1341, 1342, 1343, 1344, 1345, 1346: n = A,T,C or G
  misc_feature 1347, 1348, 1349, 1350, 1351, 1352, 1353, 1354, 1355, 1356,1357, 1358, 1359, 1360, 1361, 1362, 1363, 1364, 1365, 1366,1367, 1368, 1369, 1370, 1371, 1372, 1373, 1374, 1375, 1376,1377, 1378, 1379, 1380, 1381, 1382, 1383, 1384, 1385: n = A,T,C or G
  misc_feature 1386, 1387, 1388, 1389, 1390, 1391, 1392, 1393, 1394, 1395,1396, 1397, 1398, 1399, 1400, 1401, 1402, 1403, 1404, 1405,1406, 1407, 1408: n = A,T,C or G
tcgctggaagcataacaaatacaaagtcataacaacattgatttgataatatctagttatatgaaaattgataagtccctctgcttttattagaatgagctttatttatgtactgcagatcataaagacgatccagttcaaggagacatactcatttttaactttggttcagcacccatagaactgaattatactttataacaatattaggtaatagaatcttcccatggatggtacmacaagatattattattaaatacttcaatctatttaattcagaaaatacagaagttagtttgcaacgtacttctagagaatttcaattgggaacaaaactatccattctccgtgctcctgacttagaatgtcactggaattctacttttaaaagagagataatgcccaccttagaggaccgtaatgaagattagagagaaaagtagagaactggactagagttagtaacatggcaaccacttgattaatgatatcatctttcaaaaacaaggattgtacacctgctcctttcatataggctttgttttctctttatagataataacatatgtgcacacacaaacattttaggaaaatattagtaatcattatacttggaatgacaaaatgcatatactaattcaaggaaaaggtggcaagacaaaggttttttttaggttactggatttccattcagccttcattatatttgcagattgatggccttctacattcccagcactgtactggaggttggtgatgcaaagataaatatatctgggtccccaaggaatttaaaagatgaatgcccctgacattgatttagaacatgcttgtgacaagtctagatgactttggaaagcatgaattaccaaagaaatcccaaagcaggagggaatgaggtgacacacaccaatctgccatcttgtcacagagtccccagacttcaacaaacagggcaaagtaggccaaagcccacttttactcacccttgtaaaatatgaagaagctgtttgatgcctccccaaatgcgaatttccacgctggtctcagggtcctcacaaacctgtaccagaatccagacaatgctccagaggagcttcaagtggtcagagtggagcagactgaggaggaccggtatcccctcatagagcttcacctgctctttcacctggggctctgcacaaagtaggcgcagcaactccgctgttagtctgaaaggggtacagagggtggggtgagaatcacagcatcatgagttgattactttacattaagactaaagctatctgcagnagaacactgaaaggcnnnnnnnnnnnnnnnnnnnnnnnnnnnnnnnnnnnnnnnnnnnnnnnnnnnnnnnnnnnnnnnnnnnnnnnnnnnnnnnnnnnnnnnnnnnnnnnnnnnnccagtgcatgaaatataaccctaacattttgtaagtcatgggtcaatgtgccattttctgtaaggagcccgatcaaagccaaacacttttagctttactaactg

SEQ ID NO: 688615 - DNA, 629 bp, Homo sapiens
ttccttctgttgcatctaagccaagtatgtgaaaacagttcaatctaatgatctcctaaacctaatgatcacttatatttctctaacctcataccttttaaagagtggtctgtttctttccatactgaagagaaatctcaaggctctgaaagcataacactagaaaacaaaaggatatgtgattctcaaatggtagctcaacaaattaaaacattttcaggaaagaattaacaggaagtaaacattaacgtgactttattgtaagtggctggtccaagttggagccaaagcttctaactgaaaacaaaaaacaccaacacctggggtcattcctgtatttaaaaagtgtttatgttgtagaatgcwgggaatattggccttgcttcacttggtactcgtcattaatttctttctagaaagtacaaaatgagtacagagacaagaaataaaattccgatgctgagaaaaccaaatgtctaaagatttccaggagctcaaggtttattttgtttctagcctgctatgcatacctcaatatttatatggtttctgtgagaaaataaacactagaaatgatgacatataaaaatagccgcaggcacactggattcaaacttgacaaattggtc

SEQ ID NO: 688616 - DNA, 629 bp, Homo sapiens
ttccttctgttgcatctaagccaagtatgtgaaaacagttcaatctaatgatctcctaaacctaatgatcacttatatttctctaacctcataccttttaaagagtggtctgtttctttccatactgaagagaaatctcaaggctctgaaagcataacactagaaaacaaaaggatatgtgattctcaaatggtagctcaacaaattaaaacattttcaggaaagaattaacaggaagtaaacattaacgtgactttattgtaagtggctggtccaagttggagccaaagcttctaactgaaaacaaaaaacaccaacacctggggtcattcctgtatttaaaaagtgtttatgttgtagaatgctgggaatattggccttgcttcacttggtactcgtcattaatttctttctagaaagtacaaaatgagtacagagacaagaaataaaattccgatgctgagaaaaccaaatgtctaaagatttccaggagctcaaggtttattttgtttctagcctgctatgyatacctcaatatttatatggtttctgtgagaaaataaacactagaaatgatgacatataaaaatagccgcaggcacactggattcaaacttgacaaattggtc

SEQ ID NO: 688617 - DNA, 556 bp, Homo sapiens
agaacgaaggatttgttaagtgtctgggcacataattaatatgcagaatgcttccagtaaggtgtagggctgaaaggcgagctcccttccaactcgggaaattgaccgggatgaggaggtgggtggcgcccggcaggggagcagcatcagaaccaatcacasgagcaggtccaacttgatgctggaagctttccagagtggccttcaaggaaaggaacagaaaattctggagaccaatgcagtgtagcaaagaggttgtgccgttacgcccatgaaaggcaaaatgatgagtcatcaaaacgctgagcgttcctattggagaagggcaaccttttctgccttctaggaaactaacgagaaacaggaatagggaacaatagagctgaatgtcagcaaatgctgtctgtcagtgcacgcgggaggcttagaggcccgagggtatcaccccatgggtgtggattcctaccaccccatctcttaccgggtggcataaactctgggaaaaaccctgcaccagtgaggaccaggcccaaggatggcatcagactctcagtgc

SEQ ID NO: 688618 - DNA, 979 bp, Homo sapiens
gataaaatgaaataatccacaaaaaagcacttagtccagtgctggacaccaagaaaatactaaataaacatttactcttgctattaccattaaacaaatggtaatgtaatgcttatcaatagtgatggctcctttcttaaagaaagtgactttaactgcaaaatctccactaccagagtgaaagggaaagttgaagcaatttatccaagtaactccagcctcaaattcacttttgtcctgagtaatgtagttgtttttattctttttttaaaacaaaaactgaaaaagaaaaatgtgtataattagaatcacaaaagagtttacctagagcaaagttacttctttctatcatgtgcccaagatcgcggcaccaatatgtggtggctggcttatgaaacagattcggattcagagctcgcattcccaagctctttgctttacctggaattagggggacagaacatgagtcattcccattttgaatcagtgagtgattgcctacttttccctatatgagtgaagtcattttcagcatccatagaaatatagccacttgtcaaaagaaaatggaaagaacatggcttttgtgtcaaaagcatatagattttacctctggctcttgactctagcttgacatgggaccttaggcaatttatttatctttccttaaccttctcttaaacttctgtaaaatggaagaataatactttgcagcttccttctcttgtttcctcactcttttttctctcccttctttccttgttctttcccttcttttttttaaaaacctggaaataatgttatatacctaatttgtaatcacgawtcacaatcactcaaataattgtactattagaaaacaatgtttttcagaattaacacggtttcctgctctaattttaagaagtaaattatatttctcaaagtgtttggctcattggccttgtgtagactggaagaagcatggggtttggagtta

SEQ ID NO: 688619 - DNA, 662 bp, Homo sapiens
tgccaggtcctgagctaaatgtgttacatactttatgtctcctgattctccccacctgtgagggtggtggtagtgtgattattccatttgatacaagaggaggaatctgagctcacagaggttgagcaaatttctcagcatcttacaactstcagtcatcaaacctgatctgtttgttcctaatttcttgcttagtattagtactgttgacattttattttctcacctagagattttgtttgtttgtttctttgtttgtttaaatggagtctcgctctgtcaccaggctggagtgcagtggtgcaatctcagctcactgcaacttccgcctcccaggtttaagtgattctcctgcctcagcctcctgagtagctgggattacaggcacgtgccaccactcccggctaatttttgtatttttagtagagatgtggtttcaccatgttggccaggatggtctcgatctcttgatctcgtgatctgcctgcctcaacctcccagagtgctgggattacaggcctgagccaccgtgcccagccgagattttttttgatacataataattcatgagactattacaaatatggtaaatggattcttccttcccagctcacccacactcaagatgcttcctttaaaattctgttaacaatttgtgctag

SEQ ID NO: 688620 - DNA, 623 bp, Homo sapiens
ctctgagccaggtgagggatataatctcctggtgtgccgttttttaagcccattggaaaagcgcagttttagggtgggagtgacccgattttccaagtgctgtctgtcacccctttctttgactaggaaagggaattccctgaccccttgctcttcccgggtgaggcgatgcctcgccccggttcggctcgcgcacggtgcgctgcagccactgtcctgcacctactgtctggcactccccagtgagatgaacccggtacctcagttggaaatgcagaaatcacctstcttctgcgttgctgacgctgggagctgtcgaccaaagctgttcctattcggccatcttggctcctccctggattgttttttaaaatattgaggaattaatcttgtcctaggggttaagagaatagtaatagactgctgccaattttgggagtctttgaaaatataatagaaaagtaaaacatttattgcattatcttaggtgcagcctctgtgttgtgtttacacctggctgaattattgtttgtgtaacatatactatatttttgaacttagttttcgtttgactgtaataatcactgagaatgtttggttttgcttttgatgaaagaatatca

SEQ ID NO: 688621 - DNA, 3174 bp, Homo sapiens
aaaagacatatgactgttcaaggtgggcttttcttaattaagttgactgaagagcattctattcaatgcaaacaactcaaatggtttaacctaggggttggcaaacttaagaaaaaaatttattgttttttacttaaacagaaatatagtttacaaggcaaacttcttttttaaaaaagggacagatagtaaatatttttgactttgtgggcaacatatggtatggtgtgtgtgtgtgtgtattttttttttaacaagcctctgaaaatgtaaaagccattcttatcttgctgagcaccaagcctgcaggcagttgtgtaagtacactggaagtgggcacatcctattttaggcataaggctctaaattatcatctttaaatgcctgtgtaaatttatgaagctaatggtgtcatagtcctgtgacaggggagaaccctatggacgccactaaataagcctttattctaggacagacacagtgcattagtgcacctcatgttatttcttttaggaggtagcacatacctctacatttcaaggagcataaagcaaacccttcagttgtttaagaatttggatcaataaatgggctccagaagggtgactaatattcctgaaattttcagtgtgcaaaattttcttattttgttattattattttttgagatagggtcttgctctgtcacccaggctggagggcagtggtacaattacagctcactgtagccttgcccttcccggctgaagggatcctctcatctcaacctccttagtagctgggactacaggcacatgccaccatgcctagctgattttttaatttgttgtagagagagggtctccctatattgcccaggctggtctcgaactcctgagctcaagcaatcctcctgcttcagcctctcaaagtgctgggattacagccatgagccattgcgcctagcccaaaattgtatatgtaagtgtgcacttttctgaggaaaagtccttagctttcattagactcccaaagggtctgggcctgtgatccccaaaaggataatgaactgctctagttcacttctatagtaaatatatcaaggaatttttttttttttttttttgagacggagtctcactttgttgccaggctggagtgcagtggtgcgatcttggctcactgcaacctctgcctcccaggttcaagcaattctcctgcctcagcctcccaagtagctgggactacaggcacgcgccaccaggcccagctaatgtttgtatttttagtagagatgggatttcaccatattggccaggatggtcttgatctcttgacctcataaactgcctgcctcggcctcccaaagtgctrggattacaggcatgagccattgcgcccagccagagaacttttttaatattaagaaccactacctcaaaacaaatcttcattttaaggatacataaaatcgcctatttgtcaacattcttaataagaaaaaatacctgaaacttgtatattgaattgttttaaaatgcttcctgtgttcttttagctattattattaaagatttcaaaaagtcgtgaatttttgcaactaaaggcatgaacaatgacttatctcttaataattatgtgccatatagacagatggaaaaaagagggaacctgttgttcccagctggtatacattaccccaccaaaacaatgttttgaaatgccacagtaaataagttttttaaaagtttcatgtgggattcttgctcccaaccgtatgttactgtataaagtagggatatttgtcattaccaacaaaatttgggagaagcaaacagtctattcatacattccataaaaaacatgattttatcatcttattctaatcaaatacagaatctgcatatgtgacaaacttttaatatccactgatcacaaaaaggaatactttcaactgaaaagtgccagcagagctttctccctacctgcaaggagccagaacatcctcattatagtaccatctaccctaaatgataccaaacctaagggcctttcattattttagagttaattctgtgaaaaaatatgtgcagaccaaaatgtgggttggacgtgcacaatattaatgggcatgacatgaagacttagaataccctctgcatttctattttcttttttttttttttttttttgagatggctctgttgcccaggctggagtgcagtggcgtgatctcggctcactacaagctccacctcccgggttcacgccattctcctgcctcagcctcccaagtagctgggactacaggcacgcgccaccacgcccggctaattttttttgtatttttagtagagatggggtttcacagtgttagccaggatggtctcgatctcctgacctcgtgatccaaccgcctcagcctcccaaggtgctgggattacaggcgtgagccaccgtacctgatctgcatttctattttcagcctggaatgttagtacagttattagattaaaactgaaagtgaggatggtctcccaaaggaaagcaacctaatagaaaactaactctgtgatgcatatctatctactttcaaatgctatgtgacagtgctcattctacatagcaaaatatctttattatttctgtcaatgttgaaaaataaaacattgtacccttcagtcagtagataacccaatgaaaaaatacatctattctgcagcatcttccaaagcaaatcctacaacgtcttatgatcaaaatgctacccatcaaggcaaaatatttttagaaattgctatgtgtggcacaactttccacacaaatctcttgaatacaatcaggaagttgcaccaacagtgctcactgagaagaatatttttacaaaattgacctgcattttcttcaaaaggaaggctttggaaggaccaaaaaagacattctcagatccccaattagaaataatcaactgggattctaccaaatccatttttcaggacaaaagatgtctaccgagagagccaaagaacctgactatggccctgctgttactgaaacagtaactcatactcagacattaagttacaattttctaaaagacaaagttggtttgatttttgttttttaattaaacaaatatctgagaatgaaaataaagagggtgaaggacacctcgggaaatcataaactttatag

SEQ ID NO: 688622 - DNA, 3174 bp, Homo sapiens
aaaagacatatgactgttcaaggtgggcttttcttaattaagttgactgaagagcattctattcaatgcaaacaactcaaatggtttaacctaggggttggcaaacttaagaaaaaaatttattgttttttacttaaacagaaatatagtttacaaggcaaacttcttttttaaaaaagggacagatagtaaatatttttgactttgtgggcaacatatggtatggtgtgtgtgtgtgtgtattttttttttaacaagcctctgaaaatgtaaaagccattcttatcttgctgagcaccaagcctgcaggcagttgtgtaagtacactggaagtgggcacatcctattttaggcataaggctctaaattatcatctttaaatgcctgtgtaaatttatgaagctaatggtgtcatagtcctgtgacaggggagaaccctatggacgccactaaataagcctttattctaggacagacacagtgcattagtgcacctcatgttatttcttttaggaggtagcacatacctctacatttcaaggagcataaagcaaacccttcagttgtttaagaatttggatcaataaatgggctccagaagggtgactaatattcctgaaattttcagtgtgcaaaattttcttattttgttattattattttttgagatagggtcttgctctgtcacccaggctggagggcagtggtacaattacagctcactgtagccttgcccttcccggctgaagggatcctctcatctcaacctccttagtagctgggactacaggcacatgccaccatgcctagctgattttttaatttgttgtagagagagggtctccctatattgcccaggctggtctcgaactcctgagctcaagcaatcctcctgcttcagcctctcaaagtgctgggattacagccatgagccattgcgcctagcccaaaattgtatatgtaagtgtgcacttttctgaggaaaagtccttagctttcattagactcccaaagggtctgggcctgtgatccccaaaaggataatgaactgctctagttcacttctatagtaaatatatcaaggaatttttttttttttttttttgagacggagtctcactttgttgccaggctggagtgcagtggtgcgatcttggctcactgcaacctctgcctcccaggttcaagcaattctcctgcctcagcctcccaagtagctgggactacaggcacgcgccaccaggcccagctaatgtttgtatttttagtagagatgggatttcaccatattggccaggatggtcttgatctcttgacctcataaactgcctgcctcggcctcccaaagtgctgggattacaggcatgagccattgcgcccagccagagaacttttttaatattaagaaccactacctcaaaacaaatcttcattttaaggatacataaaatcgcctatttgtcaacattcttaataagaaaaaatacctgaaacttgtatattgaattgttttaaaatgcttcctgtgttcttttagctattattattaaagatttcaaaaagtcgtgaatttttgcaactaaaggcatgaacaatgacttatctcttaataattatgtgccatatagacagatggaaaaaagagggaacctgttgttcccagctggtatacattaccccaccaaaacaatgttttgaaatgccacagtaaataagttttttaaaagtttcatgtgggattcttgctcccaaccgtatgttactgtataaagtagggatatttgtcattaccaacaaaatttgggagaagcaaacagtctattcatacattccataaaaaacatgattttatcatcttattctaatcaaatacagaatctgcatatgtgacaaacttttaatatccactgatcacaaaaaggaatactttcaactgaaaagtgccagcagagctttctccctacctgcaaggagccagaacatcctcattatagtaccatctaccctaaatgataccaaacctaagggcctttcattattttagagttaattctgtgaaaaaatatgtgcagaccaaaatgtgggttggacgtgcacaatattaatgggcatgacatgaagacttagaataccctctgcatttctattttcttttttttttttttttttttgagatggctctgttgcccaggctggagtgcagtggcgtgatctcggctcactacaagctccacctcccgggttcacgccattctcctgcctcagcctcccaagtagctgggactacaggcacgcgccaccasgcccggctaattttttttgtatttttagtagagatggggtttcacagtgttagccaggatggtctcgatctcctgacctcgtgatccaaccgcctcagcctcccaaggtgctgggattacaggcgtgagccaccgtacctgatctgcatttctattttcagcctggaatgttagtacagttattagattaaaactgaaagtgaggatggtctcccaaaggaaagcaacctaatagaaaactaactctgtgatgcatatctatctactttcaaatgctatgtgacagtgctcattctacatagcaaaatatctttattatttctgtcaatgttgaaaaataaaacattgtacccttcagtcagtagataacccaatgaaaaaatacatctattctgcagcatcttccaaagcaaatcctacaacgtcttatgatcaaaatgctacccatcaaggcaaaatatttttagaaattgctatgtgtggcacaactttccacacaaatctcttgaatacaatcaggaagttgcaccaacagtgctcactgagaagaatatttttacaaaattgacctgcattttcttcaaaaggaaggctttggaaggaccaaaaaagacattctcagatccccaattagaaataatcaactgggattctaccaaatccatttttcaggacaaaagatgtctaccgagagagccaaagaacctgactatggccctgctgttactgaaacagtaactcatactcagacattaagttacaattttctaaaagacaaagttggtttgatttttgttttttaattaaacaaatatctgagaatgaaaataaagagggtgaaggacacctcgggaaatcataaactttatag

SEQ ID NO: 688623 - DNA, 620 bp, Homo sapiens
cacagcaacctctgcctcccgggctcaaatgattctcctgtctcagcctcccaagtagctgggattacaggggcgtgccaccacacctggctttcttttttttttttttttagcgaagactgggtttcaccatgttggccaggctggtcttgaactcctgacctcaagtgatccacctgccttggcctcccaaagtgctgggattataggcgtgagccactgckcccagcctatcatcaatttaaacaatcccttatcgactgacacttagattattatcccgtgtttggttattatgcagtgaacttatatttgaatttgagttgtgaactctaaatgcacattgttttaggtccagtacttaccacaggtaggtcatgggaactctgaggctctgtaatttctgagctctcaggatgaataggtgaaaatagtctgtatacattttttgagtcaggggatttttagaaagattcagggcatcaagaaaatactataaatgaagttaggtctttaactgtcaggtgattccttagaagcatgaaatactttttgtttacagtagactaagtgattgttttggtgccaggcctcaaaatctacttttctattggacctta

SEQ ID NO: 688624 - DNA, 955 bp, Homo sapiens
tatgatatacaccatatatgtgatatggatatgacatatgtgatatatatgtgatatacatcatatgataggtacattatatatgatctagatcatttatatctcatatatcatatatataatatattgatatgtcatacgatatatatgtatgacatgatatatatgtatgatacatgatatatatgatatgtatgctatatgatatgtatgctataggtatgatatatatgatatatatatcatatatatataaacaytgtacctagggtggatgcgttcttcctcttactttcgggaacgccctactctgtctatgaagtagctgttctttcaccacttgcctttcctaataaacttgcttttttagtttgcaccgtggactcaccccaaattctttctggtgtgagatctaaaaaccccctcttgggttctaaatcaggacccctttcctggaacaaaaccaatagccacagatgtataaaacatgctcgcctctggaaactggattctgaaaatgatatttgcttcatgtgttcatggataggactgaatgctagaacaaggataggggagaaatttagagtgtggcctctaaagccagaatgcctgtgttcaaattcttgttctcagtacaggtgagtttcttaactgcccccgtgctcagtttcccctatgtaataattagaatgctcatataagaactcttgtaactcctgtagaaatcatagcaaagcaccagttaatgctagtttttttgtttgtttctttttcctttttgagacggagtctcactctgtcgcccaggctgaactgcagtgggacgatcttggctcattgaaacctccacctactgggttcaagcaattcacttccctcagcctctcaaatagctgagattacaggcgcccaccaccatgcctggctaatttttgtattttttagtacagatggg

SEQ ID NO: 688625 - DNA, 1506 bp, Homo sapiens
  misc_feature 703, 712, 713, 714, 715, 716, 717, 718, 719, 720, 721, 722,723, 724, 725, 726, 727, 728, 729, 730, 731, 732, 733, 734,735, 736, 737, 738, 739, 740, 741, 742, 743, 744, 745, 746,747, 748, 749, 750, 751, 752, 753, 754, 755, 756, 757: n = A,T,C or G
  misc_feature 758, 759, 760, 761, 762, 763, 764, 765, 766, 767, 768, 769,770, 771, 772, 773, 774, 775, 776, 777, 778, 779, 780, 781,782, 783, 784, 785, 786, 787, 788, 789, 790, 791, 792, 793,794, 795, 796, 797, 798, 799, 800, 801, 802, 803, 804: n = A,T,C or G
  misc_feature 805, 806, 807, 808, 809, 810, 811: n = A,T,C or G
tttgtatttttagtagaggtggggttttgccttgttggcctgggagtctcgaactcccaacctcaggggatccacctgcctctgcctcccaaagttctaggattacaggmatgacctactgaggccagccattcttttttttaattttttttttaaacagttacagagactgttagctaggaagaaagggctaaggaacaagtgttattgagaaaaaaaatggataaagaataaaggatttgaaaaccctgaccaactgtaaaatgctaatgctgcaaaacagtctttttggattttttaacaacactgactcccagggaagaaagttaaacgaagtttattaagtaattcaattttgtacaacttgaaaaattcctctaactcttttaccatgctaacaagcacagcacctctgacagactggctgccagggaggcttcatccccactgcttttgtttacccagcaaattgtagttttgttgtctgagggaattgggaacaggggaatttgtagaaaagtgtaatagagagaaacttcacccaacgcagaacaaaacaattcttctctaacaaaatcagccactttgacttcattctcctccagctttgtgtaacacaagtagccccgggcaggtgaactggccttcccagcaggtgcaaggcgagggtccctgtgagtagagaaaccaaggagaactgacnggataagcnnnnnnnnnnnnnnnnnnnnnnnnnnnnnnnnnnnnnnnnnnnnnnnnnnnnnnnnnnnnnnnnnnnnnnnnnnnnnnnnnnnnnnnnnnnnnnnnnnnnccttctgagatttaggtttaaattcttttctctttgtttcttttactttttctttcttgctttcttgctttcttttcttgtgtgtgtgtgttattactattttttttttttgcaaggtctcactgtgtcatccaggctggagtacagtggcatgatcatagctcactgtagcgccccaacctcctgggctcaagcaagcctactacctcagcctactgagtagctgggactataggcacatgccaccacacgtgcccgcctaatttttttttttaagacagactttgtcccactgtgttgcccaggctagactcaaactcctgagctcaagtgatcctcttgccttgacctcccaaagtgctgggattacaggcatgagccaccaagcccagcctagagctccttgtttttggtcctcaggggatcttgggcaatatctcacctcatctggctgttacccaacactgtgctttatattctacttcctatttctgctgggtgaggatgggcttctgatgggtggaaaagaacttggaaagggccccaggcaggaaaaccattatggaagcaacgtctgtccacccaccaggccgctgggaggctgaagaagacacgtttttttgttttgttttgtttttttgtttttcctgtgggttacttgaaaaacatttttttaaatgcaaaaacagggtatc

SEQ ID NO: 688626 - DNA, 1506 bp, Homo sapiens
  misc_feature 703, 712, 713, 714, 715, 716, 717, 718, 719, 720, 721, 722,723, 724, 725, 726, 727, 728, 729, 730, 731, 732, 733, 734,735, 736, 737, 738, 739, 740, 741, 742, 743, 744, 745, 746,747, 748, 749, 750, 751, 752, 753, 754, 755, 756, 757: n = A,T,C or G
  misc_feature 758, 759, 760, 761, 762, 763, 764, 765, 766, 767, 768, 769,770, 771, 772, 773, 774, 775, 776, 777, 778, 779, 780, 781,782, 783, 784, 785, 786, 787, 788, 789, 790, 791, 792, 793,794, 795, 796, 797, 798, 799, 800, 801, 802, 803, 804: n = A,T,C or G
  misc_feature 805, 806, 807, 808, 809, 810, 811: n = A,T,C or G
tttgtatttttagtagaggtggggttttgccttgttggcctgggagtctcgaactcccaacctcaggggatccacctgcctctgcctcccaaagttctaggattacaggaatgacctactgaggccagccattcttttttttwattttttttttaaacagttacagagactgttagctaggaagaaagggctaaggaacaagtgttattgagaaaaaaaatggataaagaataaaggatttgaaaaccctgaccaactgtaaaatgctaatgctgcaaaacagtctttttggattttttaacaacactgactcccagggaagaaagttaaacgaagtttattaagtaattcaattttgtacaacttgaaaaattcctctaactcttttaccatgctaacaagcacagcacctctgacagactggctgccagggaggcttcatccccactgcttttgtttacccagcaaattgtagttttgttgtctgagggaattgggaacaggggaatttgtagaaaagtgtaatagagagaaacttcacccaacgcagaacaaaacaattcttctctaacaaaatcagccactttgacttcattctcctccagctttgtgtaacacaagtagccccgggcaggtgaactggccttcccagcaggtgcaaggcgagggtccctgtgagtagagaaaccaaggagaactgacnggataagcnnnnnnnnnnnnnnnnnnnnnnnnnnnnnnnnnnnnnnnnnnnnnnnnnnnnnnnnnnnnnnnnnnnnnnnnnnnnnnnnnnnnnnnnnnnnnnnnnnnnccttctgagatttaggtttaaattcttttctctttgtttcttttactttttctttcttgctttcttgctttcttttcttgtgtgtgtgtgttattactattttttttttttgcaaggtctcactgtgtcatccaggctggagtacagtggcatgatcatagctcactgtagcgccccaacctcctgggctcaagcaagcctactacctcagcctactgagtagctgggactataggcacatgccaccacacgtgcccgcctaatttttttttttaagacagactttgtcccactgtgttgcccaggctagactcaaactcctgagctcaagtgatcctcttgccttgacctcccaaagtgctgggattacaggcatgagccaccaagcccagcctagagctccttgtttttggtcctcaggggatcttgggcaatatctcacctcatctggctgttacccaacactgtgctttatattctacttcctatttctgctgggtgaggatgggcttctgatgggtggaaaagaacttggaaagggccccaggcaggaaaaccattatggaagcaacgtctgtccacccaccaggccgctgggaggctgaagaagacacgtttttttgttttgttttgtttttttgtttttcctgtgggttacttgaaaaacatttttttaaatgcaaaaacagggtatc

SEQ ID NO: 688627 - DNA, 710 bp, Homo sapiens
ccatctctttgagaagacgatgacaaagcccagcatgtagcttactcttgacaaattcaagtattcactggaagacagcggagcctgctcattccccttgagtccagtcttgacactgaagaactccagcagcaaaatactttggggaataattaatgtgggagatgacgaatggggattccttagcaagactctctaaaaactctcttcacccagctctttgtgcctgactcttcaaagcaaagtccttctcctctgcctctctgcacgatctcctgtgtggtactcccatctccattctcatccttcctcattccatcttttcccagacttagcaatctgtscaggtcccatttacaactccagcctctgtggccctcactcagataagcaaaacaaagggaaggtaactcactaaagggaagataactcacttaatcaaaaatgtgtcctcaccctcattacaaaaagtgatggaggccgggtctggtggctcacatctgtaatcccagcacttcgggaggccaaggtggttggatcacctgcggacaggagtttgagaccagcctgaccaacatggtgaaaccccatctctactaaaattacaaaatttagctgagcatggtggcatgcatctataatcccagcaactcaggaggctgaggcaggagaatcacttgaaccagggaaatggaggttgcagtgagccc

SEQ ID NO: 688628 - DNA, 710 bp, Homo sapiens
ccatctctttgagaagacgatgacaaagcccagcatgtagcttactcttgacaaattcaagtattcactggaagacagcggagcctgctcattccccttgagtccagtcttgacactgaagaactccagcagcaaaatactttggggaataattaatgtgggagatgacgaatggggattccttagcaagactctctaaaaactctcttcacccagctctttgtgcctgactcttcaaagcaaagtccttctcctctgcctctctgcacgatctcctgtgtggtactcccatctccattctcatccttcctcattccatcttttcccagacttagcaatctgtccaggtcccatttacaactccagcctctgtggccctcactcagataagcaaaacaaagggaaggtaactcactaaagggaagataactcacttaatcaaaaatgtgtcctcaccctcattacaaaaagtgatggaggccgggtctggtggctcacatctgtaatcccagcacttygggaggccaaggtggttggatcacctgcggacaggagtttgagaccagcctgaccaacatggtgaaaccccatctctactaaaattacaaaatttagctgagcatggtggcatgcatctataatcccagcaactcaggaggctgaggcaggagaatcacttgaaccagggaaatggaggttgcagtgagccc

SEQ ID NO: 688629 - DNA, 710 bp, Homo sapiens
ccatctctttgagaagacgatgacaaagcccagcatgtagcttactcttgacaaattcaagtattcactggaagacagcggagcctgctcattccccttgagtccagtcttgacactgaagaactccagcagcaaaatactttggggaataattaatgtgggagatgacgaatggggattccttagcaagactctctaaaaactctcttcacccagctctttgtgcctgactcttcaaagcaaagtccttctcctctgcctctctgcacgatctcctgtgtggtactcccatctccattctcatccttcctcattccatcttttcccagacttagcaatctgtccaggtcccatttacaactccagcctctgtggccctcactcagataagcaaaacaaagggaaggtaactcactaaagggaagataactcacttaatcaaaaatgtgtcctcaccctcattacaaaaagtgatggaggccgggtctggtggctcacatctgtaatcccagcacttcgggargccaaggtggttggatcacctgcggacaggagtttgagaccagcctgaccaacatggtgaaaccccatctctactaaaattacaaaatttagctgagcatggtggcatgcatctataatcccagcaactcaggaggctgaggcaggagaatcacttgaaccagggaaatggaggttgcagtgagccc

SEQ ID NO: 688630 - DNA, 609 bp, Homo sapiens
cacacacacacacacacacactcacattctcacacactgactttgatatgccattaattgtgaagatagcatttctttcctaggatttaatgtttatgttctgtggctttgaagttcagaaaacattacccttatacataatggtagctaatacctaattttgtattccttattataagatcatcatatcttccctaatttgcatctcttttttttaatccaaagtgacattacaggaagccaatgttactgttacattattttatcataacctgtatttttattgtaaaaattgtcatttttgaaaacttagaaaatatacataaagaagagagaaaaattaccactatattagaaaactagagagagagttawcacttcagagtattttctttctttgttttagggtcatgctttaatttttctatcctgcttttaaaatataatattaaaatatttggttttatatcttccttgtgcatttattatttttattcagtttgtttgtttatactatatagatgctatattgtttggttttatttttctcttttgatttgatagttattttttctgctggtaagtactttcaacttaaaaagtattcta

SEQ ID NO: 688631 - DNA, 607 bp, Homo sapiens
taacatgggggaagaacaactgttatattttctatatctggcatatattctctcactggtaaggatgttagaatgtcatgaacaggaattacaattattttgagactttttatgtaaagtgaattgaagagaaagatyaccaaatcaggaaccaatgctttgatatatatgtacagcagatctagtaccgtgttctataaatgagtgcttactgcatagcacagtgttacagcaggagaaatggctattctcattcacaatcaagtgacgaaaaactgagaaaataaaacaagccaaaaatttccccacaattggacatagaaagcttactacttagaatagtgttcttccaaatttttctttaaactaggattttactcttgtacttaatattcagtacagaagacacatttaagtaggcatcatcggtatcttcatcctaagggcctcctctccaataatacacagctgttttgaaaactcctagtagattttttacttaggtgagaggtgggcagtggggttggcaaagcccttcatgatccacttctgtgttagaggaagagtatgtgatgcccttgttatggaagaagagcctgtgttattg

SEQ ID NO: 688632 - DNA, 991 bp, Homo sapiens
cgacagttcattaatataaagctcaggaaatgattataaggcaatgagctaaaacttagtcacctccatgaacaaacaacaacatatttatatatttcaaawgccataaggttcaaggaattcaacaaattgaaaactaaactactattccaacttagcctaagccctcctccattgcaatggcactaccatctgtgaacaagctctctttggttttactatgaaatatctcttgaatccatttgctttcttttttttaaattgtttcccagctttattgacaaaagttatatatgtttatggtgtacaacatgatgtttcaatttatgtatacattattaaatgaattgagtccatttgtttgcattcattccttagctacaaattgtcaatcaaaactatcatctgtctagcttaaatttcagaaaatatcttatgtgtttcattgcatttggttttaatcccctttaatacagttccacaccacagctggagctatcttttaaaagcaaatctaatcttatatccttcccttgtaaaatttacattggatttctgtagttctgaggacaaaaactcaaaccatatatttgacaaacttcaaaatattagaaagtcctaaggaccaacccttagctctgttgttttcaccatcttcactcactgccagttccatgctgaggatacctagttttatctctctaatccctactttgcctttgtactccagacttatggatccaaattgcccactcaacatctctactggctatttaataactagtgcaatatctattgttgacatcttttttcttaccgtatctacataaaattcatcaacactaccatcagcttttccagaatctgactcttttttacaacctcagcattctagtctaagccaccatcttcagtcatctgtattttttcatcataactaatctccaaattctattcatgtccctcaacataccctattctacatacagtt

SEQ ID NO: 688633 - DNA, 1312 bp, Homo sapiens
gttctattctctatgtgtatgtttcatatcacaagtaaaggttttcttttctttctttcctattctttagttcctatgataagtcaatgaatggagcactacttaacaaattgttctaaatttcaaagggaaagtattagtatattttggtaaaatggctaccattgtgaactattgtcaagttaacttgaatcaataatgatgccatatccaaataagaatggttattatactgtttgttgtaaagtttcactcaataaaattttattgtggaaaatctctataatacaaaaattttaaatcaacattagagcagattacttcatttcatttatgacagcactaaaatatgcaataggattatgatgttaaattcctgtggctggatttcaatgctgttcattatctggctccacctcgcctcccatcacccataaacttcatttcagactattccacagtggaatactaggttagttttacctacacaactatgtgctctttcccacttgtcagacttttcatttgatttgatcataacacagagaaatcaatttggctaaaagcaatgtaaacttagtagtggtaataatgaaatagggatttatttttcttataagaatgctataggtcaaaaactcaagacagaaacagtgtcttaatacgttggtatcctaggttcctgttatatttttctccataatatttagcgtcttgacgttttttcttcctgattattgccttatggtttcaaggtggccacaaaccattagacttcaaatacatcttccaggtaggatggagagaaaaaaagcaaaaggaaaagcatagaggctaaaggactttcccctaaagaagccttagtgtgtattgggaaggatgccatttccagggagctttgaccacataatactgacataaacatgacaacctaccactcagtacattttgccaagctcccaagtataggccatggacctcactctgagtagtaaattatataccaaactttaaaaaattataatataatctaagtcctcctcaggttcgtatacaaacttgcctctctaggcaatacatttaacattcagttttcctatatctaggctgcggataacaataaaatcaaattatggttatgaaataaaattaaattacagtttatatgaagcacttgcgcatagtgaccatcycctcaaagaattgttcgatttctttttagcaatttctgatatttgtattattaccatctgaagccagcattttccaagtgttttccatgatataataaaaactgttatctaagaaaata

SEQ ID NO: 688634 - DNA, 1312 bp, Homo sapiens
gttctattctctatgtgtatgtttcatatcacaagtaaaggttttcttttctttctttcctattctttagttcctatgataagtcaatgaatggagcactacttaacaaattgttctaaatttcaaagggaaagtattagtatattttggtaaaatggctaccattgtgaactattgtcaagttaacttgaatcaataatgatgccatatccaaataagaatggttattatactgtttgttgtaaagtttcactcaataaaattttattgtggaaaatctctataatacaaaaattttaaatcaacattagagcagattacttcatttcatttatgacagcactaaaatatgcaataggattatgatgttaaattcctgtggctggatttcaatgctgttcattatctggctccacctcgcctcccatcacccataaacttcatttcagactattccacagtggaatactaggttagttttacctacacaactatgtgctctttcccacttgtcagacttttcatttgatttgatcataacacagagaaatcaatttggctaaaagcaatgtaaacttagtagtggtaataatgaaatagggatttatttttcttataagaatgctataggtcaaaaactcaagacagaaacagtgtcttaatacgttggtatcctaggttcctgttatatttttctccataatatttagcgtcttgacgttttttcttcctgattattgccttatggtttcaaggtggccacaaaccattagacttcaaatacatcttccaggtaggatggagagaaaaaaagcaaaaggaaaagcatagaggctaaaggactttcccctaaagaagccttagtgtgtattgggaaggatgccatttccagggagctttgaccacataatactgacataaacatgacaacctaccactcagtacattttgccaagctcccaagtataggccatggacctcactctgagtagtaaattatataccaaactttaaaaaattataatataatctaagtcctcctcaggttcgtatacaaacttgcctctctaggcaatacatttaacattcagttttcctatatctaggctgcggataacaataaaatcaaattatggttatgaaataaaattaaattacagtttatatgaagcacttgcgcatagtgaccatctccycaaagaattgttcgatttctttttagcaatttctgatatttgtattattaccatctgaagccagcattttccaagtgttttccatgatataataaaaactgttatctaagaaaata

SEQ ID NO: 688635 - DNA, 628 bp, Homo sapiens
ttttttaaaaaatttagccaggtgtggtggctcacaagcccagagttcaagaacagcatgggcaacacagagagacccctatctctacaaagaaatgtaaaatttaaaaaaaaaaaattagttctgtgtgttgttgcatctctgtggttccagctacttgaagggataatgtgcatcatcccccacaaagatcgctagagcccagtaggtggaggctgcagtgagctgcgatcatgccactgcactcctgcctgggtgacagagcaagaccctgtctctcaaaaaataaaaaataaaaaaagtccatgtagtttcaatttgtctatatatttgtatctgtgtgtgtatatgtatatatgtatatatataagcacacacatatagcgtgcttctgaaaaatatttttgttcctggtaraaatgctaccttatgattttacttaatttgtaactcagtttcaatactacgttcagtttgacatctgttactaagaaaaaacatgtggagtatgcctgaaatagaagtttcactattctgccatttagtggtaagtcttgaatgaaaaacagatatataaccacattaataaaatttgttttatttttcctctaaattaaggaaattttta

SEQ ID NO: 688636 - DNA, 967 bp, Homo sapiens
aaaacaagttataacacatatccccctaatatggtaagccctaaatagatatctgaagaattaataaaaatttagcttgcagtgagctgagatagcaccactgcagtctggcccgggtgaaagagcaagactccatctccaaaaaaaaaaaaaaaaatatttaaagataagtcttcagagtcagacttccacctgggggtctagaaatctgaatgctatgccaaataactggtggtgggcacattttagaagccaagtatggcaactcctgtcacaaaagtgtccttgtggaaaagacaacttggtttgtttctgttgacaaagtcaaatcaaactgctaccacttctctccaaaactaaccttaaccagttttttccccagtgataattacctgacagctgttaagtgtttaaggaaccccattaatgagtacccctcctctcctgagttctgaaccaactgaaaattatgataaagggttaragcagatagagattaaaacattcacaagctcaccattattactgatggagctgacattagataaggtggttgccttcttttccctagaactgaaaagattgactgctgtaggcatttgtcattaagcttaatgcatagctgagaacagtagaaaatgcaagatttctaagagtaaatttactccaaaaagtatcaagaagaaggggattaacacagaatgtccaggctctacttccaaatacatcaaccaaataaaccaccgcacttcagtagaacaaatgagaaaatgaagatgggcagcaatataaaggcaatggagatttcagcccttgatctagagcaaggacctagagagggaagaagtgttctccaccaacagtagctgttacttacagagagcctaatgttacttacagagagcctaatgtgtcttctgatacgctattctgagtgcttttccctcattagcttatgcagtcatca

SEQ ID NO: 688637 - DNA, 628 bp, Homo sapiens
taaaagtccacaaaaaggtagaggataattgcaagacaaatatttccaatgaagaactcatatccagaatatacaaatcagtaagaacaagacagaaagttcattttttaatgggcaaaagatttgaaagtgcactgtgcagcggaagatatttaaatggctaatacacataagaaaaggtgctaaataccgcggggcctgggtcccagccggcagcagagagctggtcgcccaccaccccaagctactgctgccgcctggctatttcccggcggggcggtacgtggtggtggctgagagccccctgccgcctggcgagtgggagctgtgccgcgcagtcccgggccctgcttacgaggaggagggcactcccctgcgctaccagcgtctggtgccctctcgcagccgcatcgtgcggacgccctccctgaaggacagcccggcaggccgggggctcagcaaggccgccgtgtccgaggagctcaagtggtggcacragcgtgcacgcctccggagcacccgcccccactcactggaccgccaaggagctttccgggtcaggagcctgccccttgggagagagggcttcgggcgagccctgggaccccgggcacaggtgcccacagtg

SEQ ID NO: 688638 - DNA, 669 bp, Homo sapiens
tgtcagtgctggtgatgtccacttagaaaattttcttgtgatcctttctcaccttgggatccctcccattcccattacacttttttcttatgtccaaaatctaccctgtaagtgcttttatcctagctgtaaaacatcttattaatatctttacttatttgtttcttttcacttggttgagagatctcttgaggataagttgtaagtatcatttttttatcatttcaatatatarcactgtattccagcatattttaaataactctgagtcctctttgaattactttttgtagctgtgtcttttatgtgccctgattcctattgacatgtgcctctctgattctcccccaacacaaaacaatacacacacacacacacacacacacacacacacacacacacacttctttccttctttacatggctcaggttctcattttgattggcaggggaactcaattagcaatttaaatatgagaagacattcactttcaaagcagctgtgggaatactactaatactcaattcagcatcagtctggcagaacctttctagagcattgttgatacagtttttctgcaacatgtgagtaaaataaatgcaccctcttttgcaatgaataactgtaccaaaatctaactgtaaccaaaatgtccagcttggccttca

SEQ ID NO: 688639 - DNA, 1397 bp, Homo sapiens
tcaatttcgaggatatcctgaatttaaaaataaactatagatataccagaatttcctgaatgtctaaasatgctgtcaaccatactggagagtttgattcttaacagaattatcctgtttttcaaacatatgtatagcatttttaaggaaaaggtgaatttttgcgctgaatttaaaatttttattctggaatttgaatggcaacctagctttgacttgtatctccatgctggggaagtaggctatttttgtaatataagcactgtcgttcagagtggcattccccaaggtgtggtatttgggaccccagtaggtgttacagaagtaaaggagaagtactatatagacagtagaaatgatgtgttaaacaaagttaaacttgttttttccaaaaatactttggccatgtcagatcctggaagagcctacagcagagattaacacaattttatagtaaagggccagatagaaaatgctttaagcttttcaggccagatggtctctgttgcagctactcaactctagtattgaagtaccaaagcagttgtagatgatatggaaaggaaagggcatagttgtattccaacaaaatgtatttataaaagcaaatgccgatttcccaacctctaggctagggagaatgaatctctaacagggggaaactatttagatttaaccacttattttaccatgaacccttctgtttgtttagtttgagaatcatcttgcaaagctattgtgtttaagaatatccattgggataaggtagtaaaatggaagagtgagcgtaggatcaaagtgagaaatgctatagtctagtgcttccacttgataaccttatgacctttgactaatcacctaattcttacagccacagtgaaagctttttgaggtaggaataacaattcgtgctttatatagctggtctgagggttaatgttggtggcacatgcttgctgtcaataaacacgaatccccttcaaacagtatttcttcaaatactattgttattgaattcagtgcattttacctttgtggctacttctctttttctatagtgcccaagaagtgaatatgcagtctcttaatgtgtactctctaaatgtgcagtgagccaatccattcttgggtctccagtcatgggtcacttggtattttacagtgtggctggacttctgtttaagcaatttggctgattttaaagctcagaggttctctttaaagtaattttcttgttgaaagttgatgaaaacatgctggaagttgaaatcagggcttgtcatgtcactaacttttctcattattatttttcgaatagtattaagcgtttatagagagttcaaaacatggcaagccctattttcagatttttctatgtattaactcatttaattatc

SEQ ID NO: 688640 - DNA, 1397 bp, Homo sapiens
tcaatttcgaggatatcctgaatttaaaaataaactatagatataccagaatttcctgaatgtctaaagatgctgtcaaccatactggagagtttgattcttaacagaattatcctgtttttcaaacatatgtatagcatttttaaggaaaaggtgaatttttgcrctgaatttaaaatttttattctggaatttgaatggcaacctagctttgacttgtatctccatgctggggaagtaggctatttttgtaatataagcactgtcgttcagagtggcattccccaaggtgtggtatttgggaccccagtaggtgttacagaagtaaaggagaagtactatatagacagtagaaatgatgtgttaaacaaagttaaacttgttttttccaaaaatactttggccatgtcagatcctggaagagcctacagcagagattaacacaattttatagtaaagggccagatagaaaatgctttaagcttttcaggccagatggtctctgttgcagctactcaactctagtattgaagtaccaaagcagttgtagatgatatggaaaggaaagggcatagttgtattccaacaaaatgtatttataaaagcaaatgccgatttcccaacctctaggctagggagaatgaatctctaacagggggaaactatttagatttaaccacttattttaccatgaacccttctgtttgtttagtttgagaatcatcttgcaaagctattgtgtttaagaatatccattgggataaggtagtaaaatggaagagtgagcgtaggatcaaagtgagaaatgctatagtctagtgcttccacttgataaccttatgacctttgactaatcacctaattcttacagccacagtgaaagctttttgaggtaggaataacaattcgtgctttatatagctggtctgagggttaatgttggtggcacatgcttgctgtcaataaacacgaatccccttcaaacagtatttcttcaaatactattgttattgaattcagtgcattttacctttgtggctacttctctttttctatagtgcccaagaagtgaatatgcagtctcttaatgtgtactctctaaatgtgcagtgagccaatccattcttgggtctccagtcatgggtcacttggtattttacagtgtggctggacttctgtttaagcaatttggctgattttaaagctcagaggttctctttaaagtaattttcttgttgaaagttgatgaaaacatgctggaagttgaaatcagggcttgtcatgtcactaacttttctcattattatttttcgaatagtattaagcgtttatagagagttcaaaacatggcaagccctattttcagatttttctatgtattaactcatttaattatc

SEQ ID NO: 688641 - DNA, 633 bp, Homo sapiens
taaacaggtttagatcaagtcacctcactgttttgctcacaaccctccagggaatttccatctcatcacctggcttcatgacctgtggtcctcccctctctgacatcaactaccttccctttttttctcatttaattttagctgtgctggcttttctgttcttccctcttccaagaaaggttttcctcagatagcaagaatctaactccttttcctccctgctctgctgctgccttttcatacagcctttcaytatgccctccccacttgatgctgcagccacacccaaccacctccaccttgcacacttaatcctcttaatgccttttatatttttcctgacatttattactatctgacataccttacatttaacatacattttgtttattgtttccaccctcaccccccaaattatataaattatattctaagaaagcacagattttgatcaatatttggtctccagcacctaaaaagtcctcagtacacagaaggttctcgaagaataaatgaagaaattaatgaatttgcaaactctgatgtaagcaatgctcttacctgagcacaattacttttcaaaatgcagcgtgcttgtggagttcagtttgatccagtttgcagtcatctgag

SEQ ID NO: 688642 - DNA, 608 bp, Homo sapiens
atttgtgtgctgccaaacccctgcagaaaatctccccactccacccctttcgggagggtggcttcagccgtcttgtagtacacagcaggcctccctgagaacccacagcaaaaggccgcattctcaggtgtgtgttgatagaaacgtctgggaaaattgagcctcttggctttgcatctgtttatcatacacaagcattcattgaatgatgtgctttgacataacaaaatctgtacaatcatcaacacaattaagacccattatgaatgaacgctttctcagatgagcgaggggtgggcagaaggcatggcccggaatgtcattattcccttgtatcttcaacctcccaggattttacctraagaaaggagagtcaaggagagatgtttatgtgccccaagggccatgcttttcagtagcaagaggtccctgcctgtgatagaaaaaaagagcccgtgtttcaaagtcttcggcttattgtttgacctcccaagtaaattccatgttctgcctccattttgagtggaactccttttccactttcaaactctgaggtaatagaaacatcctggtgccaggggcctgcccgagagtgggcgtgtcctctc

SEQ ID NO: 688643 - DNA, 922 bp, Homo sapiens
agccagctctaggaaccaaccttatgttactgttggccgcttgacctcagagttgatgatggggcctataattgtgctacttgagcatacatggacctagagaagagtttttactccccattcaaggttgatgtctactttggcaagatagggacaaatttgtatttgtcctgttacataaagagtcaggtacagagaccggaattaaatggtcccctattttttgctttttttttttttttcagtgttgttgcggtccattctgttgctacccatccaaagtcttccttgcctacagagccctgctgttattcaggtattgggagtgcagcaatgtgataagggaaagcagaacccttccccaactccagggaatcaatttgattgttctcaagcgagtcatggtagtctacacctttgtcagtgattgatctaggagtgcacatgtgaccaaactctggccaatgagatatagaaggaatactgctggggcctctggggaagattttgcgccctgataaaagtaacaaaagttattctacttcttctttttttttttttttttgagatggagtctcgctctgtcgcccaggttggagtgcagtggcacaatctcggctcactgcaagctccgcctctggggttcatgccattctcctgcctcagcctcccgagtagctgggactacaggcrcctgccaccacgcccggctaattttttgtatttttaataaagatggggtttcaccgtgttagccaggatggtctcaatctcctgacatcgtgatttgcccgtctcggcctcccaaagtgctgggattacaggcgtgagccaccacgccctgccctattctacttcttaattcttccttactgctgatctttttttatagcacttgtttcttttgcagaacatttttcag

SEQ ID NO: 688644 - DNA, 922 bp, Homo sapiens
agccagctctaggaaccaaccttatgttactgttggccgcttgacctcagagttgatgatggggcctataattgtgctacttgagcatacatggacctagagaagagtttttactccccattcaaggttgatgtctactttggcaagatagggacaaatttgtatttgtcctgttacataaagagtcaggtacagagaccggaattaaatggtcccctattttttgctttttttttttttttcagtgttgttgcggtccattctgttgctacccatccaaagtcttccttgcctacagagccctgctgttattcaggtattgggagtgcagcaatgtgataagggaaagcagaacccttccccaactccagggaatcaatttgattgttctcaagcgagtcatggtagtctacacctttgtcagtgattgatctaggagtgcacatgtgaccaaactctggccaatgagatatagaaggaatactgctggggcctctggggaagattttgcgccctgataaaagtaacaaaagttattctacttcttctttttttttttttttttgagatggagtctcgctctgtcgcccaggttggagtgcagtggcacaatctcggctcactgcaagctccgcctctggggttcatgccattctcctgcctcagcctcccgagtagctgggactacaggcacctgccaccacgcccggctaattttttgtatttttaataaagatggggtttcaccgtgttagccaggatggtctcaatctcctgacatcgtgattygcccgtctcggcctcccaaagtgctgggattacaggcgtgagccaccacgccctgccctattctacttcttaattcttccttactgctgatctttttttatagcacttgtttcttttgcagaacatttttcag

SEQ ID NO: 688645 - DNA, 922 bp, Homo sapiens
agccagctctaggaaccaaccttatgttactgttggccgcttgacctcagagttgatgatggggcctataattgtgctacttgagcatacatggacctagagaagagtttttactccccattcaaggttgatgtctactttggcaagatagggacaaatttgtatttgtcctgttacataaagagtcaggtacagagaccggaattaaatggtcccctattttttgctttttttttttttttcagtgttgttgcggtccattctgttgctacccatccaaagtcttccttgcctacagagccctgctgttattcaggtattgggagtgcagcaatgtgataagggaaagcagaacccttccccaactccagggaatcaatttgattgttctcaagcgagtcatggtagtctacacctttgtcagtgattgatctaggagtgcacatgtgaccaaactctggccaatgagatatagaaggaatactgctggggcctctggggaagattttgcgccctgataaaagtaacaaaagttattctacttcttctttttttttttttttttgagatggagtctcgctctgtcgcccaggttggagtgcagtggcacaatctcggctcactgcaagctccgcctctggggttcatgccattctcctgcctcagcctcccgagtagctgggactacaggcacctgccaccacgcccggctaattttttgtatttttaataaagatggggtttcaccgtgttagccaggatggtctcaatctcctgacatcgtgatttgcccgtctcggcctcccaaagtgctgggattacaggcgtgagccaccacgccctgccctattctacttcttaattcttccttaytgctgatctttttttatagcacttgtttcttttgcagaacatttttcag

SEQ ID NO: 688646 - DNA, 832 bp, Homo sapiens
tgaaataaaataaaatttaaaaaagaaattaaccaaaagagaatataagaaggatgttaaaattctttgttaaaaataaacaggctgggcacagtggctcacccctgtaatcccagcactttgggaggccgaggtgggaggatcacctgaggtcaggagttcaagaccagcctgaccaacatggagaaaccccrtctctactaaaaatacaaaattagccaggcatggtggcgcatgcctgtaatcccagctactcaagaggctgaggcaggagaattgcttgaagccaggaggcggaggttgcagtgagtcaagatcacgccattgactccagcctaggtaacaggagtgaaactctgtctcaaaaaaaaaaaaaaataataataataataataataataataaatggggaataatggggaaaaaaccctactatttttttccttatagaactatataggtttttttctccttcagttgggttttttaatttatatattttatttatttatttatttatttggtttttttaatcagctaactttaagattcattatttacattttgccaggaatttttccatataacctaaatgtcaagcttattgatataaatcatatataatatcctcattctattctttgtattgtgaaataagctctatataaggtcataaaacaaataaacatctcaaagaaagtcaggaaatgacctggactttttttgaatcaagccaggcacagtgggtcacacttgcaatcccagcactacgggaggctacgacaagcggatcgcttgagcccaggagttcaagaccagcctgggaaacatg

SEQ ID NO: 688647 - DNA, 832 bp, Homo sapiens
tgaaataaaataaaatttaaaaaagaaattaaccaaaagagaatataagaaggatgttaaaattctttgttaaaaataaacaggctgggcacagtggctcacccctgtaatcccagcactttgggaggccgaggtgggaggatcacctgaggtcaggagttcaagaccagcctgaccaacatggagaaaccccatctctactaaaaatacaaaattagccaggcatggtggcgcatgcctgtaatcccagctactcaagaggctgaggcaggagaattgcttgaagccaggaggcggaggttgcagtgagtcaagatcacgccattgactccagcctaggtaacaggagtgaaactctgtctcaaaaaaaaaaaaaaataataataataataataataataataaatggggaataatggggaaaaaaccctactatttttttccttatagaactatataggtttttttctccttcagttgggttttttaatttatatattttatttatttatttatttattkggtttttttaatcagctaactttaagattcattatttacattttgccaggaatttttccatataacctaaatgtcaagcttattgatataaatcatatataatatcctcattctattctttgtattgtgaaataagctctatataaggtcataaaacaaataaacatctcaaagaaagtcaggaaatgacctggactttttttgaatcaagccaggcacagtgggtcacacttgcaatcccagcactacgggaggctacgacaagcggatcgcttgagcccaggagttcaagaccagcctgggaaacatg

SEQ ID NO: 688648 - DNA, 1128 bp, Homo sapiens
aaaaatacaacaaattagccggtgtggtggcgcatgcctataatcccagctagtcgggaggctgaggcacgagaattgtttgaaccygggaggcggaggttgcaatgagccgagatggcaccactgcactccaacttgggcaacaagagcaaaactctgtctcaaaaaaaaaaagaaaaagaaaaagaaaatgtcaacacagagcactaaggtttgaaacctgagaatctcacacgttcaaagcacaagtagagtcaagtagctggttcaagtagctgcctctgttcattctatttaaagcattattttttaaatcctgcccttggtgggagaatcgtacacatacattgactatgtcgatgatcacctttcctggatgccatcaaggatgcagagacaaagaaatgtggacacattgtctgtgaaaaccacctcttactagaagctgattaccttccttggggaggtaggtgaggtaaattaagaacatagatttggggagaattcaaaggattagcaggggagcaatacttgggctctaactctagggaataatgctgatacacaaggtaagatttctgtctgaaccacaaaaacaaaaaaatctgatcatcagtctgaaatcaatctctttaagaggttttaaagattcttccagaaatttgactaagttttcattttacaagagacacctgttctctgaagcctctccctctccctttccctttccccccatagctcatgctattccttgaccccaacactctctccatactgggcccctgcaaaggctgtttaatgtagccactgccgcctgtctccaatccccctctgcctatcctccaggtctcagttagaatgccattcaaactccaagcaaccttcccaatagtcacctcctgactcagattatgttaggtcctcttgtttttatttatttattttttcgagatagggtcttgctctgttgccctggctagactgcagtgatgcaatcttggctcactgtagcctcaacctcccaggcctaagcaattctctcactgcagcctcccaagtagctgggactatgggtgcgtgccagcatacccagctaattttttattttccagtagagaatgggatgac

SEQ ID NO: 688649 - DNA, 1720 bp, Homo sapiens
atgaaaaattatttttcctaatcatagctaccatagtccacatgttgcattacattttctctttttttaaattttaaacacaggtccttttctctcctttttttaaattttaatttaattatataagacggagtctcagtatgttgcccaggctggtcttcaactcctgagctcaagcgatacatccgtctctgcctcccaaagtgctgagattacaggcctgagacactgtgcccggccttaaacacaaatcttaattcattcttacaattatcctggggttagaaaaatggaaggggaagaaagatggcaagcaggtaggctgacttcggcttcattatttggaaggagagtttgctcggttaaaacacactactgcccacaaaagccaagacaacagaaacatacagacatataaatagattttatatgtcacagcgtttgaatggagactttttcaatgcaaatgacaaacagctttccttgggaataaatgacaacgaattttttttatctcaacagctgtcctgagagcacgtctctacatctctacctgcattctggagtcagggaggaagccaaaacggacgaaaagacactagatcagccgtgtccaaccctttgactacaaggactttccagcctatctgtggtggtgggtatcatgaaaattatgcagaaaccttttttttttttaagctcatcagctatcattagcagtagtgtattttatctgtggcccaggagcattcttcttccaatgtggccctgagaagccaaaagactggacacctgtgcactagatcaaaaggctactccttctggaagcaattgtaaagaatttctgacattatcttgacatgaaaaccaatggatagtgagacagaatgcaaaatcttcaagaatttttcttgttggtttttttttttttttttcagtcaaggtgttgctctttggcccaggctggaatamactggtgagatcacagctcagtgcaggctcaagtgctcctcccacctcagccacagtagtagctaggactacagatgcgcacaaccactcctggctaatattttattttttgtagagatggggtctcactatattgtccagtttggtctcaaactccttgactcaagggatccaggacaggataacaggcgtgagccaccacacctggccacgtgcatgaacttttaagacaaatacaaggctccacaaaagttaaggttttcccacctgatttccaggggatcttttggtgcaaggatgagaaacccttaaaagtacacagacaactccaaagattcaagagagttcatttgggctgagccagcccactgggcagactgaccttcaaacaaggcccacccatgacatacaccagatagctctccaagaatctctccagttctcagggtccctaaggtactggacagagctagagaggcaaacccatttgcttcttcctgcacgaaaccccttgaggtcaagaccccacaatcagacgaggatggagtggctcaccctcagtcaacaggccagactcaaggtggtataatgtcttaaccaagcgagtgggcctccaggtctgactcagtgctcctttaataaccactctttgttaattctccttaacaggggttcctggcaagtcatttctccctcaggccttcggtttcctcacctacaagatgagagggctgcaccagatggaaaa

SEQ ID NO: 688650 - DNA, 1574 bp, Homo sapiens
  misc_feature 697, 698, 699, 700, 701, 702, 703, 704, 705, 706, 707, 708,709, 710, 711, 712, 713, 714, 715, 716, 717, 718, 719, 720,721, 722, 723, 724, 725, 726, 727, 728, 729, 730, 731, 732,733, 734, 735, 736, 737, 738, 739, 740, 741, 742, 743: n = A,T,C or G
  misc_feature 744, 745, 746, 747, 748, 749, 750, 751, 752, 753, 754, 755,756, 757, 758, 759, 760, 761, 762, 763, 764, 765, 766, 767,768, 769, 770, 771, 772, 773, 774, 775, 776, 777, 778, 779,780, 781, 782, 783, 784, 785, 786, 787, 788, 789, 790: n = A,T,C or G
  misc_feature 791, 792, 793, 794, 795, 796: n = A,T,C or G
aaaatgccagtcgaagacccagacgtttaaaagtgatattttagtaaatacctgaaccagctcatttttaaaaagattgctctcggctgctattttgrtaagtggcatcacgtgatagtgatgccaggctggggaaggctgggctgcccatgtggcccgcaggagagggtggcctggaagaggagcacccggagcaccctgcttattttctggggaaccccacgctgcagaccctctgaagctgagggcctccccgacaccctgggcatggcaggaagatatttatgtcaacagcagagtggggccagtgcactggctcggggaggtggcgtgcctgtcattacaacacacagccgtcattacggaatacagtaatcacacagcacaatgcttgtaattacagaaaaatggtttccctttttggcgaggcggcgagggagggagagaaggcagctcttggtgaggccagcactggtactcatcccctgaattgggcggggtttaaaataggtttcgtagggtgaggccttgggcctggcttgggggtaggcacagacctaccccaagccggagcatgatcagatgctggggacttgcagggactctgatcttgctgtggtttcatcaaggccaccagcaccatcatgcaggtctcctctgctccccaatgctgctgggtctcagcagatgtcagctnnnnnnnnnnnnnnnnnnnnnnnnnnnnnnnnnnnnnnnnnnnnnnnnnnnnnnnnnnnnnnnnnnnnnnnnnnnnnnnnnnnnnnnnnnnnnnnnnnnnacttccttgttcttacaaacctaaggaagagtgggctcctgggattaactcggcgtcacgaaaccctggccctgagggacggacctctcagcctgggtcaggccaaggacatctgagtggccccaccgcgaactcctgtgagcccctggagcgagcagtggcctcgagtctgtgcccacctcctttcacgcccctcttccctggctggccatcttggcatccctcctcccctgccactctatcttggcctcctgggccggctcccaccccccggttcccatgcttcctccccgcagagagggacccagaggtgccaccaccttggggtgaccaagtcccagtgctatgttcggccccagggctccttcacttcactcacaggcgcctttccctgcagctcacacaggcacaaagtaacacacgtgcccgcacactcgtgtatacacgcacacaggcacacactactgctcacatgcacataagtgcaatgtgtcctcacatgaacatgagtgcaatgggaacactcttacacaccagttcacagacacccacatgcacacactccaccacacatgcatacacacagacaggtacacactcctccagggctcttgggaatagtcctctgttttgtcaccaagctcccaggaaagctgcccctccctgctggctccagggcctgtcaccagccatccagctcttgcctggagtgagtcctccctcctcagggtgagtccttcctccttggggtgagttcccctcctggggtgagtcctcc

SEQ ID NO: 688651 - DNA, 606 bp, Homo sapiens
caaggtgcttctgcaggcaggaaggacactccctgatgccagaggaggcttgctggccagtgtggatgtacgtcggaagcatccaaggaaattgatgcctgagagtcggctggcggcctggccagtgctcaggtgtgccctggtgcccrgtcaacacctgtagtgacagcggcagtgacagccactgcgcctcagagcactgaaggggtctttggagactatcctgctcatctctgtaccctcatccccctggcttgggcacgaggtccctccctcccaccagtctcttggtccccactctggccctcaacggctcaccttgaatgtgtgcaatctagtaaggttgaactcacagaagtaaagagtggaaccagggcaaccagaggcaaggggatgggaaagagggaaggagaattgccaatcaaaggatacaaagtttcagataggcaggaggcacggggcctttccacttatagcacaccagagggactgcagtcaatagtatgctattacccatttccaaatagcagagaatttcaaatgtttcaaatgtctcaccccaaacaatgaaaggaggatgaggtgatagatatgctaattagcttg

SEQ ID NO: 688652 - DNA, 606 bp, Homo sapiens
caaggtgcttctgcaggcaggaaggacactccctgatgccagaggaggcttgctggccagtgtggatgtacgtcggaagcatccaaggaaattgatgcctgagagtcggctggcggcctggccagtgctcaggtgtgccctggtgcccggtcaacacctgtagtgacagcggcagtgacagccactgcgcctcagagcactgaaggggtctttggagactatcctgctcatctctgyaccctcatccccctggcttgggcacgaggtccctccctcccaccagtctcttggtccccactctggccctcaacggctcaccttgaatgtgtgcaatctagtaaggttgaactcacagaagtaaagagtggaaccagggcaaccagaggcaaggggatgggaaagagggaaggagaattgccaatcaaaggatacaaagtttcagataggcaggaggcacggggcctttccacttatagcacaccagagggactgcagtcaatagtatgctattacccatttccaaatagcagagaatttcaaatgtttcaaatgtctcaccccaaacaatgaaaggaggatgaggtgatagatatgctaattagcttg

SEQ ID NO: 688653 - DNA, 606 bp, Homo sapiens
caaggtgcttctgcaggcaggaaggacactccctgatgccagaggaggcttgctggccagtgtggatgtacgtcggaagcatccaaggaaattgatgcctgagagtcggctggcggcctggccagtgctcaggtgtgccctggtgcccggtcaacacctgtagtgacagcggcagtgacagccactgcgcctcagagcactgaaggggtctttggagactatcctgctcatctctgtaccctcatccccctggcttgggcacgaggtccctccctcccaccagtctcttggtccccactctggccctcaacggctcaccttgaatgtgtgcaatctagtaaggttgaactcacagaagtaaagagtggaaccagggcaaccagaggcaaggggatgggaaasagggaaggagaattgccaatcaaaggatacaaagtttcagataggcaggaggcacggggcctttccacttatagcacaccagagggactgcagtcaatagtatgctattacccatttccaaatagcagagaatttcaaatgtttcaaatgtctcaccccaaacaatgaaaggaggatgaggtgatagatatgctaattagcttg

SEQ ID NO: 688654 - DNA, 1089 bp, Homo sapiens
  misc_feature 989, 990, 991, 992, 993, 994, 995, 996, 997, 998, 999, 1000,1001, 1002, 1003, 1004, 1005, 1006, 1007, 1008, 1009, 1010,1011, 1012, 1013, 1014, 1015, 1016, 1017, 1018, 1019, 1020,1021, 1022, 1023, 1024, 1025, 1026, 1027, 1028, 1029: n = A,T,C or G
  misc_feature 1030, 1031, 1032, 1033, 1034, 1035, 1036, 1037, 1038, 1039,1040, 1041, 1042, 1043, 1044, 1045, 1046, 1047, 1048, 1049,1050, 1051, 1052, 1053, 1054, 1055, 1056, 1057, 1058, 1059,1060, 1061, 1062, 1063, 1064, 1065, 1066, 1067, 1068: n = A,T,C or G
  misc_feature 1069, 1070, 1071, 1072, 1073, 1074, 1075, 1076, 1077, 1078,1079, 1080, 1081, 1082, 1083, 1084, 1085, 1086, 1087, 1088: n = A,T,C or G
cagcatcagagaaaggcgcctggtggagcggggaggggactgaacccagcggtcccccttgaaataaacattaaatccccaggcactgcctgctaattatcaacagttagtagggcctaaatgtgacagactcatctttaaagacacttcgggtcacacctgacagattttaaaatgtattcatctccctttggcaaccagaattggcgcttattcggatctatttcttctgagggaaatcagtagtaccttaacttttattgaaatcgattttctaagatcacaaaaagaaaatgcttyttaaaaaacccacgggtgtactttaattattttgaataccaacaaaaaaccacagagacccaaaacccagatgacttaacacaaatattgaaatggctttctacagacgaagatctttatgatgtgcctaaagctgtgctctaaggatgcgcctccgtggtggcagcttaaccacgtccagtgcaggcaagcaccacctcacctttccccactagcaagaagggcgtgttccacccctaggaagctcactgtcatccctcacctccctggaatcacccctgccctggcacacgtggccacaacagtgcctcctgcccagacctgactgtcactatttccaggtgacagaaatggcaactgctgttgattcaattacagactgcggacctactgtgtgcgagatcctgttccacatgctgggggaaaacagagtccccacctccatgtggcttaagtgtttgcagtttgatgaatgaaaagccatccaacccagatgggccctggcttgcggtagttccgctgaggattattcaactttacaaatgtgtcaaagcacgaaagcgagacaccttcagtagaaactgtacctcgggtacccacacaaacattctgtttttcacttccagtattcaataagttacatgagctagtcagcattttattataatataggctttgtgtgagatgannnnnnnnnnnnnnnnnnnnnnnnnnnnnnnnnnnnnnnnnnnnnnnnnnnnnnnnnnnnnnnnnnnnnnnnnnnnnnnnnnnnnnnnnnnnnnnnnnnng

SEQ ID NO: 688655 - DNA, 639 bp, Homo sapiens
tttgaactggcacaattaagaaacaatgaacttgaatataggtcaaatgatatctagttggaggaacaaaaaggaaaccataataacaagaaattaacagatgtttagcaacttgtggagcatcatcaagtaccggtatatgcacaatgggagttccagaaagaaaggagagcaatgagggagcagaaagaatattggaaaaaaaaaaaaaaaaaaaggctaacaacttgccaaatttgatgacaaacttgaatgtacatttccaagaaggtcaatgaaatctaagtaggataaactaaaaagttatacttgcaagcacaacataatcacataatttaaagcaaaagacaaagattattaaaaggagcaagtgaayagcaatttattatatacaggaaacttcagtaagactaacccctaaattctcatgagaacctatggaggccagaaggcaatagaatacaaaattcaaagtgcaggaaaaaaagattgccaagcaaaaattctacatctagcaacactttaaaaaaaatagaaaaggtctctctgtagttatttaatgcatgtgtcagatatactataaaaagaggatacggtgcaataaaatgagagcaattatatacaaatctatatcaaaaa

SEQ ID NO: 688656 - DNA, 636 bp, Homo sapiens
atttcttcctggagcccagggggtgaggctgacagttccaagcctctaatcacatggtttgttcttctgacaacaaccacccctttttctgaagctgtctacaagctttcagtcacccagtcatctcagtaacatcaccaaatgcattcttactatggtgatcccaaaggtcttagaggctcttgtgttagaaacctgggactaagaccaaatattgaaacagaagatgccycatcactttcatcaccaaggcctttataagagcttgagaatctctttgccaggatgaggggcagaaaccaaatgtgtatttcttttctttttcttttgaacacagagtctctatttcacccaatctggagtgcagtgatggtgttgtagctaactgcagcctcaaccacctgtgctcaagcaattctaccacctcagccttccaagcatctgggactacaggtgcacaccatccatgcccagctaatttttgtattttttgtagagataggatcttgttatattgccgaggctggtcttgaactctggggctaaagcgatcctttcaccacaacctctcaagtagctgaaactacagatgcatactaccatgcccagctaattttttcttatttctttttgttg

SEQ ID NO: 688657 - DNA, 636 bp, Homo sapiens
atttcttcctggagcccagggggtgaggctgacagttccaagcctctaatcacatggtttgttcttctgacaacaaccacccctttttctgaagctgtctacaagctttcagtcacccagtcatctcagtaacatcaccaaatgcattcttactatggtgatcccaaaggtcttagaggctcttgtgttagaaacctgggactaagaccaaatattgaaacagaagatgcctcatcactttcatcaccaaggcctttataagagcttgagaakctctttgccaggatgaggggcagaaaccaaatgtgtatttcttttctttttcttttgaacacagagtctctatttcacccaatctggagtgcagtgatggtgttgtagctaactgcagcctcaaccacctgtgctcaagcaattctaccacctcagccttccaagcatctgggactacaggtgcacaccatccatgcccagctaatttttgtattttttgtagagataggatcttgttatattgccgaggctggtcttgaactctggggctaaagcgatcctttcaccacaacctctcaagtagctgaaactacagatgcatactaccatgcccagctaattttttcttatttctttttgttg

SEQ ID NO: 688658 - DNA, 636 bp, Homo sapiens
atttcttcctggagcccagggggtgaggctgacagttccaagcctctaatcacatggtttgttcttctgacaacaaccacccctttttctgaagctgtctacaagctttcagtcacccagtcatctcagtaacatcaccaaatgcattcttactatggtgatcccaaaggtcttagaggctcttgtgttagaaacctgggactaagaccaaatattgaaacagaagatgcctcatcactttcatcaccaaggcctttataagagcttgagaatctctttgccaggatgaggggcagaaaccaaatgtgtatttcttttctttttcttttgaacacagagtctctrtttcacccaatctggagtgcagtgatggtgttgtagctaactgcagcctcaaccacctgtgctcaagcaattctaccacctcagccttccaagcatctgggactacaggtgcacaccatccatgcccagctaatttttgtattttttgtagagataggatcttgttatattgccgaggctggtcttgaactctggggctaaagcgatcctttcaccacaacctctcaagtagctgaaactacagatgcatactaccatgcccagctaattttttcttatttctttttgttg

SEQ ID NO: 688659 - DNA, 636 bp, Homo sapiens
atttcttcctggagcccagggggtgaggctgacagttccaagcctctaatcacatggtttgttcttctgacaacaaccacccctttttctgaagctgtctacaagctttcagtcacccagtcatctcagtaacatcaccaaatgcattcttactatggtgatcccaaaggtcttagaggctcttgtgttagaaacctgggactaagaccaaatattgaaacagaagatgcctcatcactttcatcaccaaggcctttataagagcttgagaatctctttgccaggatgaggggcagaaaccaaatgtgtatttcttttctttttcttttgaacacagagtctctatttcacccaatctggagtgcagtgatggtgttgtagctaactgcagcctcaaccacctgtgctcaagcaattctmccacctcagccttccaagcatctgggactacaggtgcacaccatccatgcccagctaatttttgtattttttgtagagataggatcttgttatattgccgaggctggtcttgaactctggggctaaagcgatcctttcaccacaacctctcaagtagctgaaactacagatgcatactaccatgcccagctaattttttcttatttctttttgttg

SEQ ID NO: 688660 - DNA, 636 bp, Homo sapiens
atttcttcctggagcccagggggtgaggctgacagttccaagcctctaatcacatggtttgttcttctgacaacaaccacccctttttctgaagctgtctacaagctttcagtcacccagtcatctcagtaacatcaccaaatgcattcttactatggtgatcccaaaggtcttagaggctcttgtgttagaaacctgggactaagaccaaatattgaaacagaagatgcctcatcactttcatcaccaaggcctttataagagcttgagaatctctttgccaggatgaggggcagaaaccaaatgtgtatttcttttctttttcttttgaacacagagtctctatttcacccaatctggagtgcagtgatggtgttgtagctaactgcagcctcaaccacctgtgctcaagcaattctaccacctcagccttccaagcatctgggactacaggtgcacaccatcyatgcccagctaatttttgtattttttgtagagataggatcttgttatattgccgaggctggtcttgaactctggggctaaagcgatcctttcaccacaacctctcaagtagctgaaactacagatgcatactaccatgcccagctaattttttcttatttctttttgttg

SEQ ID NO: 688661 - DNA, 636 bp, Homo sapiens
atttcttcctggagcccagggggtgaggctgacagttccaagcctctaatcacatggtttgttcttctgacaacaaccacccctttttctgaagctgtctacaagctttcagtcacccagtcatctcagtaacatcaccaaatgcattcttactatggtgatcccaaaggtcttagaggctcttgtgttagaaacctgggactaagaccaaatattgaaacagaagatgcctcatcactttcatcaccaaggcctttataagagcttgagaatctctttgccaggatgaggggcagaaaccaaatgtgtatttcttttctttttcttttgaacacagagtctctatttcacccaatctggagtgcagtgatggtgttgtagctaactgcagcctcaaccacctgtgctcaagcaattctaccacctcagccttccaagcatctgggactacaggtgcacaccatccatgcccagctaattkttgtattttttgtagagataggatcttgttatattgccgaggctggtcttgaactctggggctaaagcgatcctttcaccacaacctctcaagtagctgaaactacagatgcatactaccatgcccagctaattttttcttatttctttttgttg

SEQ ID NO: 688662 - DNA, 626 bp, Homo sapiens
ctgatacttatgggttgcttatatccttgaaattattagcattggctttgatctcttgtttgtgtgaatctaatagatgagccaagcttttgtattatcttaaggctaaactcctgccccctttgtaaaggtaacaaggcttctcaaaatttgaccagagccaacctctgctgagactcccttctgtttttccctatcaggcagcctatgtttctggcacagagagcctcttgtcagccctaactcaccgggcttccctcaacaccaagcgtatgtgcctgctcactgctcatttgctcagctgagatgtgttaagcatgtgccatgtgccattactgctgtagacactggcattcactactgagtacagggcatatgtctgaagtgtttgaggatcccaaagaggccaggatgattgtagctgagagggagagagagaggcaggaaaagagggcagagaggtaggtaaggattggatcacatggggactcagaggccaggatgakgacttccgattttattcagttgtaggaggatatgagaacttttggaggagggacatatcatgttccattctctttttttgaggggagatggtaattactatagagtagtatcaaagacca

SEQ ID NO: 688663 - DNA, 674 bp, Homo sapiens
cccttcctcatttattggacagagatgccgtcacctccatctctatgtttgcacaggagtttataaatgaagcatttagaggtctagagaaatgtggtgattccccattggcaaatattacctttcaaaagtgggggaacagttgtattcttctttgtataataacttcatcttgccttacatctctaaaccagccagagaatcaagcacaaaacaattccagggccttggatgcgatacacagtgtagcagagtacatacgtgtatgggctttgaagtcaggctgagctgagctctagttctttgytttcccacttacctgctgcaagttccccatctgtaaagtagggagtaagaatgacctttcaattattaggaataaatgggatttccctctgtaaagcatttagttcagagtctgacatgtagtaattgctcgataaatggtaacttttattcattccagagcgtttattgagaacctactatgcctaggataattcctgaccaatacaagagagacagtttccatggagatgtgatcggtaaggtggtggagactcagagtgatggatgggctccctttgattggtggtccaggaagcctctaggaggaggaggtggcaacatttaaactgagaccttaatgatattgatgagttcctgttttatca

SEQ ID NO: 688664 - DNA, 674 bp, Homo sapiens
cccttcctcatttattggacagagatgccgtcacctccatctctatgtttgcacaggagtttataaatgaagcatttagaggtctagagaaatgtggtgattccccattggcaaatattacctttcaaaagtgggggaacagttgtattcttctttgtataataacttcatcttgccttacatctctaaaccagccagagaatcaagcacaaaacaattccagggccttggatgcgatacacagtgtagcagagtacatacgtgtatgggctttgaagtcaggctgagctgagctctagttctttgttttcccacttacctgctgcaagttccccatctgtaaagtagggagtaagaatgacctttcaattrttaggaataaatgggatttccctctgtaaagcatttagttcagagtctgacatgtagtaattgctcgataaatggtaacttttattcattccagagcgtttattgagaacctactatgcctaggataattcctgaccaatacaagagagacagtttccatggagatgtgatcggtaaggtggtggagactcagagtgatggatgggctccctttgattggtggtccaggaagcctctaggaggaggaggtggcaacatttaaactgagaccttaatgatattgatgagttcctgttttatca

SEQ ID NO: 688665 - DNA, 674 bp, Homo sapiens
cccttcctcatttattggacagagatgccgtcacctccatctctatgtttgcacaggagtttataaatgaagcatttagaggtctagagaaatgtggtgattccccattggcaaatattacctttcaaaagtgggggaacagttgtattcttctttgtataataacttcatcttgccttacatctctaaaccagccagagaatcaagcacaaaacaattccagggccttggatgcgatacacagtgtagcagagtacatacgtgtatgggctttgaagtcaggctgagctgagctctagttctttgttttcccacttacctgctgcaagttccccatctgtaaagtagggagtaagaatgacctttcaattattaggaataaatgggatttccctctgtaaagcatttagttcagagtctgacatgtagtaattgctcgataaatggtaacttttattcattccagagcgtttattgagaacctactatgcctaggataattcctgaccaatacaagagagacagtytccatggagatgtgatcggtaaggtggtggagactcagagtgatggatgggctccctttgattggtggtccaggaagcctctaggaggaggaggtggcaacatttaaactgagaccttaatgatattgatgagttcctgttttatca

SEQ ID NO: 688666 - DNA, 631 bp, Homo sapiens
tgatttgttacacttatcatttttatttattggaaacaaatgctttctatttgactgtattaataagttccgggaggaaaggggtatttgtggatgcttcccaagtgcttagatcagtgcctgacacatagtggccactcaatacatatctattattgctgacttgcgactttcagtaaacatcacactaagttaacaacaatatcatatattaacacatgaggaatattccaaaaaatacagattttccgcctctcagaccagattgctgcttacttggtgtkttgtttgtttgttttgtgttttttgtttgtttgtttgtttgtttgagacggagtttcgcccttgttgtccaggctggagtgcagtggcctgatcttggctcactgtaatctctgactcctgggttcaagcaattctcctgcctcagcctcccgaatagctgggattacaagcgcacaccaccacacccagttaattttttgtatttttagtagagacgggatttcactatgttggccaggcccagttaattttttgtatttttagtagagacgcggtttcaccgtgttggccaggctggtctccaactcctgacctcagtaatccacccgcctcggcctcccggagt

SEQ ID NO: 688667 - DNA, 631 bp, Homo sapiens
tgatttgttacacttatcatttttatttattggaaacaaatgctttctatttgactgtattaataagttccgggaggaaaggggtatttgtggatgcttcccaagtgcttagatcagtgcctgacacatagtggccactcaatacatatctattattgctgacttgcgactttcagtaaacatcacactaagttaacaacaatatcatatattaacacatgaggaatattccaaaaaatacagattttccgcctctcagaccagattgctgcttacttggtgttttktttgtttgttttgtgttttttgtttgtttgtttgtttgtttgagacggagtttcgcccttgttgtccaggctggagtgcagtggcctgatcttggctcactgtaatctctgactcctgggttcaagcaattctcctgcctcagcctcccgaatagctgggattacaagcgcacaccaccacacccagttaattttttgtatttttagtagagacgggatttcactatgttggccaggcccagttaattttttgtatttttagtagagacgcggtttcaccgtgttggccaggctggtctccaactcctgacctcagtaatccacccgcctcggcctcccggagt

SEQ ID NO: 688668 - DNA, 775 bp, Homo sapiens
tgtcgaaactcttatttactgaatattttactttcagtgactaacttctttaaattaaatgtctactttaacctcacacaaaattaatctctgcaaaagtattagttttttatgtattttctgcaataaatcgttatctaataaaaagctttcctggtgatcaccaaaattatcatgagaagatgctacttgactcagtccttgggaaatgcggagataaataatcacttgatgtttatcattccccttctttgcatgtctctaaattgtacctattagaattatttatctctgtgtttatcttcatcattaactgggatgtctaagggcaaggactgtgactgtaaattctactgccggtgattactaagatactttcccagaacagaggctcaataaatatttgctaaatgaattaaacagtttttgaatgcctacattgattaagaaatatgctagacatgttggcaggactcaaagaataatcagagattctcaatcaagaagttagcaagttataaaagaaatatgtttatttttctataaaaatgtatatgttatacaacttataggtatgttatacrtatgtagttactttccatgaatgttaagagtaaagataaacaactttttagctaaaaattacattcaagctataccttgacaaataaggatgtgaattgacaatgtgtgtgtttttgcctgtgtttgcttgtatagaggttacatgtaagcttcctacaagatgcaaaggtacaaaaggtgttgcagtgaa

SEQ ID NO: 688669 - DNA, 628 bp, Homo sapiens
ctttgcccggtccactcttgcctcagatgtctaaaaggccaactccytcctctcattcaggcctttggcatggatgccaccttctcagtaaggcctaccctgtccacccatttgtgaattgcacccttattctaaccttctggagccagctttatttcttttcttcacagcactcatctcccaacatgttatataacccttttgtaaaactacggtaaagtatatgtaacataaaatttaccataacctttaaaaaatgtttacgagcttcttctccgagaaaacaccaaatggcggatgacactggtgcagcgggggggcctggaggccctggtggccctgggatggggaactctggtgccttccgcggaggtttcggcagtggcatccggggccgggttcatggccgtggacggggcccgggccgaagctgcggagcttgctgaggcaaggccgaggataaggagtggatgcctgtcaccaagctgggccgcttggtgaaggacatgaagatcaagtccctgcaggagatctatctcttctctctgcccattaagggatctgagatcattgactttttcctgggggcctctctcaaggatgaggttttgaagattatgccagtgca

SEQ ID NO: 688670 - DNA, 617 bp, Homo sapiens
gagatggggtttcrccatttttgtcaggctggtctcaaactgcggacgctcgtgatccaactgctccagcctcccaagtgctgggattacaggcgtgagccaccgtgcctggcccaaggtttactctttttttttttttttaacttttgaaatagttttactcagacacaagctaaagtacttcacaagtcatgcaattagaacactcttaagtagagtgatgtttggagtaaggtgggaagaagtaaatggcgtgcataccttcgcttgtccagcttttgtgatggcaggaatattaaagtgctgtccagtgtaaaaatgcaccccactgaacaggatcactgcaattgagtctccttccttctcaattacttcaaggatatcctctattcttaaggtttcttccccctaaatcaagttaggcacaagttaggtcatatcgataataataaatttgtaatttcatattgccgatctaaatttcaccgtgagcccttttgcattataaaatagtttttttttttcagattaaggttctttaaaaatctggcataagagcagcatttgagcataatttttattattaagaaatgataattaaaaagtaaaaagtgttt

SEQ ID NO: 688671 - DNA, 576 bp, Homo sapiens
tggtagaggcaagaaaagagtacttgtttagaagtatgcccggtgagttctccaaaacaaagctttctccagggtaaaagacttaccagggccttctcccactgggggaaaggacatttctccaactccactgcccctcccagctttcctgtatctcttaagagtagggtagaagctaaaaaaaacacttgtgaaggccacaggccagggacacaggcacacaacagactgagatttaatcctgtaattacagaaagtaccccatcccctaacatacacrccttacaaccacaccaacaaggctctagtgtaacaacagctaaagaaactgcaaggttcacactctatcaaaggtgttctttgggaagcccaaatcaacagtaaggacaaaaataaggaaggacactagaggaatgggaaacctctggaacaggaagctacagcaaacattaagggaataaaacaccttgacttggttcctccttcttggaccttctcttttgaaaagtgaatttcccattaaaaaaaaggatggtgtctcatcctacctgatctatgtaaatcctctagagcaca

SEQ ID NO: 688672 - DNA, 679 bp, Homo sapiens
catacccttactctgttgccctcgctgagcagctgaccaagggcagcgttgctgatcacagacagatagatggccgagcgagtggaggaaagcctgtccaaccccagccccctctggacctcaagcggcctgtctagccctggagtgctgagagtcacagcatttaaacaccagggcagcaagttctggtgcaacggcctgaccccacgtagtccctggctcctctgtgagccatccccaggggataggcaactagcatctaagacccagggccctgctgtcccccttggtttaagctttgagtgagaggatgacaggaacaaacaccagggggagaaatgaggcagggaggacctgcctgccggtgcccagggagcgcccaggagaaggatcatagcccaggcccctctcagcccaagactttgtctactaaacaagctgggcctcctttgctcccctcaatcaaactcacmaatcaaaacatgctgaactaatatcccctaatagccaataatccatcaacaaaagttaagttgttgcttgaacaatcttccccctgagggagtgggtgtgtttaaaagtacttcataaattatctaaaaggaaatatgagtgtttctagttgttggaagagtcctaccaggacaggagagcatgcccagtgtccctgtgtgcctgt

SEQ ID NO: 688673 - DNA, 1015 bp, Homo sapiens
tggggtttttrttgtgtgtatatactagcattcctttggacacaaagtagactataaagaaaatttctaaattctgaatgcagtttctcattgattttaattattgctatgttccttttgaaaattttttggctggctctggcaacttatgcctgcagtcccacccagcacattttgaggccaaggcaagtggtttgcttgagcccagcagttcaagaccagcctgggtaacatggcgaaaccatgtctctacaaaaaatacaaaagatagggcttggtggcatgcatttgtagtcccagctactcaagaggctgaggctggagggatcgcttgagcccaggaagttgagactgtaatgagctatgattgtgccactgcaatccttggctgcaaagtgagatcctatctcttaaaaaaaaaaaaaattagaaaaagaataaaaaagtctaccctaaccattttatatttaaaacaagtttgttcttttcagtgtccttacttttaaaatagttgaactgatttttctgggaatctttctcaaatacaaccttaaacagaatatatggatgtgtttctgatgtcttagaattattctaatattaattatttggtgccatagacatattgtagttctcagaggctattcatatgtatgagaaatttttcttaattgaaattttccaaagattgctacactcaagagttttttgaattctgtttgtaagctacctaagagtagcaaataggtttcattctcacataccaattccaatcttttgaaacagagtgttgaggagagttctgagagcttttggacttaggaaggataactaagacaggatcagccaaaattgtctgtttgtttgggaaaaggggatagagtgatgggactggtacgcatttttgttctctagggttggtaagaggaatttgggtgtaatttgtgtacatcatgaaaacatgccaatgaaaccaaatggtctgagttcagatgcatttaatccctatattgtc

SEQ ID NO: 688674 - DNA, 1573 bp, Homo sapiens
taaatattagctaggtgtgatggggcacgcctgtagctctagttactcaggaggctggggcgggaggattgcttgagcctggaagttcaaggtcactgtgagctgtgattacaccactgcactccagcctggataagagaccccataactttaattaaaaaaaaatgggggactgggcacggtggctcatggctgtaatcccagcactttgggagggtgaggtgggaggatcacttgagtccaggagttcaagaccagcctgggcaacatagtgagaccccatctctatttcttaaattagtaaatacaaatacaaataaattgttttgttctgtgagttaccaggaatgtaaaaaagattaaaataaaataaattgttgcatacttttaatayagcgtagactgctctatttttctcctgtcataatgaaacactttgccagttcattggcccctctaaattctcctcaagataagtgtgactttgatttttttcaccaacatttattgaacatgggttaagagacgggtggtgttagagagtgcagataagtactacatttttaagcgactggtctcacagagccaggagtttgcctgggaaaacagttaaagtctaagggtttggctagaaaagaattagaacattaattaacattatggtaagtgctgggaaggaggacagggtactatgaaagggtaaaattggagaaccactttgctgataaggaaagaagcatagaagcagctcacagattaatgattgtttgtttaggtaatgtgtattgtgtaaaacaaatgtcaccttttaaaaaatattcagcttttattaagggcctgtattactcctgtctatctattatatataatattttaaatttcaacaacactttatgggttttatatatatatatatatatatatatatatatatatatttttttttttttttttttttttttgagatggagtcttgctctgtcacccaggctggagtacagtggcgctataacatctcactgtaacctaccttctagtcaagtgatgctcccacctcagcctctcaagtagctgggactgcaagctcacactactatgacctgctactttttctttttcttttcatagagatgtggtatccccgtgttgcccaggctggtcttgaacttctgctctccttggctcaagcaatcctcctgccttttcctcccaaagtgctgggattacaggtgtgagccacagagcctggccaacactttcaagttgatttttttaaattctcatttcacaaaaaaaaaaaaaaaaaaaagaaagaaaaaaaggaacagatgtagaaagactaagtaacacttatagaaggccataagcttaggacatatagtcatgtgctgcttaataacgttccagtcaaaaacagactgcacatactacagtggccccgtaaggttattttatcatatttttattttacctttttcatgtttagatacacaaatacttaccattgtgttacaatcacctatagcattcagtacagtaacatgcagttttctagcctaggagcactatgctc

SEQ ID NO: 688675 - DNA, 665 bp, Homo sapiens
ttttccctgaataattgagttataggcaatcttatttttcatctctatttagcaactttctctgattttctatagtaattatgaatgttgtaatttttaaaaaatttccaaaataaaaattaacttagaaaactaagaattcattactggtttatttgttcactatctactcaaaagataacaagcaaaggtattttattttacagctaagcttgaaataaattttgtaaattctttaaacacaatattgtttcacttgcacaacaacatcccttactttctctaataatcatccaaagttatcttcttccacatagtctgtggaaccatttataagaactcccagtcataattggaagggcaggcagtaataaaagcagacaaactccaagaaatcatgaaagatttgaaggaattatcccaggaagggaaaaacaaggaaggccttcaaggcaatcatcggtactgcagcractctctgtcattgttactaagggacatgataagaaaacacaaatgcagtctggtaatcccagaaatgagttcttggctgatcagtagtaaaccatcttgtttactagtaaaatgaatgcatacattctgtgtgtgatctgtgtgacctgtgaagcagagcttatcatttcttcctgaagcatcattccatc

SEQ ID NO: 688676 - DNA, 1817 bp, Homo sapiens
tgcaggtttgttacatctgtatacatgtgctgtgttggtttgctgcacccattaacttgtcatttacattaggtatttctcctaatgctctccctcccccagccccccaccccatgacaggccccagtgtgtgatgttcccctgcctgtgtccaagtattctcattgtttaatttccacctatgagtgagaatatgcagtgtttggttttctgaccttgcgatagtttaaacmaactaggaagttcagaagtcactttacaagagaaataaagaaaaataaagtattaatgacattggtaacagaataaaaattagagttagacaaagtattagcaagcaagcttatatatttataagagatgggaaaatattagaaaggaataaatcatgtcttgtcaacatgaagaaaaagtgtatttttttgttaacttattattgtgtttccttgtataattttcacttggttttgttggttttactacttgcttcattctttcaaaaactacatcttcatagaccatttcagcttttgctatgtaggcagaattataaaacccaatttcaaaatttcaactgaacgttgtcagcatttttctttgggctttttattgaaaaaaaaaaacctaagtaattgtgtgtgtgtgtattttagtattaccatgaatgtaataacaataaagtcaaacaaaaacaaatggatatgcaatatgttggactagcatctcaaatatgaaaaaggcattgccaacagtgatataattttttttcataacggtaagctttttaaagtataatcttattttaacctaaaatcttactatcagaaaatgcagtgtacattaaaatgttctgaaatgctttattcacatttattaaatggttgtactcactcagatatctacaaattggtttttcacttatgtaattatcttatagaatgttcaaaagtcatgcagaatgtgagataattttctattgaatatgattgttttatcattgcaagacatcaaacatccctgtttcctgccaaatgaatgtacaatagcaataaatgtaaagatgtgttttttggaaaagacacatttttgagttataaaacaaggattttaaaacttgaattgttacagtgagtatgtcttaatataggctacagtcactttagataaaaaattacctcacatctattttcaatattacttaaagatgttcatttagtggcaaatattttttttttgcctagaggcagatattttgccacatggctatttatgaaactgtatttaaatgcatgtacacatataaaagctgccactgtggctgtaaactattacaagttatcaagattaaaaaataaacaaaaaatatttcagtttttctatgaaatgtctttactcgagtccaaatttagaggtttaaaatgcttcaaattaataaaaccaagtgtttcacatatttcagttggagtggcgtttgtcctagttttattagtgaagcagcagactgcattttttcactctcatacaccttcaaaagatggacagaaaaatttgataaaacttctagggcattatctgatgaaacacattaaacactaaaggagatatacaacttcattgcttgtaaaagacatataagaaggaaacctacatacatatatctatcagttttgtattttcaggaaatatttgccttaaagtgagcttcataacagtatgtgttctccaacaaagccaaggaaagtaagtttgacacaaggatctggaagtctacctgtgtggcataattacattgaatacattccacaaataaggcagaa

SEQ ID NO: 688677 - DNA, 1817 bp, Homo sapiens
tgcaggtttgttacatctgtatacatgtgctgtgttggtttgctgcacccattaacttgtcatttacattaggtatttctcctaatgctctccctcccccagccccccaccccatgacaggccccagtgtgtgatgttcccctgcctgtgtccaagtattctcattgtttaatttccacctatgagtgagaatatgcagtgtttggttttctgaccttgcgatagtttaaacaaactaggaagttcagaagtcactttacaagagaaataaagaaaaataaagtattaatgacattggtaacagaataaaaattagagttagacaaagtattagcaagcaagcttatatatttataagagatgggaaaatattagaaaggaataaatcatgtcttgtcaacatgaagaaaaagtgtatttttttgttaacttattattgtgtttccttgtataattttcacttggttttgttggttttactacttgcttcattctttcaaaaactacatcttcatagaccatttcagcttttgctatgtaggcagaattataaaacccaatttcaaaatttcaactgaacgttgtcagcatttttctttgggctttttattgaaaaaaaaaaacctaagtaattgtgtgtgtgtgtattttagtattaccatgaatgtaataacaataaagtcaaacaaaaacaaatggatatgcaatatgttggactagcatctcaaatatgaaaaaggcattgccaacagtgatataattttttttcataacggtaagctttttaaagtataatcttattttaacctaaaatcttactatcagaaaaygcagtgtacattaaaatgttctgaaatgctttattcacatttattaaatggttgtactcactcagatatctacaaattggtttttcacttatgtaattatcttatagaatgttcaaaagtcatgcagaatgtgagataattttctattgaatatgattgttttatcattgcaagacatcaaacatccctgtttcctgccaaatgaatgtacaatagcaataaatgtaaagatgtgttttttggaaaagacacatttttgagttataaaacaaggattttaaaacttgaattgttacagtgagtatgtcttaatataggctacagtcactttagataaaaaattacctcacatctattttcaatattacttaaagatgttcatttagtggcaaatattttttttttgcctagaggcagatattttgccacatggctatttatgaaactgtatttaaatgcatgtacacatataaaagctgccactgtggctgtaaactattacaagttatcaagattaaaaaataaacaaaaaatatttcagtttttctatgaaatgtctttactcgagtccaaatttagaggtttaaaatgcttcaaattaataaaaccaagtgtttcacatatttcagttggagtggcgtttgtcctagttttattagtgaagcagcagactgcattttttcactctcatacaccttcaaaagatggacagaaaaatttgataaaacttctagggcattatctgatgaaacacattaaacactaaaggagatatacaacttcattgcttgtaaaagacatataagaaggaaacctacatacatatatctatcagttttgtattttcaggaaatatttgccttaaagtgagcttcataacagtatgtgttctccaacaaagccaaggaaagtaagtttgacacaaggatctggaagtctacctgtgtggcataattacattgaatacattccacaaataaggcagaa

SEQ ID NO: 688678 - DNA, 611 bp, Homo sapiens
agggatgggctgctcagcaacacgtccctcctccaccctcagaggcaccaaatgccaacaagaaccgtcctatctgacagcaggaagacagagactgcaggtggctatggggcagattcccagtgggaaggcaccactcatagctaacaagtagattataccagactgaagccagtatccctgggaggctataatgggtcctgacacgttctctggactgggctttgcatagtcattagattcaaatcccaaaaatactataaaagaactggaacagatgataagacatcaacttggaccaccaagttttatttcttcaggccaaagaacacatttatggcccacagtgtcctataatggacataccatgttgcatattgtcttcatctcctagggctgccataacaaagtgccacaaaccatatggctgacttacaaaacaaaatgcactgtctcacagttctggagactagaagtctgagatcaagttcttggcagggytggatccttctgagggctgtgaggaagaatctaatccacacttctctcctagcttctggtggtttgctggcaatctttggcatccctgggcttgtagaattctgccttca

SEQ ID NO: 688679 - DNA, 1641 bp, Homo sapiens
gatctaccagcagctctttaaaattgccgagggtgtgttacagccgatgatagtttctgccatgttggaaaatgacagcattcagggtctatctggtgtgaagcccactggctcccagaagcactcctccagcatggcagatggggataactcataccgcctggaagctatcatccgccagatgaatgcctttcatacagtcatgtgtgaccagggcttggaccctgagatcatcctgcaggtattcaaacagctcttctacatgatcaacgcagtgactcttaatgacctgctcctgcggaaggacgtctgctcttggagcacaggcatgcaactcaggtacaatataagtcagcttgaggagtggctttggggaagaaaccttcaccagagtggagtagttcagaccatggaacctctgatccaagcagcccagctcctgcaattaaagaagaaaacccaggaggatgcagaggccatctgctccctgtgtgcctctctcagcacccagcagattgtcaaaattttaaacctttagcctcccctgaatgaatttgaagaacaggtaacagtggcctttatacaaatgatccaggcacaactacaagagcagaatggccctcagcaactgctattagatgccaagcaaatgtttcctgttttgtttccatttcatccatcttccctaaccatggagtcaatcccagcatgtctcaatctggagttcctcaatgaagtagacgcatgtttagtctgattcccaatgtgagcaaaaaggaagtatagacagtaaagtaaattcaaggatctgttaaatctggtaaaagtagatcaaatcagagattgacagcctgtggagggtgcctgaactatacagaattaacacaactatggcgttattttttgtacatactgctcagaataaaaacacttgaaatgtggaagattttaagtttgatttcagtccaacaaatatacataataatttatagacaccaagcagtccccatagccatataaaagatgccaattctataaaatgaagctgccgagttttaatctttgcatataactggagaatgtccaaattaaaatactaactatatataagtcgcataaattgccttcaaagggcttttaacaaataatagtactaataaccatgataatgacatatactgacacttcccaaagtttgcaaaccataggtgtggtagagtttgtggtgagatgtgttaagaacaaaaatatggggatgagacttctgagaaatgtccccaaaatattctttaatggctgattatacaaagacagcagtgtaactgayctccaaaccagacattttgagtactggtttctgaagcaaaattagaagtcccagtcctcagtgtcctcaaacgcttttgtgtaatcttggtttaatggaagagatgattaaaatgctgctatctgaaattccaagtgagaaagatggaaaaataatttgtgtctgatgctagtccatacactttccaagtcccacaaaactctcacaaaaatgtatataagctaaatattacaaaatgataacaacttgttttatttatagatgtaaaaaacaatgtgaaagcttttaatctcttaataccattaagcctccag

SEQ ID NO: 688680 - DNA, 604 bp, Homo sapiens
ctttctggactctcaattttatccaactgatctatatacacatccttattccagtattacactgtcttaattactgtagtgaggtgataagtttgaaattaaggaagtatgtgttctccaattttgttctgtttttcagtattgtattggctattctgtgttccttgmatatgaatcaatttctgggggaaaaaagatggaattttcataggaattacattaaatatgtaaatcagctttgggaatatttctgccttaacaagattaagtcttcagcccatgagcacagaatgtcttttcttttacttgggtcttaattaatttctttcaataatgtttttgtcatttcaatgtagaaataaatatacaatctccaatgattttttgtcatttcaatgtacaaataaatatataatctctgatattacagtttatttcatatagtttgtcaatttagatcatctttttgaactgttagtgtctgttgtgaaatgtgattcttttatataaaataattactattttcatcagatttttgcagactaaatatttattttatgtgccatcacttttgttctgaatcaatcaatacacaaattgagtg

SEQ ID NO: 688681 - DNA, 568 bp, Homo sapiens
tggatatgtctgtaagggtgttgccaaaggagattaacatttgagtcagtggactggaaaaggcagacctaccctcagtctcggtgggcaccatctcatcagctgccagcacagccagaataaaagcaggcagaggaatgtggaaaaactagactagcttagtcttccagcctccatctttctcctgtactggacgcttcctgtcctcgaatatcaaattccaagttcttcagcttttggactcttgggcctttcaccacagactgaaggctgcactatckgcttccctacttttgaggtttggggactcagactagctccctggctcttcaacttgcagatgacctattgtgggaattcaccttgtgatcctatgagtcagttctcgtaataaactccccttgataaatacatatagcttcatatataaatatatatatatatcctattagttctctcctgctagagaaccctaatacattaatagtataaacctatatagaaaatactaattctattaaatgggaaaatttaatatattggtcaaacagaatgacttgtagaataa

SEQ ID NO: 688682 - DNA, 2750 bp, Homo sapiens
gaactcagatctttgcaaactccatctcttgggttcaagcaattctcctgcctcagcctcccgagtagctgggattacaggtgcccatcatcacacctggctaatttttgtatttttttaatagagacggggtttcaccctgttggctaggttggtctcaaactcctgacctcaggtgatctgcccgccttggcctcccaaagtgctgggattgcaggagtgagccaccacacccrgccaattattattattttttaatggccaaatgttcactagcaataaacagaaaaaaagaaaaaaacaaagggggtgaaaaacgtgactgtaaatcttgaaaagtgactgccaaggaaagaagctaaacattcaaagtgtgctactgcttgatcttactcatgatgctgcccacttgaaatgttcctgggaaagaagttgaatctgtaaaacacaacagattttattgatatccattttccagtttcggggaagctgacttacggtatgcaaaggcaaaagttaagaaaaatcttttcctagatttaaacacctacgtgcccctgcagaaactacctcaccgagagaggagtatcttccaagaatttgtggtattagagaaatgaaccaaagtttatggatatgggatgtgctttttatagatacagaatccaagaaatggttaaagaaaaacattctgagttgtttaacatttttttcttccttggaatgacagagaaagcaacaaacaaaatccctgaaaccgcacagcagaagatcaaatagaataccagaaaagttgagatttaaggcagttaatatcaagacacagtatttgatttataaactcagtaataaagggaaatttatcaggaggtcatgaatttacctgcaatttacttgcatgcatgaaaaaaaaatggttggactcatagtattctatttacagaagcaatgtctgccaaattcttacaaagtgtgactcaaacatttgctagttgaatgatggttgccaggggctgaggagtggaggaaatggagagatgttggtcaaagggcgcacttttgttttaaggtgcataagctaggcggaatctaatgtaactatagttaataatattacttggtatttgatgagagccaactttaagtatcctaaacacacacacacgcgcgcacacacacatacacatgtggtaactatgggtggtgacagttgtgtcaatttgagtatagtaatcagtacacaatgtatgccaatatcaaatcagtaccttggaaaccttgaatatatgcaatttttatttgtcaattaaatattttaaaattaaagaacgacagcatcaaaaatgagaaacttggtagttatattgctgctgaaatataaacatgaaagaacttgaagtataagacttccataattatacttgaaaatatccctcagtgatagaatccagcaaactgagaaaaaaaaatcaatagaacttagatgtagagaaatggtaaaaggctgatattgagcacaaatttgattttattataacaataagagtaaattactgaaagaatagaaagtaaatggtataacccaagtaagtgaaatatactataaccaaccaaagttaggatgtgagagaagaggaggtaggaggaagtttgagaatatataatctctttatcatagggaactccatattgcataaattgaagtgtgtgtttgaaataatatataaatattatgtctcagttttatgatggttttcctattttcttttccttacctcagagggatctaatacaaactaacattaacatcttaatgtgacagaaaatgtattgacaattatttgatatttagaattccctttagtatgatttcactttttgccatataatttagctaaaattaaattaaatctttaaagtgctttgtttttctcatgcgtgtgcatttgtcaaacaaaattgatttgcagaattgtctgaactctgaatgttgacatgtagtacttttctaagtcagtatatttgctgatgcttatgttattaaactgctacaataacaaaattcatataaacaaactaattggtgaatgtatttgtgcagagttaagacttgcttgttaacataatatatccgtattgattttctttttctaaggtcaaggtttctcaggtgattacagtgaatatttcggactacaagtagatgaagatgccttgacttacctcatgttggcaaatcatttggttcacacgctgtgtcccgattctataacaatagctgaggtaaagccatagtgaagtcttaccttctgaccccctttaatagagagtattttgtcagcatacagtatttgattaatcaatctcatgttgtcaataattgcgtaaatgaaattctaccctgagtatagtgcagctatcttgtatgggtggcacattatttagaattcactgtttccctattagaagataatgtatactaattacttgtcaccattctgttgttaaaaaagaaaatgccagtggttggagagttaaatgtcctaatcagtggacaggcccttcgctatgagaccttcagcagagaaaagaattgaatattaatgtgtgtctgtccatttattattatttttttcttttttggctcaatcattaaagataggatggattgctgcctgcaagcttctctgaagcctttcttgttctgatgtgattacctttcttgtttatgttattgctctcagattgcc

SEQ ID NO: 688683 - DNA, 992 bp, Homo sapiens
ctttcccctcttcatggaatatcttgtcctctttttctgtttttaaaactcctattcatcgtccaagctttggctaaatataaccttcactgtgaagctgtccctgcctttttcaggaaaagctgtttccgtttgcttctgtgttcctgctacaagtcaggtagcctggtgtagtgatgtcagaaaawccaagttttttttttttttttttttttttatagactctcacctagaaaacggaaacagactcttaaacttgcttatgatctctcaatttccatccccgtccctacttaaagacagactcctgccagaaggatgtttctaaaatacatccttgatcaggctgcatttccataagcatgatctcaatattttttgtgaaaataacacccacagagttttatggtacatccaaggcttttgatgaagttagagtttagagaagttgagcaatttgaccaaggtaagagagctaataaatggcagagagaagatttgagctcagacttgtttgagtctaaaggtggtgacccaccctgctccttccaaccacatggcgggacctactttcttgctgcttccccctgaactggcaatgcatggggtaattttggagaaaaaagttatataagcaacgtaacatatttcagatgcacaatatgtctttgcagcctgagattattttaaaccaactatgggaatgtgtattagtgaacacatatttgagctgacagatgggcgtgggcacctttgtcactcataaatagagcactttgaccagttgtggaggaaactcaagtgctggaacgtacaactcatacttatttccggcctatacaaccttttctgagcccctaagagtttctctctctctctctctcacacacacacacacacacacaccccacacacgtgccattagcaagtttgcttatttgtgtaagaaggattaatataaaataattgttaaaattcaggcacaaagcgac

SEQ ID NO: 688684 - DNA, 664 bp, Homo sapiens
cacattctccgttttatcatgtcttaggatctgcaaccaggcttcatggactagctgtcctttgtttcgtaactacaatcataagcttcaggactcaaattatatgtcatttcttttaaattcaagtcctgctgttttatgaaattgaaacatcctcatttcatttttttacttgtatagttctaatcacaaatttaatcaagcaattactttttcttatttaaaatatatctgttcccacttaacatatgtgctgtgtcaggactaccctgttctcaggtctcactgcagtttgtcttgtgtagagttaagtattcagtaagtagttactgagcgaatgactgggtgaataaattgatgtttaaaaacacttctctttctattactagatgtgattttcattcagatttttttycgtttgtcttcagaggaattgcaaattctttatagcaaagaacatccaagaagcttcttgaaagtgccaaataatgagtgttcttcgatagcattcagggatcttgatggcttctttgggcagacaaggactttgggacacaataattccctgaggctcactctctagggaaaggaaaaggaggtctgggaagcaggacattaacaaaggagggggaaccagtgggcccgcaacacagggtccctcaca

SEQ ID NO: 688685 - DNA, 1348 bp, Homo sapiens
atgggcacaagcatgctgggatctcagcaatgagaaccaggtgaagagctggcatttatttgaagaattcagggaactattaacacagcctctctgtaggagaaactctttgtgttcatcaatgcatcatgggccctgggtttgtttatctatccatgcagcattgatggagaaactgtggtaccaaaaggcaggaggaactgatggttaagagtgtagtctctggagcacactgcctagaaccttgtttatctctacctcaccttagtaatagcaccttgggcattttccttaacctctctgagctgtattttcctcctctgtaaaatgatgataaaaaagaatatttatgtgcmttgaatgagttaatgtatactgcttttaagcattcaatgaagattagtaactactgttaaccaatctgaagccagtcactgatgagggtactgaagaaaaaaaaatcaagtgtgtgaatattgacagtaaaatgtagtaaggtagcagaaaacaacagccccattcatccaaaaacctttcaatttatcactggattgcagagagtgtctgggcacataaaaaaaaaatgattctggtcctcccatttgctctccccttccccatcatttattactatatgaccttggagtcctatagcatatatgttttgatatatttttcccatttaaaattaggaggtatatagtttcatgtcattgaccttttctttcttgtggattcaagatcaacagatgcacagaaattagttataagccttgatatattactccctcttcattggtccattcaaggccgtctttactccattctttattaataataaacactattagacttaataccctatgtaaaaacttaaatccctttctgtgatcctctttcatcgtcttttcctcttttcctgacccagaataactgctattctgaattgtgtgttcatcatgcccttgctttgaattttaaattatttcatcacatccatatgtactgtattcaaaaaagtatatttgagtatttggttgtctttctaacattatttttgaaagatctcatactgtatgcaatgttttaggtactcccatcttattaaaattatgtttttatggtaggtagccaggcagacatgagtggggcaggagagggccccctcacctcctaccaggaatgtcaggaagccatcaggtggttgttaaattgcctccctaaaatagtaattggtcacagccagcgcaagggaaaaacagtctcccaatagataaaaacatcttaagttagtgttcagcagcttcccagtaagatcttaggggttaggtgactgcgtattcaagca

SEQ ID NO: 688686 - DNA, 590 bp, Homo sapiens
gtaagaaacctatgctccagaggatggaaaatatgccaaaaaatgtttacagactacatgtgtctgtacatttttaggggttgaatagttaggacaattgtaatgtcgtgagatcatgagaacataagatcatgatcacaagaccatgctttggaaacatggcctccaaagtaaaagataagttaccatgtctcaaacctcccacaatgaagaagaaatctctgtgcctggtgggactctttgggttctggaaggaacatggtccattgctagaaatgttgccttggtccatcttctgggtaacacagaggctgccggtgctgttggggcctagagaaggaaagggctctgcaggaggtccagctgctatggaagcaatactggagttcgggccatattggggaccagtatggaccatatgatctggcatacactatggtgttggagatttcagtggtggaaaaaaaaatgtcattaggaatttttggcaagattcaatgagaaaatatatatatatacatatatatatatgtatatatatatatatacatatatatatatatayacatatatatatatatatatatata

SEQ ID NO: 688687 - DNA, 590 bp, Homo sapiens
gtaagaaacctatgctccagaggatggaaaatatgccaaaaaatgtttacagactacatgtgtctgtacatttttaggggttgaatagttaggacaattgtaatgtcgtgagatcatgagaacataagatcatgatcacaagaccatgctttggaaacatggcctccaaagtaaaagataagttaccatgtctcaaacctcccacaatgaagaagaaatctctgtgcctggtgggactctttgggttctggaaggaacatggtccattgctagaaatgttgccttggtccatcttctgggtaacacagaggctgccggtgctgttggggcctagagaaggaaagggctctgcaggaggtccagctgctatggaagcaatactggagttcgggccatattggggaccagtatggaccatatgatctggcatacactatggtgttggagatttcagtggtggaaaaaaaaatgtcattaggaatttttggcaagattcaatgagaaaatatatatatatacatatatatatatgtatatatatatatatacatatatatatatatatayatatatatatatatatatatata

SEQ ID NO: 688688 - DNA, 590 bp, Homo sapiens
gtaagaaacctatgctccagaggatggaaaatatgccaaaaaatgtttacagactacatgtgtctgtacatttttaggggttgaatagttaggacaattgtaatgtcgtgagatcatgagaacataagatcatgatcacaagaccatgctttggaaacatggcctccaaagtaaaagataagttaccatgtctcaaacctcccacaatgaagaagaaatctctgtgcctggtgggactctttgggttctggaaggaacatggtccattgctagaaatgttgccttggtccatcttctgggtaacacagaggctgccggtgctgttggggcctagagaaggaaagggctctgcaggaggtccagctgctatggaagcaatactggagttcgggccatattggggaccagtatggaccatatgatctggcatacactatggtgttggagatttcagtggtggaaaaaaaaatgtcattaggaatttttggcaagattcaatgagaaaatatatatatatacatatatatatatgtatatatatatatatacatatatatatatatatacatatatatrtatatatatatata

SEQ ID NO: 688689 - DNA, 1543 bp, Homo sapiens
caattctaatcatttcctctctggattcttgctgtggccacgtgatgcattttcattcctctaagactcccccttttctcccctacccccaccccaatccagccgtcttgaatgtgaagccaatgctgactccaagaagcacggctttcagaaaagctacctccagcccactgcacccagcctgagggcctctggtgattcacaggccttaaccctgtcaggagccccacccaacctcatttccttatcctctcaccccrgcaggatactctcctcctgcctcttgatcctaccgtctaaccgctctctgtgccgattcctgcttcctatcagagctaagcaagtgcagaatccaaggccctaaggagctaatacctcagggctgctgctttctcttactaggaaactctcactttgggttttctttgtgttcatcaaaagagaacagttctcatttgcaggactaagagaattcctcttgcctaagggtgggacagggagattgaagggtcactaaaagttttacatatttagtcaaagctaatatacccacccccaggctacagtcagcagataggtcagtttctcagggggctggatagggttcaaagttgcagaccagtgtaacagcaaccaccacttacagctgtgctccagaactctgggtattatttaatcttcacggtaaccctaccaaactaggtgctgttatcactgccactttatagacagaaaagtgaggcattaagggttaagtactctgactcaaagtcttacaattgggaagggaaaaggcagcagttaaggaccatcccagctgtgttccagtgaggtcacttacaaggaagggagggaatttggttcacacagccttaagatgcgaggccccagcacacaaggttatactgatgtgtgctcagggatggagacagaatttgaatctcctcctgtgggactctctaggcctccatttccttatctgaaaaacaagaatgattagccccacccagaagagttattgggaggatttaaattagatgatgtacgttcaattacaaagcaaaatgcctggcacacagaaggtgctgcttcaaactgaaaatagacgggtctggtgcggtggctcacacctgtaatcccagcattttgggaggccgaggtaggcagatcacccgaggtcaggagttcaagactagcctggccaacatgatgaaaccttgtctctcaaacaaatacaaaaattagccaggcatggtgatgcacatctgtagtcccagctacttgggaggctgaggtgggaggactgcttgagcctgggaggtggcagttgcagtgagttgcgatcacaccattgcattctatcctgggcgatagagccagaccttgtctcaaaaaaaaaaaaattaaaaaaattaaaaaaaataaaaaaaaaatagggaaggggcagaagatcaagacagagagaagcaggcagggggaagcaactacctgcccctgtggagtacagggaaagtgttactgacccaccatgcaacaaagccca

SEQ ID NO: 688690 - DNA, 1033 bp, Homo sapiens
aggcagggagagaaaatgatgccacccatactccctttttcaaattacaggtttccacttgcagcaggccgcggttgtagaaaggtcaaagaagatttatctacaaattgagatgaaaggattgaacagtattttggaccgggtgctctcaattcagaattgaggctttatttgtgacttagtgtgaacataggactttctgctttttaagagtaagctgagaaatcaagggacctgccctttttaacacccaatggaaagtgaactacactcactcataggtactgaagagaatgaaattggaattgcttttatgaatattccatgtgattctttcttgttccaagtaattttttttatcatttaaagtcaaactctaaaaatgtgaaatttggaatcttgatctgaaaaggagtaatattttagtaaatgtaatggttagatttagaagacacagaagaattgaaatatccaaaacactctctaaaattccattatatcacctttgcctccataaactgtcccccatctcttggttgaggaagataacatgtccctttttgtcacaatggttgcttgactgggaatcagcatccaaattcaacatgacctggtggggagagatactgaagtacggagcaaaaatagttaaaagaagcattcaagcaaagctatttgagggattttgctaaaaaacattgtaaaattttggcaaataatcatgaaaacagattgtgaaaatgccggacaaaggaaggtgtaatgtatttctaaaccagactgattattttacatgtattaatttagtagaagctatgtattcagtgtgctagttggttagccggttgaaattttaatggttttctagytgactagtgcaaacttgaatgtcattatgttaagcactttaaatcatattgacatggtatagaaggtagttaaattctttaagaataagaatgctgtgtgactcacatagccactctcacacccaaagagtcttgcttcaccaaagccttgagaaagacatagg

SEQ ID NO: 688691 - DNA, 364 bp, Homo sapiens
tataaattgtaaaaacagtgatgcaaatgttttgtgcccataaatgtgcaattgaattctttcctttgaagcaacaaatgatttcttgaccttcccccgctagtgaaaaatctaattgtgtatctagtcataaatttatttaaccagttctgtttgaatatatacrtgtgatactttgaaatctcttttcaaactactgtgacatcatttaggtttccttattaatgaatgaattaaataaaatctttgacattattttatatttgtatttaattcatgattttacctgtttaaaaaatgcttccttcaacacctgtgttggttggtgctgaatttgaacctcagtctgatgttaagacaaaga

SEQ ID NO: 688692 - DNA, 364 bp, Homo sapiens
tataaattgtaaaaacagtgatgcaaatgttttgtgcccataaatgtgcaattgaattctttcctttgaagcaacaaatgatttcttgaccttcccccgctagtgaaaaatctaattgtgtatctagtcataaatttatttaaccagttctgtttgaatatatacgtgtgatactttgaaatctcttttcaaactactgtgacatcatttaggtttccttattaatgaatgaattaaataaaatctttgacattattttatatttgtatttaattcatgattttacctgtttawaaaatgcttccttcaacacctgtgttggttggtgctgaatttgaacctcagtctgatgttaagacaaaga

SEQ ID NO: 688693 - DNA, 742 bp, Homo sapiens
cccaccaacagtgtaaaagcgttcttatttatccatagcctcaccagcatctactgtttcctgactttttaataattgccattctgactggtatgagatggtatctcactgtggttttgatttgcatttctctgataatcagtgatgctgagctttttttccacatttttttggccatataaatgtctacctttgagaagtgtctgttcatatcttttgtccaatttttgatgaggttgtcattttcttgtaaatatgtttaagttgcttgtaaatcctggatattaatcctttgtcaggtgtgtagactgcaaaaactttctcccattctgtaggttgcctgttcactctcatgatagtttctattgctgtacagaagctcttttaattagatcccatttgtcaattttggcttttgttgcaactgcttttggcatttttgtcatgaaatctttgcccaaacccctacttttaactattgacaactaactactggattgatttttcccctaatggttttattstttccaatttgttttgtgaatggaattatatagtacaaaatatgtctgatcacagaatttctctccttaaaccattttaatggctttttactgaataaaacaataattttctcatgaggacttatggaccctgctgttgtaggtagaattattaatatatccccaaagctaagctaaagcactaacctctggaatttgtgcatatgatcgtctgtgga

SEQ ID NO: 688694 - DNA, 597 bp, Homo sapiens
aaacatttctcataaagagcaaacttttgaactttttgtacttgtttttctctcagaaatatcagcagattcatccacttyggtacaaaatgattggaaaagcccattttttttttaatggaaaaactacttttcaagaactatgattttgtgtgcccccccagggaacttggagttgaaagccaaaaatgaaggaaattttcaaactcagggaaaactttggcagtcagccctactgagaataagaacaagttccttcacagctctgtgtgctaagaaataaggcagaattcaggagctgccatgcctaccattctggagaggctggagtttcttcagctcactattatccctggtgtgaaagcagaaaagaggtggcatgaactatggagttgctggaaaaagactatctgtcatgttaccaaaggaaaacaaaagtcaaaccaataataaaacaaacaggagaactaaagtcctgttgaaaattcacatcaaatgtgaaagaatccccaggattctagagtttcactttagtttattttgggagaagggacaattccattaagaaaaccaactgaatacctcatttccttttca

SEQ ID NO: 688695 - DNA, 597 bp, Homo sapiens
aaacatttctcataaagagcaaacttttgaactttttgtacttgtttttctctcagaaatatcagcagattcatccacttcggtacaaaatgattggaaaagcccattttttttttaatggaaaaactacttttcaagaactatgattttgtgtgcccccccagggaacttggagttgaaagccaaaaatgaaggaaattttcaaactcagggaaaactttggcagtcagccctactgagaataagaacaagttccttcacagctctgtgtgctaagaaataaggcagaattcaggagctgccatgcctaccattctggagaggctggagtttcttcagctcactattatccctggtgtgaaagcagaaaagaggtggcatgaactatggagttgctggaaaaagactatctgtcatgttaccaaaggaaaacaaaagtcaaaccaataataaaacaaacaggagaactaaagtcctgttgaaaattcacatcaaatgtgaragaatccccaggattctagagtttcactttagtttattttgggagaagggacaattccattaagaaaaccaactgaatacctcatttccttttca

SEQ ID NO: 688696 - DNA, 1723 bp, Homo sapiens
tttactctggacaaatatgcataaaaacaaacattcatagaagacttgtacaataatttttataacacctttattcrttataactcaatattggtaacagcctggtaaccttcaatagcaaaatggataaacaaactctgatatgtaattgagtactactcacgaataaaattactaatgcattcaacaacgtgagtgaatctcaaaaatattttgctgggtgaatgaagccttacacaaaagataaaatactgtataattccatttatatgaaattctaaaacaggagacacttagacagggtgaaacaatttaggatattgtttgtctttgggaaagggtatgatggtaatatttcatgtcttgataggtgtttgggttacccaggtgcaaacatttgtcaatactaactgaatgtacacttaattatatattgcatgcaaatcttacattaaaaactgtaaacaaatattgaactcaagttaatattatgcatcccgaattagggagaaaagtgttcacatctgcaattaattttgaaatgtactgaaactcagatggattagtgaatagagggatagtagatatacatatatctaataaatcaagtaaataaaatattaatggcagaatctaggtggtggttatatagtacttatacattttttcaattatggtatgtgttttaatgttttcattaaaaattttgggaaaaaaactctttttggtcttttgaatcttatcaaattatagctccaaacaagaatattagttcaacttcagaaatatttagaaaagaaataaaattgaatattgtaagcaattccaactggtttactcaccctttacagacagtttttggtgttattctgtttcctgtccatattcatttcattgatagtttgtagcgtttgccaaaacctcctcttgaaattcttactgcatgcttcttttccttcctcttacttcatgtcattccttatttcctttgctgtctcctcttccttctcatctcattaaaaacagttttttcctcaaggttctgccattagctttctttatttactccattaatatttctcaaaattggccttagaatcacggtgactactttttaaaagttcagtctcattgcccctccaggcagcttctgaattagattctctgggagtcagatcctggaatctatatggttaacaaactcgacaggtgatcttcatataccttgttaacagctactgctgcacaagcttgcccttggcaagcccatcaacgtgcatggctgcacctgccctgtctgggtctgctgtttcatttggatgattactttgttctctgcctctgtttccacgttgatccttttgtttggccctttgtttttgtttttgtttaaccatgagattaacatcctcaaatagtgctttaatggtgttacccaccttcacagctcctgcttgagttgactaagaaatgaatttaacactccccatttgaagcaccacctgactggcccaaatctatttctatagttgtaaatgcttcagtttcctttccttttatactctatatttcagaaacattcagccactggcttttcccatatgtgtgccttgcacatttgtgattagttcccaaaggaggaagtttggttttatccattcagaatagctatagtttttcaacttgcaataacgaaatagtttctatctagaaaacaatgtca

SEQ ID NO: 688697 - DNA, 617 bp, Homo sapiens
ttttgatgggggtggctggaagtctggacttaacttgagtacctacatgtgacctctccggcataactgcctcagggagttggaattcttacaaagcacattaggacttccggtgaatgtattccaaggaaccaaagcagaagctcctaagcttattctgacctgggcttggaagacctacaatgtattccttctgccacattctactagctatgagtgagtcacaggacctgaaggccaagggcgagggggtgaagagaaacaaggaagtttggttcattgggggacaatctttggacacttgatatatggtacaaaattagtatgttacttgaagactaataagaagcattgcaatgtcaccattctttatccaaccaacaaattagcatggcctacttttagctattatgggcattctctgtgttgtgtaatcacgggtaaattatttcaactttctgtaattcatttttgtcatttgttaagtgtggttgataatacctaygtcataaatttgttgggagattataaagtgtttagttgagtgtctagcacagagtacatgtgaggcataaaatataaatatgcaatattattcatcattattcctataggaa

SEQ ID NO: 688698 - DNA, 695 bp, Homo sapiens
ttttttttttttttgagacggagtctcgctatgtcacccaggctggagtgcagtggcgcgatctcagcttactgcaagttccgcctcccaggttcacgccattctcccgcctcagcctcctgagtagctgggactacaggcgcatgccaccacacccggctaattttttgtattttttagtaaagacgggtttcaccatgttagccaggatgttctcgatctcctgacctcgtgatccacccgcctcggcctcccaaagtgctgggattacaggcgtgagccactgtgcccggcgcccggctaatttttgtgtttttagtagagatggggttttcaccaygttggccagcctggtctccaactcctgctgtcaagtgatccacccatcttggcctcccaaagtgccaggattacaggagtgagccactgcacccagcccctatcccattttcactgctaaatgatttttagaaattgtctaatggtttttgtatggtattgactttggttaagtgcacgtgtacctctatattcctttccttcagcaatggaaaaaaagtacttaaagcacttcaaagattagtcatgtaaatttcaggcttttctctggtagcccattctcactgtgaggaggtgcattctgcctctggggggtagacttctctgagaggggagaacagtgctgcaggtagtta

SEQ ID NO: 688699 - DNA, 637 bp, Homo sapiens
tccagaaaagtgcctgcgtgcatatacatgcaaaagtgtgcaagcatttatggactgactgtgctatctatggccccacctctagagcgagtattagtagtcatcaccattgcttcttattaacaataggacacagacaaaatatagtgtgatattgagagagggaaatggtttctaaaaagatagtctagttggcattctggggtttcctgaggagacccttgctaacttagtgagaggagtacccaaaagaccagatatattttatcttgtatgacagtaatcataaaatgtgycagagacattttgtcttgatttttacttttgtgtgatagtaatctttaaaagtataaatatagtataatagtttttatttatttttttccattaaaatatatttttccattaaaatatatttccattataatatatattagtatattatactttaaattttggtttacaaactctaagttaaagaattttgcttaggaaaatattaaaaattttcttctaaatatagaattctggaaggaaagacactcattaccctctctacatgtccaggtcttttaaaggcgttctgacagaggaattctataaaataaacaattgcttgtaactaaggcctttccag

SEQ ID NO: 688700 - DNA, 634 bp, Homo sapiens
ttcactaccacaagaacagtatgggggaaaccacccccatattcagttatttcccaccaggtccctcccacagcacatgagaattatgggagctacaattcaagatgagatttgggtggggacactgccaaacctcataaacaataatagcaaatagacataatactctgtcccaggcactattctagggccttgatgtaaattaactcatttgatccttacaaccaccctctgaggratgcagtattttttcccatttttcagatgagtaaacttaagcttagagaaagtgacttggccacagtgcagagccatcattttgagaagcaggtattcatgttgaaggaggctgaatccaggggttttgcttttaatttcttggctctgtttagaactttggaaattcaagctggctaactctatcgtattgccaaggaatagtctacttatctataagcagggacattgctcattattgtacattctttcatctcagagcaacagcaaggcaacttgtgattgattttatactttaatgaaggcctctcagtatgtagagacattttttcccaagacatgattttgactagaggtttctaaaattgtgtacatttatatatagtgtgcaaggaat

SEQ ID NO: 688701 - DNA, 602 bp, Homo sapiens
cattattctttactcctgacctatgaaagcacttgcaattttttttttaaagaaacgggatctcccatttctatgggagaaattgcattagtagtgatcccactactcatcaacacaggagttttgacctgctctgtttttttacctgggctgttaaatccctccttaggcaacctggtggtcctcctctcccaggaagtcagtatattgatgctgaatttatggcggactctcsatcactatagcacagaactcctgggctcaagagatcttcctgccttagcccctgaatagctgggactacaggcacacactacagtgccagggagtgcttgcaattgtgtaaagatgctcagccatttcccttgatgccacaggactcagcattaactttggttgaatgtctcctttttctttcacttcttttttttttttttttttttcattttttcctccttgtttactcttaaaattttatttagggtcaactaatctggaaagcttgtcttcaaagtttataaacgtaagatatggacctctcctttctgttcttgtttccttttatatttatactcatgaatgtgtatccaggtaggcataca

SEQ ID NO: 688702 - DNA, 637 bp, Homo sapiens
gattttataaataaatattatatgttaaactcttaattcttaattcaacactgcccctacataatttatttcaaatattttctggcactggtctagttctgggcttcatagtatgttgcayacagataataaaagtaagaaatagtgatctctgcaatgagcctcatagtttctcaaaataaagatgattaaagaatattatgagagatagaggactaatttgtatttcctatccctcctttgatttctattacaatagaaatgggtcagattctttattcattcagcagttcactcattgtggccactcagaaccagatattgtgctagaataaggacatggtatataatgaagagtaaaattaaagtggatcctgccacctgaggcttacaggaatccagaggaacacgtatataattcatacgctatacggttacacatatagcaaagctactaaggaaacaataagatctataaagaaaattagaggtgagatggattatatttgattggggatccatgaatgtgtcttgttaaaagtgacatttttcagagtgtaagaagatttgagatggaagcaaatagtttacaatcgtataacagacaatgacagaaagaaggaataacccatgtaaa

SEQ ID NO: 688703 - DNA, 515 bp, Homo sapiens
tcaaacttcgtaaccatgtagtccttgataacacatcttttacttcattttaggaactaagtattaagsatatttcatagcagagaaagagaacatacataaaactgtggaacaatgacaaatgttgaattttaaagatgttacaattggttgaaataacaaacatttttatagctggtgttctgagtttttcttttttagcacaaagcaaaatgccactgtcagcaagaaaaagcaaatcatttgtatcacagcagggaacaaagataataaaacaatagtgtgagccaactacaacctcttttcctctaatcactctcctttgaaaactagaacttggtaattaaagagaacctggcttatgtattggatgccatggaaaagcaattcaagaaaaaaaattttgtagcttaaggaaaaaaaaaatggattgggtatctgaaatcacattgtaattgaataattttagagagctatggagcatttattttaatgacagctttctggtaacattt

SEQ ID NO: 688704 - DNA, 656 bp, Homo sapiens
agtctctctctctttgaaacttaattctcacaatattttgaccttagataacttgattttaccaccattccctatctcttactgaggtcctcacttccttttttacacagcttaaaagtcttgattcattattatgtctttcatgcacccaccctgagccctgtcaccactcttactttgtcctcgtactttaacaagtctccaaacccaactaaaattcaattattatcttggctstcattctcacttgactatcagggtcaataatacactgttttaacagagatacatgacaaatgtatagaattcaacgagagaaagttttactgtttttcaactaaagatatcaagatgaatggtctaccttagcatcaatgtcttcctctactcgttgcagactttcaggaatctaggttctctttttcttccccccacagctagggccttgtcctcaccttcctgattggagctggatcatgtgcatgctcatggctcaatttatataatctagaaagagagaacatgtaggttaacagtattattttaagcaattgaaggaggagtttcccatatccttctgctcacatccctaggtacacatgtagtcacgttactccacctaggtaaaaataaacctttgaaatacaactcctaga

SEQ ID NO: 688705 - DNA, 656 bp, Homo sapiens
agtctctctctctttgaaacttaattctcacaatattttgaccttagataacttgattttaccaccattccctatctcttactgaggtcctcacttccttttttacacagcttaaaagtcttgattcattattatgtctttcatgcacccaccctgagccctgtcaccactcttactttgtcctcgtactttaacaagtctccaaacccaactaaaattcaattattatcttggctgtcattctcacttgactatcagggtcaataatacactgttttaacagagatacatgacaaatgtatagaattcaacgagagaaagktttactgtttttcaactaaagatatcaagatgaatggtctaccttagcatcaatgtcttcctctactcgttgcagactttcaggaatctaggttctctttttcttccccccacagctagggccttgtcctcaccttcctgattggagctggatcatgtgcatgctcatggctcaatttatataatctagaaagagagaacatgtaggttaacagtattattttaagcaattgaaggaggagtttcccatatccttctgctcacatccctaggtacacatgtagtcacgttactccacctaggtaaaaataaacctttgaaatacaactcctaga

SEQ ID NO: 688706 - DNA, 1056 bp, Homo sapiens
  misc_feature 208, 209, 210, 211, 212, 213, 214, 215, 216, 217, 218, 219,220, 221, 222, 223, 224, 225, 226, 227, 228, 229, 230, 231,232, 233, 234, 235, 236, 237, 238, 239, 240, 241, 242, 243,244, 245, 246, 247, 248, 249, 250, 251, 252, 253, 254: n = A,T,C or G
  misc_feature 255, 256, 257, 258, 259, 260, 261, 262, 263, 264, 265, 266,267, 268, 269, 270, 271, 272, 273, 274, 275, 276, 277, 278,279, 280, 281, 282, 283, 284, 285, 286, 287, 288, 289, 290,291, 292, 293, 294, 295, 296, 297, 298, 299, 300, 301: n = A,T,C or G
  misc_feature 302, 303, 304, 305, 306, 307: n = A,T,C or G
atatgctctataaaataactagtaaaggaaaaagtaacaactaaaagtagtaaattttgttgttcatggactgagatcaagttgaagtaaaagatattaagtaaaaagaaattcaaacattacatatttgtctttgacaaaaatataattcaacttacaaagaaaaaattgcagtaacaaggaaatctgtgtttcttgatgttatttnnnnnnnnnnnnnnnnnnnnnnnnnnnnnnnnnnnnnnnnnnnnnnnnnnnnnnnnnnnnnnnnnnnnnnnnnnnnnnnnnnnnnnnnnnnnnnnnnnnncctatttttgatatatcatttgcttatttttaccagaactttctgttcttttacttatcacttgtcttttgamattttgcaatcagatagtctttagttttgattttttgggtcatttcctctagttcaatgaaggggaaagccatgctagttaattagtattaaactttatcagttagatgataaatagcttgtttttattaacagagctagagcaaatctcaaaatcagagtcttgagtaggcacaatgttttctaaagtttaataactaacattttttgtttgattactattttttaatattttcttttattgcacgatactggctttatttttatggtagtaacttcaagtttcttttttagatacattgatgtcagtttaaaaagtggcccattaaaaatattcagggagaaaaagaaggaacacatgcatggccaaaataacaagatggtttgtggatttagcaaaatgtacaacagagacgtgagaatggctgaaggtggcattctatcctgttccctcaatttctttgtgcataggcctaatctttgcagtgcttaagagctacaggacttccaaaaactacttttctgttttgtataacaagcacactatgattcagtgtcgatatttttgtttgagtttgcatagtttcacagcacagagatgtaagatgcaattggctgagcatcattttgtagcaatgatgccgtgactttgaagatagctacgatttgcttttctg

SEQ ID NO: 688707 - DNA, 2690 bp, Homo sapiens
tgtcaatatagctccaaaaaggtagctagtattttatgttaacaagtactggtactaaagagacatgtcctctcaaggcataaaatcacttctgtcattatatctggctacattttatccatcaacccagtgtactctcactcattcaccatcaaattacccctttctccatttacatcattttcttcctagtaactagaaaactcctgattgttagagattttggctcaacgtccaattttttatttatttatttttattttcttctgtctctctcccttctgttttccttcctttcttccttcctttttatttccttctctcctctcttctttctttgtttccctttcttttcccttccttttttctttttccccctctccttctctcttatttttctctttcttttgttcagatttgccttcccaggaaatggtctggaaagttgatgacagcaatgcactgcccaggaatctagatgagaaatagtagaaatgagaacctgaatcctgggcatgtgttcttccaggcagcaaggagaacaaaacatctttctgaattccagttgaaggagatctgggacccaagggaaactgaaatattaagactatttctcatttttcctagtactgtttgctcaggttacaagtcttcaataagctcctggaatcttttccccatatgttttaactagtcttttgatttttggtctttcttttttttctttttttctgctatatattgccaggaaaaaaatgatatctgatataaatattctaaatttgactgctttcttgcttggacccaccatacatgactgcccttttctcagaaactggtttatataaatatataaatatatttcttgttctatttagctactaaatattcctaagatcgttacctagtgcctaggtttggctttatatctaaattgaacaataatcaagatgaaaattgtgtgctccttgaataaatgtactggattcactggtcatcaggggagaccaactctggcccaaattctctttatcttttctattcatatttaaccaatcagaatcaattttggggggtgtgaggtgcttaacagaacagaaattcattgtatcattcttctggaggctaaagtctgaagtcaaagtgtcagtagtattgcttcttttggagggccctgaggaagaatctattccatgccatcccctagcttatgatgacggccatcacctcttggtatttcgtggctaatagatgcatcatttcagtctttgccttcatcttcacatggcattctccttctgtggctgtgtgctatttttctttttcttttttttcgagacagggtctcactctgttacccaggctggagtgcagtggggagatcacagcacactgcagccttgaccttctgggcttaagcaatcctcccacttcagcaacccaagtagctgggactacaggcacacgccaccatacctggctagttttgtttatttttttgtggagatggggtcctgctatattgcccaggctggtcttgaattcttaagctcaagtgatcctcccaccttggcctcccaaagtgctaggattacaggggtgagtcaccaggcctcgcttagagtcacatttttaaccccaaatatcaaatatcaaataataccaaatttttttagagtcaaatttttaactcccaaatatctcaacatattttaaacattctcaatgatttgtttctgtaatcaackaaaatagtaactctccttctggctattcaatatatttctttcaaagtttgtagatattttatataattttgcatttttatgtttcttcaacactacctcactgggcagtacatatgcatcatattcatgtttattttgaataaagcactaatatacgtttgactgttacattttaacagtttaactccactcttcctaataatttataccctcattccatatgtccagatggctagttgtccatcagcacttattaactgaatccacaatgtgaacttgttgctaaaaggtagctttccaggcatgaaattccatttcttagccccttctccatctaggctgtgtgactagtttttgtcaatggaataaacatgaatgactcagttctggttcaaggccttgaaacatgaatctgtcttctccatgtcctctgctaatgtcctctgttactttttttggctatatgcaggtgataggcaagtagagaataaggaaaccagaacctccaagtggaggaaactgggtaactgaagcactacagggaagaaaggcattctcaaaccaaagataacagactagaactgtgttattaaaaaaaaaattaaaaatatttttggatcattgtattatcaccacactcttgccttggctagtaattataactcaaacccctttgacctcagtacttttgaggctctttttttttgggaagtctttcatggaccctcctagactaagcaaggtgttcctgctaggtgctctctcagtccatgttatatcatgtgtcatttccatcttcaaacaatgtttgatttttacaattacatttcccaagtagactgtagtagaataaaagtactttctgtcttgttcagaataatatctccagaatctagcctattacttagaacatatgaaatgttaaataaatatgtactcaag

SEQ ID NO: 688708 - DNA, 2690 bp, Homo sapiens
tgtcaatatagctccaaaaaggtagctagtattttatgttaacaagtactggtactaaagagacatgtcctctcaaggcataaaatcacttctgtcattatatctggctacattttatccatcaacccagtgtactctcactcattcaccatcaaattacccctttctccatttacatcattttcttcctagtaactagaaaactcctgattgttagagattttggctcaacgtccaattttttatttatttatttttattttcttctgtctctctcccttctgttttccttcctttcttccttcctttttatttccttctctcctctcttctttctttgtttccctttcttttcccttccttttttctttttccccctctccttctctcttatttttctctttcttttgttcagatttgccttcccaggaaatggtctggaaagttgatgacagcaatgcactgcccaggaatctagatgagaaatagtagaaatgagaacctgaatcctgggcatgtgttcttccaggcagcaaggagaacaaaacatctttctgaattccagttgaaggagatctgggacccaagggaaactgaaatattaagactatttctcatttttcctagtactgtttgctcaggttacaagtcttcaataagctcctggaatcttttccccatatgttttaactagtcttttgatttttggtctttcttttttttctttttttctgctatatattgccaggaaaaaaatgatatctgatataaatattctaaatttgactgctttcttgcttggacccaccatacatgactgcccttttctcagaaactggtttatataaatatataaatatatttcttgttctatttagctactaaatattcctaagatcgttacctagtgcctaggtttggctttatatctaaattgaacaataatcaagatgaaaattgtgtgctccttgaataaatgtactggattcactggtcatcaggggagaccaactctggcccaaattctctttatcttttctattcatatttaaccaatcagaatcaattttggggggtgtgaggtgcttaacagaacagaaattcattgtatcattcttctggaggctaaagtctgaagtcaaagtgtcagtagtattgcttcttttggagggccctgaggaagaatctattccatgccatcccctagcttatgatgacggccatcacctcttggtatttcgtggctaatagatgcatcatttcagtctttgccttcatcttcacatggcattctccttctgtggctgtgtgctatttttctttttcttttttttcgagacagggtctcactctgttacccaggctggagtgcagtggggagatcacagcacactgcagccttgaccttctgggcttaagcaatcctcccacttcagcaacccaagtagctgggactacaggcacacgccaccatacctggctagttttgtttatttttttgtggagatggggtcctgctatattgcccaggctggtcttgaattcttaagctcaagtgatcctcccaccttggcctcccaaagtgctaggattacaggggtgagtcaccaggcctcgcttagagtcacatttttaaccccaaatatcaaatatcaaataataccaaatttttttagagtcaaatttttaactcccaaatatctcaacatattttaaacattctcaatgatttgtttctgtaatcaacgaaaatagtaactctccttctggctattcaatatatttctttcaaagtttgtagatattttatataattttgcatttttatgtttcttcaacactacctcactgggcagtacatatgcatcatattcatgtttattttgaataaagcactaatatacgtttgactgttacattttaacagtttaactccactcttcctaataatttataccctcattccatatgtccagatggctagttgtccatcagcacttattaactgaatccacaatgtgaacttgttgctaaaaggtagctttccaggcatgaaattccatttcttagccccttctccatctaggctgtgtgactagtttttgtcaatggaataaacatgaatgactcagttctggttcaaggccttgaaacatgaatctgtcttctccatgtcctctgytaatgtcctctgttactttttttggctatatgcaggtgataggcaagtagagaataaggaaaccagaacctccaagtggaggaaactgggtaactgaagcactacagggaagaaaggcattctcaaaccaaagataacagactagaactgtgttattaaaaaaaaaattaaaaatatttttggatcattgtattatcaccacactcttgccttggctagtaattataactcaaacccctttgacctcagtacttttgaggctctttttttttgggaagtctttcatggaccctcctagactaagcaaggtgttcctgctaggtgctctctcagtccatgttatatcatgtgtcatttccatcttcaaacaatgtttgatttttacaattacatttcccaagtagactgtagtagaataaaagtactttctgtcttgttcagaataatatctccagaatctagcctattacttagaacatatgaaatgttaaataaatatgtactcaag

SEQ ID NO: 688709 - DNA, 2690 bp, Homo sapiens
tgtcaatatagctccaaaaaggtagctagtattttatgttaacaagtactggtactaaagagacatgtcctctcaaggcataaaatcacttctgtcattatatctggctacattttatccatcaacccagtgtactctcactcattcaccatcaaattacccctttctccatttacatcattttcttcctagtaactagaaaactcctgattgttagagattttggctcaacgtccaattttttatttatttatttttattttcttctgtctctctcccttctgttttccttcctttcttccttcctttttatttccttctctcctctcttctttctttgtttccctttcttttcccttccttttttctttttccccctctccttctctcttatttttctctttcttttgttcagatttgccttcccaggaaatggtctggaaagttgatgacagcaatgcactgcccaggaatctagatgagaaatagtagaaatgagaacctgaatcctgggcatgtgttcttccaggcagcaaggagaacaaaacatctttctgaattccagttgaaggagatctgggacccaagggaaactgaaatattaagactatttctcatttttcctagtactgtttgctcaggttacaagtcttcaataagctcctggaatcttttccccatatgttttaactagtcttttgatttttggtctttcttttttttctttttttctgctatatattgccaggaaaaaaatgatatctgatataaatattctaaatttgactgctttcttgcttggacccaccatacatgactgcccttttctcagaaactggtttatataaatatataaatatatttcttgttctatttagctactaaatattcctaagatcgttacctagtgcctaggtttggctttatatctaaattgaacaataatcaagatgaaaattgtgtgctccttgaataaatgtactggattcactggtcatcaggggagaccaactctggcccaaattctctttatcttttctattcatatttaaccaatcagaatcaattttggggggtgtgaggtgcttaacagaacagaaattcattgtatcattcttctggaggctaaagtctgaagtcaaagtgtcagtagtattgcttcttttggagggccctgaggaagaatctattccatgccatcccctagcttatgatgacggccatcacctcttggtatttcgtggctaatagatgcatcatttcagtctttgccttcatcttcacatggcattctccttctgtggctgtgtgctatttttctttttcttttttttcgagacagggtctcactctgttacccaggctggagtgcagtggggagatcacagcacactgcagccttgaccttctgggcttaagcaatcctcccacttcagcaacccaagtagctgggactacaggcacacgccaccatacctggctagttttgtttatttttttgtggagatggggtcctgctatattgcccaggctggtcttgaattcttaagctcaagtgatcctcccaccttggcctcccaaagtgctaggattacaggggtgagtcaccaggcctcgcttagagtcacatttttaaccccaaatatcaaatatcaaataataccaaatttttttagagtcaaatttttaactcccaaatatctcaacatattttaaacattctcaatgatttgtttctgtaatcaacgaaaatagtaactctccttctggctattcaatatatttctttcaaagtttgtagatattttatataattttgcatttttatgtttcttcaacactacctcactgggcagtacatatgcatcatattcatgtttattttgaataaagcactaatatacgtttgactgttacattttaacagtttaactccactcttcctaataatttataccctcattccatatgtccagatggctagttgtccatcagcacttattaactgaatccacaatgtgaacttgttgctaaaaggtagctttccaggcatgaaattccatttcttagccccttctccatctaggctgtgtgactagtttttgtcaatggaataaacatgaatgactcagttctggttcaaggccttgaaacatgaatctgtcttctccatgtcctctgctaatgtcctctgttactttttttggctatatgcaggtgataggcaagtagagaataaggaaaccagaacctccaagtggaggaaactgggtaactgaagcactacagggaagaaaggcattctcaaaccaaagataacagactagaactgtgttattaaaaaaaaaattaaaaatatttttggatcattrtattatcaccacactcttgccttggctagtaattataactcaaacccctttgacctcagtacttttgaggctctttttttttgggaagtctttcatggaccctcctagactaagcaaggtgttcctgctaggtgctctctcagtccatgttatatcatgtgtcatttccatcttcaaacaatgtttgatttttacaattacatttcccaagtagactgtagtagaataaaagtactttctgtcttgttcagaataatatctccagaatctagcctattacttagaacatatgaaatgttaaataaatatgtactcaag

SEQ ID NO: 688710 - DNA, 619 bp, Homo sapiens
atcatctccttcattcactgagttgacttctcctctgggacctccaccttgatcattttactctccacactgaatttattttttcattcattgtcagtattactccctctcaccatcttgctacatttttatatactaaaatgcaacctaggcctggtgcagtggctcacacctgtaatcccaatactttgggaggccaaggcgggcgaatcacgaggtcaggagtttgagaccagcctggccaacatggtgaaaccccgtctctactaaaaatacaaaaaattagccggtcatagtggcgggtgcctgtaatcccagctactcgggaggttgaggcaggagaatcgtttgaacccaggaggcggaggttgcattcagccgagatcatgccactaaactccagcccaggcaacagagtgagaccccatctcaaaaaaataaataaataaaataaaattcaactcaaccttcaaccttatatgatttctctttatttcaaaaactattgagcatttgctttgtggtaagtattgctctatactatgaaatagcacttgtaagtaagacattgtctctgcttccaaggagcatctagctgggagagaaartctaaattaca

SEQ ID NO: 688711 - DNA, 1563 bp, Homo sapiens
gaaatagtattcacctgtgactctcctacaaatcctaacataatgccctgcacacacctaagtgcccaatgagatcttttttatctgtagttattctaattcatttagttgtgttattatttctaagaatattcaatagatgcccacagggtttctcttactgtgttaatatttttccaagttaattatcatctccttctttcaggaattcacaactcctatttacttttcttgccttgttgcattggccagaattttcagaacaacatctgtaagccatctctattatattcctgactttcatgagaatatttctgatgtttcaccaataagtatggaactggctgtatgttttgtgatacacatgagtgaaggaaataaccttctatttttagtatacttaggctagccacaaagccaagcattcctctataaggttaataatgacccttcatacattgccactggttagttattcttttgaagtcagtcaggatcttcaaacaccaatttgctggttgtgatgcccaattttccaaacagatcaggagcactttgttgaatgtatattgaattctgggtggttcttcttcaacacccaccttggcctatcctcctcttgggagagagaaatctggatttttttaagcctcccctttgctccagtctagtaaacctctttgggcaacagaagccttactggaaagctgcttagctattattagatggtgctgagggaagaaagtaccttactcttatgtaatttccttgccctgaggagtagtatatcctggtcaatgaaatcagcttgactattttttattttttatttttttgcatcccagcctaatttctttttattccatcttgaattctcacccaagcctgattcatcttgcctgcttgcttgatttttctctttctctttctttctctctctctctttcttttcttgagatggaatctcactgttgcccaagctggaatgcagtgccactatctcaggtcactgcagcctctgcctcccaggttcaagtgattctcctgcctcaacctcccgagtagctgggcttacaggcgtgcaccaccacacccagctaaatttttttgtattttagtagaaatggggatttgccacattggccaggctggtcttgaactgctggcctcaagcaatacatctgcctcggcctctctaagtgctgggattacagatgtgagccaccgcacccaggcttttcatttcctttttatttatgtttcactccatcttcatttggtctctttgcagaggtggaagtccccaatgttttttatatgatttctcatgctctcacaagccaacagyattacatgcattaacatatgtgtattcagttactcacatgtgcctatacacagtacgccaatctcatagagtaactacctcatgctcactcatctacacacattatcttatctatcaagcctcctgggctgaggtctaggctaggggctgtgaggcccaggggtctccaaacttgggtaagcatacttactaaagaaaaacaattcagatgtcca

SEQ ID NO: 688712 - DNA, 651 bp, Homo sapiens
cgccctcattcttttcttagcttgtcgccagcctccatgctctgccccatggttccctccaccaggagcaccctcctctcctccccactcgctctggaactgcatcctactctgtctccagactcagcttgrgcccctcctccagaaagccctccctagagctggcaacctggcagccttgggatctgtttatggatctctccccaccaaggaacccacatctctggacccccaggacctggcacctagtaagtgttgggtgattgcccaactgtgccaaaataaagccaggctatttaatagagttatacattgaactgcccacctcggggagcagagccaggaggattctcaacctctccggagtcagggggccaggggtcagagaccagctctgccacttgcctcaggcaagttgcaaggcccttgtgtgcctcagtttcctttatctgtagagtgggaatcgttgctgcctccaaaggcagttgcgaggatgatgctttagcacacataaagtgccaaacaaacctggcacggtgtcagcactgccaaggccagtgtttgctgtccccatcatggtgggatggggacatcccgggtggaagcgcacagcagcagcaggcccacatcacttccctccacatacataca

SEQ ID NO: 688713 - DNA, 651 bp, Homo sapiens
cgccctcattcttttcttagcttgtcgccagcctccatgctctgccccatggttccctccaccaggagcaccctcctctcctccccactcgctctggaactgcatcctactctgtctccagactcagcttgggcccctcctccagaaagccctccctagagctggcaacctggcagccttgggatctgtttatgratctctccccaccaaggaacccacatctctggacccccaggacctggcacctagtaagtgttgggtgattgcccaactgtgccaaaataaagccaggctatttaatagagttatacattgaactgcccacctcggggagcagagccaggaggattctcaacctctccggagtcagggggccaggggtcagagaccagctctgccacttgcctcaggcaagttgcaaggcccttgtgtgcctcagtttcctttatctgtagagtgggaatcgttgctgcctccaaaggcagttgcgaggatgatgctttagcacacataaagtgccaaacaaacctggcacggtgtcagcactgccaaggccagtgtttgctgtccccatcatggtgggatggggacatcccgggtggaagcgcacagcagcagcaggcccacatcacttccctccacatacataca

SEQ ID NO: 688714 - DNA, 907 bp, Homo sapiens
cacagaatcacccagggagctttttaaaagtactgatgctgggctccagagagacaggtttctttggtctgggactcaggcatgagtagtttttggacatcccccctgtgtccctatggtgcttgtgtgcacccaggtgcaagaagcactacttagatctttgggtccttctgtrgggggaggctccctccaacctagggcagacggcaatggccacagaactctaggaaatcccaaagggaggcctccttccagggaaagaaacccactgccccccggcagttttctcccatgaggtgtgggccctgcaggcccatctcagccctttggagaagcagaagggaccctgcacagctgagtgtgccacatacattcgcacgtgcacagtcccgagcagccctgctaaagccgggattgtatttcaggcagaaatgcaaccaacagccgggcagtagggcctgccccgcctctgtacttaggcatgccagcttctgtgcctgcccctgccagctgggcagaggcagcgccgggtgctgcgctgacggactacctcccactgtgcccctaggggaacagcagtgcctgttccatgcctggagcctctgtggccaacagcacttcttaagcgcacccggcacaaaaagggccatccctgccctacgagaaatggggcctcctttcccagtgtgggggcactggatgagaagagtgggaaagaaaggctccagcaacaaacaagaatagagagttctgtggcaggttagagagcccgcaaggcctgagtatggccagatcatagcaatagtgacagcaagccttcatcagtgctgacttggaggcatccaacagcatcgagctgcctcgtccaatcctcagagcaaccccatgcagtaggtcctgtgatggc

SEQ ID NO: 688715 - DNA, 969 bp, Homo sapiens
gaggatacttgagccagagcacacattccatagaaaaatatgcaagaaatcaactccctagtgggtttttgtgttcgtatgattctttttttctaagactccgtaatttgggaataattttaatgtctctgactaatttgtactctgagtatgtgattcaaaatacttcattggagtatttagcaaaattagttatttttacttgctttcagctattaatttaaaataaaggtataaaaatctttatgtcttaaaaaaaaaaagtttggctgagaaaaactcccgagtgaatattggcactagaaaaataaaagcacagtaaagcctgaggtaacctcttatctccrtaaggacaaacaaaggaaaaaaagaattaagaaacaaaatttggtccccaggtaaagtctgcattgaaaattctgacccagatatcagggaagtgcctaaagggatataaaccccaaaacacatagacacacagccatcacaagaaattgaccaatgcagtcagctcctatattcaccaaaggcatttatcaagtatgaataagaacaaataaaccaaacctgtcaaacatttggtgaaaaccgatacccaaagaaaagtcccaaactcaacaaacagagctggaagaacaaactaatccctaaaatgtagcacaaaaaagacatggagatggaaaatatgaaagaaaagccagaatataaaagatgaatttacaagtactactgtttgtccaataggagttctagatgacaggactgagaaaaattcaatgaaagaaataaagaaaaaaaagaagaaaataaatttccaaattaaaagctgagatatgtatatatatattcagcttatatatgcatgtgtgtgtgtgtatgtgcaatgaagtgtgaaacaattttcagagtaaagtctcagaaagttactaagtccctttctattataattacttacatttactgtaataa

SEQ ID NO: 688716 - DNA, 646 bp, Homo sapiens
atgatctcccttgtgattaacttagagtcaacagactgagggcagtaattacaccagagaaatctcctcacctttgctgtataacgttcataatcacagagtggcgtcccatcgcccttgctgcagcctgttggctgcatcttacaggttccacccacacgcgaagggagggagtgtacaaaggtgtgggcaccaaaggatggaaccacagaggccttctgagctgtccgcctaacaatcaggtttaacagtaggaaaagaagacaatagaaatccgtgattctaccattgaaggaaaccacattttgatacatttctttctagtcattttctgagcatatttctgtttacattattacaaccatgctgtatgtaacacttgaattgattttttcagctttattaagctataatcatcaaaaatcatataaagtgaacaactcgatgttttgatrtatgtatacagtgtgaaatgatcaccacaccaagctaattaatatatccaccacctcatataattatcttaatttttttgtggtaggaatctggatttttttggccactatcatgtcatcaaaaagtcattataaacatcattattaataactggataacatcaagggatacacaatgactgattgaacca

SEQ ID NO: 688717 - DNA, 605 bp, Homo sapiens
taaagtataaatacatagcataatgattacaaactaacagcatgtcaagaaagaacattgctagcactttagatatgttcattgtacttttaaatgaaggatattttacttgattaaaaataatattcttgctcaagttaacttgcaaatctttaccagcagtgctgatacttctataggggtggaaaaagtccacctccattctcctagggtgccagctgggtcttagaattaaattgacataacatagattaacaggagaaaagcataatacatgctttatgtagcacaggaaccctcatgaagaaatgaagaccgtaggctgggcgcaatggttcacgcctgtaatcccagcactttgggaggcygaggtgggtggatcacaaggtcaggagtttgagaccagcctgaccaacatggtgaaaccccatctctattaaaaatacaaaaattagctgggtatggtggcacgggcctgtaatcccagctactcaggaggctgagtcaggagaatcacttgaacccgggaggtggaggttgcagtcagccaagattgtgctactgcactccagcctgggtgacagagtgagagtctgtctcaaaaa

SEQ ID NO: 688718 - DNA, 1722 bp, Homo sapiens
aatgtccaactgtgacctgttgtgcacctggaacctaggcatccacctgcagcctgatgttcagctgggctgggacccggagttcacctgaggcatgatgtccacctgaagcttgatgttcacctgggggctgggtgtccacttgaggcctaatatccacctggactaggtacccacctgggatctggtgttcactcaagattggtgttcagctgtggcctaatgaccacctgggtcatgatgtctaccttggactgggtgcttacctggagccagtgttcactggggacctagtgtgcacctgagaccaggggatgtacctggggcctggtgtctacctggtgcctaggtatccacttgaggcctaatgttcatctggaatctggtatccacctggggccttgtaattacctggggtctgggcatccacctagggcttgagtatcctcctggggccttgagttttactggggactcgtgtctgccttggacctgggtgtacatctgtggcctaatgtacaccttgagagtgatgtcaacctggggacagatgtcctcttggggtctgagtgtacacctggtgtctgatgtctgcctgaggacttgtgttcatctgagacctgatattcacctggggactgggcgtccacgaggggctgatgtccagctggacactggatatccacctggggcttaaggatccacccagaaactgatgtcaaamtggggcctgatgcctacctgcggactaggtatccatgtgaggcttgatgttcatccgcagccagacgtccatctgatgcttgatgtccaccttagtcctgggtgtctactggagacctcatgttcaactagagcttaggaacctacttggggcctcgtgtaaacctggggactggtatgcagctgggtcccaatgatcccctgggtcatattattcacctagggcctggtgtccatttggggcttgaatgacaaccttaggtcttgtgttcatctttgacgtggtgcccacctgggacttggttatcaacctgaggacttggtgtccaattgaggtgtcatgaccacctggggactgaatgtcaatctggggtctgatgtaaacctctagttcagtatccacctggggccagatgtcttcctagagacttatattctcttttgacctgatgtccacctggggacttgctatccatccatggtctgatattcacctggggacagatgtccaactgtggccagaagtgcacctggggtctgggcttccacctggagcctgatgtttagctggggctagagtttacatggagaacgatgtccacctgaagtttgatgtttacccggggcctgatacctgcctggtgcccaagtattctcatgtgcctaatgtccactagttggcctggtgttcatctgagggcttggagtcaaccagtggctttatgtacacctggattctagtgtcctcctggggccttatgcttaccaggagtctggtgttcccctggggtctagtatccacctggagtctgggtgtccacctgagcctaatgttgagcttagactgagtgtcagcctgaggcctgatgtctacttagggcataggtattcacctggggcttgttgtttacctggagactaatgtcaaccttgagcctaggtatccacctggggaatagtgtccagttgcagccagatgtccacctatggcctgaagca

SEQ ID NO: 688719 - DNA, 1375 bp, Homo sapiens
gcttagattcaggctcatctggtgtcaagccttgttgcttttgtttccttgttcttttatttttatttatttttctttttttgagacagagtttcgctcttgttgcccaggctagagcgcagtggtgtgatctcagctcactgcagcctccacctcctgggttcaagcaattctcctgcctcagctcctgagtagctggtattacaggcatgtgccaccacgcccggctaattttgtatttttagtagagatggggtttctctgttttgatcagggtgtctcgaactcccgacctcaggtgatccactcgcctcggcctcccaaagtgctgggattacaggcgtgagccaccgtgcctggcctgcttgttgttttcatctcatcctratttccaaatacaggagagaagctgaattggtgttcactaacaagcacaggagctttgttatatttacagtgtcattcttggcaaaacctgaagggtgtgttcgtggggtgatgaggttcagtcacctgtgatctgtgcatctggccagcactgtggtgacatccttaggaatccatggggagagagaaagcattcaggagttagtgggtcacgtttgacaagggccaataaagaaatatgcaaagacaaaaaacaagaagaacattgtcatattttctaccttttgtttatataaatttatatcaatgattttagcttatgttaatatgcaatgtatataatatgctaacatttacaatatatgtttatagtttaaacatttctgtcatattttcagattctttaaagattatattacgcttcctatttcagatagctgcttaaaatgagtaaggaaaaacggatgtgtgcatcagttccaactgtttatggactaaaactagttgatttcttggttaagaacaaaaagtgacaacctaattaactgaaaattttaagtgggcaattatagttttagctttaacgtaaaatattaactattctccaatcttgcatttttaacctaatactcaatataaatcgccacatgccatgtttcagatcaaggttttacttgggatctctcatgagtttttcaaggttttaattatctgcaatgtaacaatgtaccagtaaccttactggcttaaaccaggaatttattctttttacatgtcacaattttctgggtcaagacactggacagggcaatgtgggttggctgcttcatgatgtccctggtctcatctggaaggactctagtggctggggacgtgaagcaggcaccagaaggactctagtggctggggacatggagcaggcaccaagccctctctttgtggccagcacggacttcctcccagtctggcagtgtcaggtagtcaggtt

SEQ ID NO: 688720 - DNA, 612 bp, Homo sapiens
accaagggcaatttggaattgcagtgacatttagaggaacttttaatatgaataaggttgttcatttgagaggctttgtaaaacaagcatttaatgactcagattataaggtcttgtaccatctattgaatcttatataggtatttgtataaaggtaaaatgaaaattaaaagaaatttttaaaaatgtttaactcccaatgctttaaatattttgacccttccaaggagcccttcctccccacataccaagtagctcaaaaaaatgttttttgtttyaaaattcagtgaattaatctaaaggccttggccttggttagcactgagaattcttggttggcactcagaatttttaaatataatttttaaaagtcttttaaaatttgattcatatatatagagttttataacttttatttttttaagttcatttaatatttctgaagaatagacaagaaagaaagttctttttaaaaaattaatgtgactatactgattttaaaacaaccttgcccatgcctatgtcctgaatggtattgcctaggttttctgtaaggctctatgtctcgggtttttatggttttaggtctaacatttaagtctttaatccatc

SEQ ID NO: 688721 - DNA, 573 bp, Homo sapiens
ctaattctaagtctttctaagaaaagaaaaatgcaaaatgggtattatgcaaagttcacctacaaacacacagtgtatattataaagtgagcagatgggcattatctcagaattactttgcagactactctgtgtattttgagtcagtgagttaaaaagctttcaggattttccatggcatacacaaaatctataaaatgaaaaaagcatttaaatgcaagtggttttgttagttttctttccatgttaattagggaattttatgatgttacacattacctcaccaccatgccacagaaccttacttacaaaggcaattttttagatagatataaagcacaaaagttggtgtattagtccatcctcacaccggtataaagaaataccagaaactggaaaatttataaagaaaygaggcttaattggctcatggttctgcaggctgtacaggaagcatggctggggaggcctcaggaaggttacagtcatggaaaaaggcgaagaggaaggaggctcgtcttacatggttggagcaggaggaagagagtgaaggaggaagaagtgctacacact

SEQ ID NO: 688722 - DNA, 2392 bp, Homo sapiens
gatgcctaccaagcaggacctttagcaggcaactcagagtgaaactagatcaaattaagtcattatctttgccttttcccatccaccaatccttttatgtcctttctattgatawctatcctcaccctcaaccctgtcactaaccttgacactttattctttctgacatcatttcagtgtactcagccagctactaagccttatggatggtaccttataaattgcaactgaatgtgtttctttctctttattccatttgcagttatttcatcccctttatttctcatttgaattattacaattaactctgttctcaagggtcactctcctcatgtccattctcatcgtagatatcagtttgcccttaactaaagtacacattagctcatgtggcaaaccactgaagaagttagagcagaatagacatcacctactgtgtgctttagttaagaaagagcatattacttacatggactgacaagtcattctagaatagttcttgtctatatttactattttgtatctaataattgtctcactctcatccttctttccaatcacagtgaatcatttataattcataatatacaaaatttagttttaggtatctatgtcttagaacctcttggtccattgatttgttcaaataaatacttaaacattgaagtgattatctctcaattttgcctgatctatgtttagtgctactttttgtatagtaggagacagagttactctctcgtccttgttagaggagtgtggacataaatagaattaggccaaagagattttctcttgggatgtttctatcttgactgaagacaaacagaggtgaaaggccattaaagaagtacacataagatgtggcccaaaagttcttattaagaaaataatgttcttgcgatagtttactgagcacaaaaaaccaaacaccgcatattctcactcataggtgggaattgaacaatgagatcacatggacacaggaaggggaatatcacactctggggactgtggtggggtcgggggaggggggagggatagcattgggagatatacctaatgctagatgacacgttagtgggtgcagcgcaccagcatggcacatgtatacatatgtaactaacctgcacaatgtgcacatgtaccctaaaacttaaagtataattaaaaaaaaacaaaaacaaaaacaaaaacaaaaaaaaaaaaaagaaaataatgtttgtcaaatgtttttttcagtaatagtttttatcaaaatgttttttctttatttaaatcatcatatgggggcttccttctttattctgctagtttgaatgatataaatttattttaaaattttaaagcaccttgaattcttggaataaactcaactttgtctccatgaataatcaagtttgcacagcagatttttaaaatttggagattcataatatattttaataattttacacatgataaatgtgtaaatcaataaatattcaaaagtgaaacacattcttggaagccaaaaccagttcaatatataggccagttgctacagacttagtctgtatatgccccgatctgtaaattggtaggaagaaacctaatcctcagtgtgattctggagactctgggaggtgattaggtcatgagagcagagtcataatgaatgagattattgcccttataaaagagacaccagagagcttcctttccccttgtgctatgtgaaaacacagaaagaaaactgctttctatgaacaagcaaagaggctaccaccagacatggaatctatcagcccttgatcttgtacttcccagccctgagaactgtaagaaataaatttctgtggtttttaagccacctctttatggtagttagttacaggaacttgaacatactaagatgttagtataagttcccccagaagcacaccttgtttcacctttcagccaaaatgtccactagttgaaaacactctcctgatttctgtcatcatggaatagtatatcttgtttctgaaatttatacaaatgaaaaggattctttgaagtagcctgcatctaataattgtttggcatagacaaaaggctgaccccatgctcctttttcacacctggggcaattctgaagggctatttcaagcttcaaagccctctgaggccttgctatgtctgtgacatgtaacaagttactttgcctgtctgagcttttgcattcatttttttaaaaggttgaaataattgtagtacacaatacatagagttattatgatcatatgtgagattatgcatgtaaagtcattagcatgaatctgagaatacagtaaggactcattatataattcttattgtacatattagactctgtattcagagtccatcacatttgaatcctaaattc

SEQ ID NO: 688723 - DNA, 640 bp, Homo sapiens
tgctgtaaacactcaggacacccaggatatggtctttgctgtttgattttcctcatccccagtctcaaggggaagccaggacaatgagaacagccacttgccatcaggagtcactgaaagggccccaggatgggatggtggggagataagaaccatgagagaagttggcacaaaggagttatgggacaaagggtccaagataggcagaaaagaaaatkttgccagttgatggggaagaaaggaagtcagagggctcagacactgtgggggacagaacatctccatgtgcactctcatctcttgtagtcagcaacaggttttcacagggaaggccctacatcatctgctaccctgaaagatctggaggtaagaggctctgggcagaggtgcagtgacccttcgggtcagccctccaacctcctcctccaggagggactgggtgcccctctgccagctgagacagcccacacaccccagccctaatgattgttctctctacctctcccccgactcctgctccacctcctcctctctgcatgaacctcagagcccgtgccaagaacgagcagtagtcctggattcaaggtccgtagaaatcagtcaactgaagaacaccatcaaatctttggtaagagtccgg

SEQ ID NO: 688724 - DNA, 640 bp, Homo sapiens
tgctgtaaacactcaggacacccaggatatggtctttgctgtttgattttcctcatccccagtctcaaggggaagccaggacaatgagaacagccacttgccatcaggagtcactgaaagggccccaggatgggatggtggggagataagaaccatgagagaagttggcacaaaggagttatgggacaaagggtccaagataggcagaaaagaaaatgktgccagttgatggggaagaaaggaagtcagagggctcagacactgtgggggacagaacatctccatgtgcactctcatctcttgtagtcagcaacaggttttcacagggaaggccctacatcatctgctaccctgaaagatctggaggtaagaggctctgggcagaggtgcagtgacccttcgggtcagccctccaacctcctcctccaggagggactgggtgcccctctgccagctgagacagcccacacaccccagccctaatgattgttctctctacctctcccccgactcctgctccacctcctcctctctgcatgaacctcagagcccgtgccaagaacgagcagtagtcctggattcaaggtccgtagaaatcagtcaactgaagaacaccatcaaatctttggtaagagtccgg

SEQ ID NO: 688725 - DNA, 640 bp, Homo sapiens
tgctgtaaacactcaggacacccaggatatggtctttgctgtttgattttcctcatccccagtctcaaggggaagccaggacaatgagaacagccacttgccatcaggagtcactgaaagggccccaggatgggatggtggggagataagaaccatgagagaagttggcacaaaggagttatgggacaaagggtccaagataggcagaaaagaaaatgttgccagttgatggggaagaaaggaagtcagagggctcagacactgtgggggacagaacatctccatgtgcactctcatctcttgtagtcagcaacaggttttcacagggaaggccctacatcatctgctaccctgaaagatctggaggtaagaggctctgggcagaggtgcagtgacccttcgggtcagccctccaacctcctcctccaggagggactgggtgcccctctgccagctgagacagcccacamaccccagccctaatgattgttctctctacctctcccccgactcctgctccacctcctcctctctgcatgaacctcagagcccgtgccaagaacgagcagtagtcctggattcaaggtccgtagaaatcagtcaactgaagaacaccatcaaatctttggtaagagtccgg

SEQ ID NO: 688726 - DNA, 927 bp, Homo sapiens
tttatatatacatatatttacatacatatatttacgtacatatttttacatacatatttacatgtgtatatatttacatacattcacatacatatttacatatatatttacatacatatttacataatatttacatacacatattacatacatatatgtacacatatacatatatttacacatatacatatactatgtataattatgggtactgaaatgacacctggcatatgctgtatttaaaaatgtgaggttcagtgagaacacatggacacaggaagggaaacaacacatactggggcctgtcagggcgggtgggggaggagcatcaggaaaaatagctaatgcgtgctgggcttaacactgaggtgatgagttgataggtggaccaaaccaccatggcacacgtttccctacgtaacactcctgcacatgtaccctagaacttaaaacaaaattttaaaaataataaaaaataaaaatgtgaaattcagcacataaactgttggttttattattcatattttcytaattcagaaattattttctgaactatggtttattagataattttgacgtaacaattttttaagaggaaatttaagttttactttttaattggggctcttggttctttttaagaaagacagagataaatcatttatacatttaattagaagagactgggcttgaatttttaaaaagtactagaaatcgtagccactatatatgttatctttgaaatgttttagacactaattacctaaacaaggagcaaataagttaaacctcttggattttaataagaactaaaatgtacagttgtattttctggttttttaaattgttacagtctaaatttattcttcctaatgaagaaatgtatgtgccgtcaatatcaggttctttgtgggtactcacagttcc

SEQ ID NO: 688727 - DNA, 1954 bp, Homo sapiens
tgcagtgatgggtaggacacgcctctgctttcagctgctgcttgttgatgagccaccattctaagcaggtcacattacaaggtggtgaatggtgaaatggagatgttcatacatggttctgggagaagaaaggcttcacattggcagcagtcctgaaattgcgtgagagagcattckgggcagaaaacacaggagtgtcaagggcactgctgagaggagcagggctttcctgctgcttgcaggagtgggtgtggcagaggcttgcagggaaggaggatcttggtgtccatacagccccccgttgggcggacctttgtgcagtgctaggtgctgggctgcctgtggtgccctctgaggtgtctgcttccttccctcctcctcaaggctcattgcttgccagaagatgggctttgtttaaattggcaaggagggcagggctggcgagctccagggcagagggtgccatgggccctggcaggtgggtccgatccacaggaggatcagaggcttatcttggagcagtaaggaggggctgtcctgtgcttaaagagagggggccagagagagtcggcattggattagtgtttcagaagaacgaatgtggtgtgttggggaatgctcctgagtgctctaaaatctaaatgtccagtaaaagaacactaagtgcatcccgctttgattgcttggatttggagcagtatttgataacacagatcgttaatagagatctgtagtggtgcactccctcaagttgccataagcagttgtaattaacattcgcactggttgatcccatgccttgcaccacgcacaggtctcctttccagtccatcggccctcccatctccaaggatctatccttcattacagattgtgtgtttcttaaatattttctccttttcattcctttataagtgctctaggaatacatagcctaccctgaggatgtaattctttgtagaaacccttcagatgtgctgttccctgcctggatactcagcgtctgggtcttattcctcatcttagctcagttgttgcttccacaagtccctcactgaccctcagaatagcggtggtctgtcttccagtctccctggtacccccatagtcatctgttgcacagttttggacttgaaatcctgtgattaattgtgtcagcggtgccctttgctgccttccctgttagaatgtgcacctcagtcttcacacggtacctgtggaaccaggcagctgcaggcagagcacaggtatccagagaatgttggactggaactacgatcctgagttctgatgccatgcctgaggcgtgtggactcaccagaaagtgtgttcacgtagatagaggaattataagtcaacctgtgtaaacatgttaggtggagctctttcatatgaatgatgctgaatttcaccttctaaattgagtgttcagttgagcatctttttttttttttagtatttattttgagttgtgcacttgagtttctctttcatgtttgcgtgtgcattttctagaatggcttcagtcatccatcttctctggaggcctgcagaccagccagatccactacagctacaacgaggagaaagacgaggaccactgcagctccccagggggcacacctgccagcaaatctcgactctgctcccacagacgggccctgggggaccattcccaggcatttctgcaagccattgcagacaacaacattcaggatcacaacgtgaaggtgagctaggcctgcccccactgccacctcagtgctctgtttatctgaggactttgacataggaatacttatgtgctctttggttaacacagcacagactttgtttcatgtattatttggagggttttgaggtgagaacctgattgtgttaacatgctagcgaggcttcagaagcattagtgattgcaagtgcgtcagaagctgtggcatgtttaagatttgtg

SEQ ID NO: 688728 - DNA, 1954 bp, Homo sapiens
tgcagtgatgggtaggacacgcctctgctttcagctgctgcttgttgatgagccaccattctaagcaggtcacattacaaggtggtgaatggtgaaatggagatgttcatacatggttctgggagaagaaaggcttcacattggcagcagtcctgaaattgcgtgagagagcattctgggcagaaaacacaggagtgtcaagggcactgctgagaggagcagggctttcctgctgcttgcaggagtgggtgtggcagaggcttgcagggaaggaggatcttggtgtccatacagccccccgttgggcggacctttgtgcagtgctaggtgctgggctgcctgtggtgccctctgaggtgtctgcttccttccctcctcctcaaggytcattgcttgccagaagatgggctttgtttaaattggcaaggagggcagggctggcgagctccagggcagagggtgccatgggccctggcaggtgggtccgatccacaggaggatcagaggcttatcttggagcagtaaggaggggctgtcctgtgcttaaagagagggggccagagagagtcggcattggattagtgtttcagaagaacgaatgtggtgtgttggggaatgctcctgagtgctctaaaatctaaatgtccagtaaaagaacactaagtgcatcccgctttgattgcttggatttggagcagtatttgataacacagatcgttaatagagatctgtagtggtgcactccctcaagttgccataagcagttgtaattaacattcgcactggttgatcccatgccttgcaccacgcacaggtctcctttccagtccatcggccctcccatctccaaggatctatccttcattacagattgtgtgtttcttaaatattttctccttttcattcctttataagtgctctaggaatacatagcctaccctgaggatgtaattctttgtagaaacccttcagatgtgctgttccctgcctggatactcagcgtctgggtcttattcctcatcttagctcagttgttgcttccacaagtccctcactgaccctcagaatagcggtggtctgtcttccagtctccctggtacccccatagtcatctgttgcacagttttggacttgaaatcctgtgattaattgtgtcagcggtgccctttgctgccttccctgttagaatgtgcacctcagtcttcacacggtacctgtggaaccaggcagctgcaggcagagcacaggtatccagagaatgttggactggaactacgatcctgagttctgatgccatgcctgaggcgtgtggactcaccagaaagtgtgttcacgtagatagaggaattataagtcaacctgtgtaaacatgttaggtggagctctttcatatgaatgatgctgaatttcaccttctaaattgagtgttcagttgagcatctttttttttttttagtatttattttgagttgtgcacttgagtttctctttcatgtttgcgtgtgcattttctagaatggcttcagtcatccatcttctctggaggcctgcagaccagccagatccactacagctacaacgaggagaaagacgaggaccactgcagctccccagggggcacacctgccagcaaatctcgactctgctcccacagacgggccctgggggaccattcccaggcatttctgcaagccattgcagacaacaacattcaggatcacaacgtgaaggtgagctaggcctgcccccactgccacctcagtgctctgtttatctgaggactttgacataggaatacttatgtgctctttggttaacacagcacagactttgtttcatgtattatttggagggttttgaggtgagaacctgattgtgttaacatgctagcgaggcttcagaagcattagtgattgcaagtgcgtcagaagctgtggcatgtttaagatttgtg

SEQ ID NO: 688729 - DNA, 581 bp, Homo sapiens
aggggattactgggtgtgtgaatgagacacccagtgtaagtgtaagtcagtgagggttggtgagtgtgaggaagtatgagtgggtggcaggcacaagtgtaagtgtgcrattgagtgcgagcatttgtgtaaatgtgtatgagtgccttgtgtcagtgtgagcacgagtgatgttattgtgaatgcgtgtgagtgaatgtgagcattttgcttgtgtcagtgaatgggaggttataacagtataggtgtgagtgtaaagtgagaaagtgtgtgggtaaaggtgtgagtgggtgagtaatcggtcattactagtgttgaggagtgtgagtgcatatgtgagtttttgtatgcattgggaggggtaagtgtatgtgagagtgcatgggagtgtgtgtcagcttgcatctgtttgtgcatacgtgtgactgggattgtgtgtgtgttagtgattgcgacagtggtgtgagtgcacctgaaagtgtgagggtgggtgtatgagtgcccatgagtgtgtctgaataacttagtatcagtgtgagtgtgaggatgcatatgagggtgtgagagtgagtgtgtgtgtg

SEQ ID NO: 688730 - DNA, 663 bp, Homo sapiens
ttttatatatatataatatataattcaaaagaaaaaataagaattataattattaatcactagtatagtattaggtttttattcattttccccaagtaaataaaatcagtgttttgagtttcttgtagatatgttatttaacatgatatctgamaaagtaagaagttgataaatatgagtgataagcattatgataccgtataataagagaaaaatgtaagaaaactttggatcaccagcaaccttgcaaatattaccactgttatatgaagccaaaataagaattttctgatgcagcatacataagtatctgttgaatgtggtatgaaactacagtaagaagataatggttagcaagattgtatcaagaacaaaatgagaaaagggcagtaggaacaaatgaatgacaatagagaacagacaagtaatacaaagtaatttactgtttgcaccgaccgtccaaagaaacaaatgcaggaattgagtcttcctgctttccagtggcaacttgaaagaaaagcaatcttgggaaacattataaacaaaatgttacatatcctgaaaatgaattctttataggttgttactttgatcattaataaatacagtcacagatgaatttaggtggatgatttaatttgccaattttgcttagccactgtc

SEQ ID NO: 688731 - DNA, 663 bp, Homo sapiens
ttttatatatatataatatataattcaaaagaaaaaataagaattataattattaatcactagtatagtattaggtttttattcattttccccaagtaaataaaatcagtgttttgagtttcttgtagatatgttatttaacatgatatctgacaaagtaagaagttgataaatatgagtgataagcattatgataccrtataataagagaaaaatgtaagaaaactttggatcaccagcaaccttgcaaatattaccactgttatatgaagccaaaataagaattttctgatgcagcatacataagtatctgttgaatgtggtatgaaactacagtaagaagataatggttagcaagattgtatcaagaacaaaatgagaaaagggcagtaggaacaaatgaatgacaatagagaacagacaagtaatacaaagtaatttactgtttgcaccgaccgtccaaagaaacaaatgcaggaattgagtcttcctgctttccagtggcaacttgaaagaaaagcaatcttgggaaacattataaacaaaatgttacatatcctgaaaatgaattctttataggttgttactttgatcattaataaatacagtcacagatgaatttaggtggatgatttaatttgccaattttgcttagccactgtc

SEQ ID NO: 688732 - DNA, 663 bp, Homo sapiens
ttttatatatatataatatataattcaaaagaaaaaataagaattataattattaatcactagtatagtattaggtttttattcattttccccaagtaaataaaatcagtgttttgagtttcttgtagatatgttatttaacatgatatctgacaaagtaagaagttgataaatatgagtgataagcattatgataccgtataataagagaaaaatgtaagaaaactttggatcaccagcaaccttgcaaatattaccactgttayatgaagccaaaataagaattttctgatgcagcatacataagtatctgttgaatgtggtatgaaactacagtaagaagataatggttagcaagattgtatcaagaacaaaatgagaaaagggcagtaggaacaaatgaatgacaatagagaacagacaagtaatacaaagtaatttactgtttgcaccgaccgtccaaagaaacaaatgcaggaattgagtcttcctgctttccagtggcaacttgaaagaaaagcaatcttgggaaacattataaacaaaatgttacatatcctgaaaatgaattctttataggttgttactttgatcattaataaatacagtcacagatgaatttaggtggatgatttaatttgccaattttgcttagccactgtc

SEQ ID NO: 688733 - DNA, 663 bp, Homo sapiens
ttttatatatatataatatataattcaaaagaaaaaataagaattataattattaatcactagtatagtattaggtttttattcattttccccaagtaaataaaatcagtgttttgagtttcttgtagatatgttatttaacatgatatctgacaaagtaagaagttgataaatatgagtgataagcattatgataccgtataataagagaaaaatgtaagaaaactttggatcaccagcaaccttgcaaatattaccactgttatatgaagccaaaataagaattttctgatgcagcatacataagtatctgttgaatgtggtatgaaactacagtaagaagataatggttagcaagattgtatcaagaacaaaatgagaaaagggcagtaggaacaaatgaatgacaatagagaacagacargtaatacaaagtaatttactgtttgcaccgaccgtccaaagaaacaaatgcaggaattgagtcttcctgctttccagtggcaacttgaaagaaaagcaatcttgggaaacattataaacaaaatgttacatatcctgaaaatgaattctttataggttgttactttgatcattaataaatacagtcacagatgaatttaggtggatgatttaatttgccaattttgcttagccactgtc

SEQ ID NO: 688734 - DNA, 614 bp, Homo sapiens
taagtgggagttgaacaacgagaacacacggacacagggaggggaacaccacacaccggggcctgtcgggggtggagggctaggggagcgataacattaggaaaaatacctaatgtaggtgatgggttgataggtgcagcaaaccaccayggcacgtgtatacctatgtaacaaaactgcacgttctgcacatgtaacccagaacctaaaatatacataaaaaaagaaagaaagaaagaaaaaaggatgggaagtaacattgaccctttaaaaccttatggcgctaattataatttttttttctgaacagaaaaaaaggttccagattcttagcttactgaattaccttaaacctagaccagaagacttttctaaaatctgatagtcaaactgagtatagaagcaggcaagctattcacagatatttctcagaaaactagttggtcaaagtgatatttttttcctaatttaaccagaaattgtctagtgcaaaaagatgtatattactaattcctataactagtgacactgtatgaaactgtgtgattgcataatactatatgttacataaattgacaataaagagattgctgtcaggtataatctgatgatta

SEQ ID NO: 688735 - DNA, 610 bp, Homo sapiens
cctcctttacaacctcaaaaaagaacagtaggcacagagtaagcagaagagtgataaaaccagaaatcagtgaaataragaacaggagcaaaaaagagaaaccaatgaaatagaaagttggctccttgagaataccaataaaattgataatatctagccaggctgattaagaaaaacagagaacatattaaaattatcagtatcaggaatgagagagtgtatcactgccaattttacagatataaggaggatattatgagatagtttatgctgatacattgaaaagttgggtgaaatgaaaaattctttaaaagacacaaggtaccaaagcttgttcaagaagaaacagataacctgaagagcactatgcctatttaataagtggaatttatagttaaaaaccttcctaccaaaaaaattccaggctttaatggcttcatttgtaaattctaccaaatatgtaaggaagaaataataccagttctatgtaaactctaccagaaaattaaagaggaagggctacttccaaacttattttatgagggctgctaatttaattccaaacatcagttgttttaggttacttcccatttgtatacattgaagtata

SEQ ID NO: 688736 - DNA, 640 bp, Homo sapiens
ggccgggcgcggtggctcacgcctgtaatcccagcactttgggaggcccaggcaagtggatcacaaggtcaggagatcgagaccacggtgaaaccccatctctactaaaaatacaaaaaattagccgggtgtggtggcgggcgcctgtagtcccagctactcgggaggctgaggcaggagaatggcgtgaagccgggaggcggagcttgcagtgagccaagatcgcgccactgcactccagcctgggtgacaaatcgagactccgactcaaaaaaaaaaaatttaaattgtattaaatacttcatagttgacagactaaaacagacaacagcataaaatcaactctgcatagtaagatcactatatcttaaatgtgataaatttttwaaaaatcattataaccaacattctatgctgataagatgaatgttgaaattcactgtagctgtggccatgattaattacaagtttaatcatgtattttagggtaaacctatttccttaatatctcttttctattaaattacatgcactatgctaatgttaagggccaaagtaatttctgggctgatcaaatcttttgggtttgattttttgaaaagatactttgacaatttaacaatactataaaataaaatga

SEQ ID NO: 688737 - DNA, 646 bp, Homo sapiens
tgctcttattgcccaggctggattgcaacggcacagtctcagctcaccgcaatctcagcctcccagatttaagcaattctcctgcctcagccttcccaagtagctgggattataggcatgtgccaccaaaccccagctaattttgtatttttagtagagatgaggttgctccatgtgggtcaggctggtctcgaactcccgacctcaggtgatcygcccacctcggcctcccaaagtgctgggattacaggcgtgagccaccacgcctggctggattaaataagtttttaattgaaaaggattgagtatagtgcccgccatattttaaacaattaatggtagtaatatatcatttatgtcttgtatctgcatcccaagggcttaaaattcacacatcctaccaactcatggagttaagtatacaaatgaaacacaaacatagaaggaatggatgacctgtaaatgctcatatcactgcaaagtggcctagcatcttaagtttccagatgtgaacactattcactgaatctaaacaatggacaagatatagctgaaaggtaaagatcacttgggccctgaatctttttttttttttaacctttttttttattattatactttaagttctagggtacatgtgcacaac

SEQ ID NO: 688738 - DNA, 596 bp, Homo sapiens
ataaatgcatgggcaaaattctgaaagagtacacatcaaaccattaagagtgatgtccctctggaaggaagtgagaacgaaagagatagctttggaaccaaggggactttcaccatttactttatttgctaatgtgtgcattgtttgaatcttttgtaaaacaatattcctgtattcctgtattttagaaaacaataaaataatagagaggtcatgatggctgtgatttctatgaaccaaactagcaggagttgtctaaattttagaaataatttcctgagatagaaatgagacacccaactttatagaagcatcaggaagtttcttctaagtctatcctcagctttcttggtrcgttatcttgcttccacttgttctatcctcagggtgcacttagaaatcaagtccactgatggcaagagaaaccttcaggctctgatagagaaatgtccccacctctacctgttcccacttttaccactccaccacagccccaagccagagcaaatctctgcctctaaccagtctccctgcccctggaaccctccagtcagaaggacagcttcaggtcctttgcagcaaagtccagtacaaag

SEQ ID NO: 688739 - DNA, 3580 bp, Homo sapiens
ggatccagactaccttgagtttgaactccaggtcttccattttctagctgtgtagtattaggcaatttactcagtccctctatgccttggttttcctcatctgcaaaatgggaacaataatattggcacctaccttactagttttggggaaggattaagtgaattaatatataaagaaattcagaagaacatcttggttatagtagttataaccaacttactgttatttataacacaagttatataatggcaataatggttttcaatctcacagtccttttattctgtttccctagactctagattactggtctccagactttttgagtcatgagctctcctttctgtggatctgctcacataagtgctgaggaaacacataatgtcaaataactgctgagtctgtcagttcttcccggttttatatgacagaaaaccaactcaattcagcttaaccaaaatgggctacataactgggaagcccagctgtagaactggcagccatgagtagttccagagcctcaccaggaagcagagccccatgtcagtctctctctttggtttttaatccattgtcttcattccttcctactgcagtcaagccttctcctgctggtgaccatgatgtcctctggcaaactgtgattttcacctttacagctaccctagggagtcacacttacaagcactcctcttacagagagtctatgagtatctcaagctgaggcctctctcagggaagtccctgccctcctgcataactctctgtccttggaaattggggcagccttggtctcttctgtttattgggaatttcagcatcaccagggccatgagagcaactcgattgtccccttcaccattttgtttttcaggtgagcctgggtgccatgatatgtataagactcttggtggccagttttggtaatccaggattcccaagaaaggcctgtatattaggcccatgacccaactacacagcactgatactacacctgcctaatgactgattgcattttgaagaggctttcatgtgacagcactagacaggagagaagtgtaggaaagtagcaaactactaggcattgggcattctttgccaattcaaattttagtgtcagaaacatcatatgtcatttctgcccatttcttctctctccttatatcttatacctgccatcctgccttttctttttccaggtaagcagacagtggacctctaatgaacacatttttcaaagatctagcctaacctctgaacatctttagtcactgagttaagcaatacaaacaattaaattaaatgtgctaggtttctaaaactgtgtagagacttgtagtgtccttaaatagtctcagttgtttatataaaaagcagttattaacaggcaaggattaggacataagtatctagtcacacagttcttagttctcaaaaacattcagagaagttaaccaacaggccgcaactgtgcttctaattctaaagagctgcttgggtagggtgtctccctgtctccatgttaggttttcctgttctcttttcttatcagggtcttccttgacacagtctgttctcaaggcctgagcagctccctcagccactgagcatgggggccctggcaaaggagagggtgtggatttgccaggaaggataaaggtgagttcttcagagtagggccacgcactgagaaaccaggaagagcccaataagcttgtcacctctccagtttccttaatgggactttgagtactaaggggagagatagtgaatgagagagcagaggtggctgcaaggcagcagcccctgatccttgaggggctggaagacttggacggcagaggcagtgagttctgcttcaggatcccagccaaaggaattaggaactgggtggccaggacagctgtttctgagctctgaaaagttaagcctggccaaggattcatggtgtgctgccctggaaactagtcaaaggctctcatcaagagcctctgggaagctgtttgtataaattgctctaggtcatgcattggtcttccacatctgctgccccagtgacttcccagtgctaatttctggtgaaggaggaaaagactgcctgtgcccacaacgtcatccttcagaaggtgggcaggtgggagcaaccggtgtgggaagagggccaaggggtctagggccctgcgttctaccttacctctgcctcgcagcctgtgcagcgtgtgtcgccaagtggctctgtggcagaggagagaggaggagggaggaggaggcaggaggaggcagcaggaggcaggaagaggcccagctcttcactcttcacttctcagggaggtcatgaaggtgcccaaggaaagtcatattttatttctgacaaaaatttggttgagggccaggaaagtaattcattttatttttggtgggatcttttaggaagggacaaatacaaaatgttctcattcatctgctttaaaatttaaagcagggactatttaagcaaaatgttgagtaaaaccaataatcaatgaaaaacacatatagcggttcctcatctgttaaactttggacagggatgacatgcccccaaaacaaatttaaatgtcccataacctttttctttttacacttaaaaacattatgtattttactgacttttcaaccagattatatggcttacaatctaatcttcttttggcgaatcagcattgtacttatacatcaattacagtaaatatcttcagattcctttgctttttctaattttctttctgtcatctctgctaggctttctcttattgctaccataagtgttgtcctctagaagcagattacattccttccttttttggtctaattgtttgttcatattataggcaagaaaatagatgagcttattagaattctrgaagaaagtgtgagccgggatggctaccggagcccacagaccctgacttttaggtaaaggcacagagacacacatcagcacatatggacatttttttctataaaaggagtttagattaatgcattaaatatttttgaaactccctctatatgccaggcacttggctaggcactggctgtcaaatagaaataattcccagtatctttccttgaaacatagacagttcatggggcatgatgctttgtaataatcagacgcctcatcatggttcttgaaagatattttaatgtgataaataactgccaaggaagtgctactgactactaaagaggggccttagacagatctgaacattaggagggcctcaaggaagagtcctccctcagatggagtcccaagagattacatttatacctaaatctcagagtaaattgagatttgtcagacaaataaataccatacagcctttaaaatgttggctaaaaaaagaattgtgcaaacaaattacccacaatatgaatgcacttatataaattctaaaaacacacaaatactatatatatttactggaacacataaataaagcaaaagtatttatacatgggaaggagacaaagcaactttaggatagtcgtgatctctgggaaagagggaggggaatagaattaaggagagac

SEQ ID NO: 688740 - DNA, 664 bp, Homo sapiens
gaattttatggagcagcaggaggaaagctctcagcagaaaggggccctgagagcaggtagccctctgtgtgaggggtggcgtaaaagcagatagcccaatgtgtggctgagttaggggtttttatgggctcagaatgtgtgagtgtgtgctgattggtccatgggtggcccggaaaaggcaccattcactaggctaaaaggcacagagaaagttttcactccggtcgtcgactctacctggaactggaagctcagttttcagttttaaactgtctttggcttgaaggttggatttcactggggatccgcccctgtctgtctaggaatttgtctgtctcctgccactatcaactatatactctaatttttgaaaagatggtttttatgataaatacctaaaatattacaaatcataacacaaccaactgcttaatgggagtgttctgtatattcagaagcagatgagatggatatagattgtgaaggtttgagggaagaagaaaattaaagaatttacactgtactctagaaaggaaactactwggctaactgtattccattatgctcgcaacactggggattttattgcagtatacacacatacacaatggacatttctgtattccataggactaggaaagtctgatgatccatttatctctct

SEQ ID NO: 688741 - DNA, 631 bp, Homo sapiens
tgataatgtcgctcttattcttatcacatttttacaggaacgacctcttttctctttcacaragtttcctggaagtgccctgcacatccctaaggcatacttgctccatctatcctgtcccagtcgtcaatacacaatgatgagtagagtcacttgcaacctgctcacacagcagcttttatcagctgaagccatttttcccagtcttgtctggcaatgctggacattagggatcatctacttgggtccaaatggttatcaagggctacctggagaaacacatcctagaaaagcttccctaaccccagaggactggccgacctatgaatagcagctctaacagacgccagacggatgcaaactgcctggagactcacctttagccgctctgaaatgacaccgaccttcaaaggttgaaatcgggcactttccatacaaagggcagagatcgccgacagttttgctttcttattatctgcttaatttatacttttattgattcttgccctcagacaaacaagaaggtttaaacatgcatgattggaaaactcaaagaatgctagttttgtttgtttgccttttagccatacaaaagaaaaaaaaaaatcatgggctgagaacatggaaatct

SEQ ID NO: 688742 - DNA, 591 bp, Homo sapiens
gtgctgcaattagaggtgtgagccaccctgcctggccggaatactctgcttttatctccatttacaaatgaggagactgacactctgagaagggaaacagtgggtccatttccatgcattgagaaagagatggagcastgctttttaattcacctgtgttctccatttctcaccaccaggccatattctgactggcctgtgcccgtcttgtaagcatctcctgtaccaacttctaattaaacccattaaaactattacatttgccacatttccctaagggtccaataaaatctcttattaattcttatttaacatcgtgcagcatttagctcaattctagctctatattccaattctttcaacctcagagaaatgactgcaaaactcaaatacttccctgtctgtattatcatctgggagtttagccaaataatgtctttggagctgagggagatgtgaatccaaaaacgtctattgctttgtttatttctacagaagactgaggagactgtttaaggaatgtgcccaccaccaaggagggaagggaaggaggatttgagagaaagagagaagaggaactagagacagagg

SEQ ID NO: 688743 - DNA, 634 bp, Homo sapiens
ccacgttggccaggctggtctccaactcctgacatcaagtgatctacctgcctcggcctcccaaaatgctgggattacaggcgtgagccaccgcgcctggcctgtcactgcttatcatcgtgagtaccaagttctagtccaactcctcgagacggtctccaggtagccaacaactttggagaaccctgcccttcaccccttcctcttaaacactcgcaaagcacgttaatatatcgacgtctccttgaaacatcaccttaaattaaaaattygcttatttttgaggaatcgatttcttctcccggaacgccaacgtctcccaggatttgtcttcacagaagacactgtggggaacgctggcttccagcatgaacgcggcacttggagaatcgagcagcgggatccaggctgagccgcggaaggggtgggtggggagcgagggaagcggagcttcagtcaagtgagcctgactcccggctggcactctctccactcacgaatgtgcgggtggttcccgcagggaaaccccagcgccatctgacttcagggagagagtggagggacccgtgggacatgaggctgggaagagaacgctcatggataaaggaggtccctgccgaggaaggcctgctgg

SEQ ID NO: 688744 - DNA, 1030 bp, Homo sapiens
tcacatcaagaacattggatggcacatcaagaccttcgtaataaggtgggtgtggatctcagctatcacacccagattgaggaaaaattcccaaagtgattttatttttagttgtacatcttgtctttgtttccttctgaactcccattcctcaagaatggcagaaacccaatctcagctcttgcaggacckctattctggttctgagcccgtgactaaggattagagattctttgtcctgctgagacatctggtctgaacaagcaggtatcctctatgccagggctaggatttaaatactggcctcattccaaaatttactttctattctccttctctgcatacttaggtagtttgatttcagctaagcagaagcagcagctctcattaattggaacctggttctgctgccttgtcctgccattctaacactaaagtcctgtttctctgctttcatgagctcctgggttttgtacacgttcctttttcactgcaacgtgtcaaagcctattaaaattttgtgtttgaattttactatccaacttcttttttttttttttcttaccaatgagtgcattcatatcttgtgtctttggtcttacactcctaataactttgtaaagtgggttaggcaggtacattcatttacaaataaaagaactgaggtgctaacattttctggatttgcatttcttaaaggcagagtggggaggtagcaaaagctgtcctggggaccagcccagttctttttgatccagtgctgttacaagcattcaatctatcttttactctctagttttctttttgctttactctagtttgttttcaataatcttgggaattacacattttttttctttttgagactgagtcttgctctgtcactcaggctggagtgcagtggtgcgatcttgggtcactataacctccacctcccgggttcaagcgattctgccacctcagcctcccaagtagctgggattataggcacgcgccaccatgctcagcgaatttttgtatttctagtaga

SEQ ID NO: 688745 - DNA, 669 bp, Homo sapiens
tatcaaaccatccaaagttctagagctcaagattcccttgtgttctacttgctgaggtttggtctctgttgtcacaacattcagtacaatctgctgcccaggacctggacattgacagataaaatgaagtgggtcagttractacagagggtgtggtatttacatgaaatgttttaaatttctcttatttctaaatatttcatcatcaaaaatatggatttagatttctggagtagattttaaatatgagaataatgacatggtatatcttaaattttacagttgtattactcaaggggaaaggctgtttatgcctaagcatatgaaattgttattgattctgtacgatatgagaaaagctttaggaaaatattttatgaaacaaatttgttcctttaatcgaaattatggatttcaaaatggggaaggtattgggaaaatatctgaatatttacaggataaaactagtctggagttgtggcagagcttttgcaccctagccttcccttttgatggtacctgtcccatgtagtcctctcttcaggtgacagtacttcctccacccttcatcgctgtctgattgaaacttgaagatagaactgattaactcatttatactaaaatgtaaacaccttgtgagctctcaaatttcatttcgtgaagagataa

SEQ ID NO: 688746 - DNA, 2212 bp, Homo sapiens
atgcccatcactggaccattcactgtggccaaagcattaggaactatggttggcagccccatcagaatcctactaaaaagaggacagtgctgttccaggcaaacaaagcaacaaatgcccaccacatagagctctttcagtgtttaaccatcagccaattttctccagaagtgagacctgagtccagttggggaatgtcataaaataaaagcagtatgtggtccaacattcctccttcccattctacaactaggatttttctgactgaggcaaactcttcctgatccttgatcccttcactcatcctatagggtccacagttcttacgcaygttggcttggttaggctgccctagctgttcactggacccccagtggtgggcatagcttaggcacaagcttaaagatatcattatatatattagcaaaaccaaacaggattagggaaacatgtacattacatcccggacaaatcctgagtaggttcttgaaattaaaccatatgacttcttagacctacagtttgcattctgaagacaagccagtgggattcatactcagggtaagaaaccctcccccgtgtgtgtgtgtgtgtgtgtgtgtgtgtgtgtgtgtgtgtgtgtgtgtatgtaaaccaggatgcaaatggtacatttattggcttcaggcccaaatgttattcacagaaaagaaaagctgattcctgctctgatataaacttgaacattatttttctgttcatggaaaattctatttttctttagcattgttacttaaccaaaagacttttagaaaattgcagcagtgctttgaagcactccgtgaagttgagctatttcaggcctgttccagaataggttgtatgcccatgtgggtttccatatctgcagtggatcttccatatctgcagtggtgttttggttgacatttaggatcttttcaagctcatggttttcatgagtacacagatgaagccaattcactttgtgaaatccacctagtttaaaattcctttcatctcctctcaaacatatttgagaaagtcattacaaatcaagagaccaatgtgaagcttaaaatgcattttcttaaatgtccttcaaaaagagattatgttttggacataatgttttggactaaaccaggaggtgaactgctgagcatccagaagtttctagagggtacagcattgtaggtttgttatgtttggaaaacagtggcctggactatttgtatgcaggcggggatatccccttactggggagtgagcactcatcctcaaagccatttgcatgttctgcacctttctgaacccttcccagtgccaagtccaaaatgagtcatgagactgactgcatgcaccatatggtaaacctgagaaccatccctctactgaaggacgcacaccagggcatgatttgtttaaggctacacaacttctgccgaaagatgactttgccacagcttttaaacatatgatgcaagttttgtgctgtgaaaagtccccacttacagtttaagtatttttgttcagaggaataaaagaaaacaaatacgtaagtcctaatacagggcctgtttatagcaatggatcaggcagatctcacttcccttactacatccctgactgcttctagctgcattaattagcttaaaggggcttcagggctacttggtaatgaaaacagccataccttatgcaattaattatatagaacagttacttagcttccatttttctgcacccctcatggtactgactttccactttctgttttcatttttagaaaataagttgctatgaaacttacatctattgactttgaggatgcttctagaaaatcatttgaatatttttaaaaccaaagatttctatatttctgctaactttttaaagaggagcccaagtctgagagacacagaaacccaactctaattatatctgtggtgcctgggagacatccccagcttagatgagtaaatgtgaaaagagaaaacaatcataggcaattagctgggtcttggcttaatgtcagcaatgtatccactgtgaacctcaagccctccctgctctgtgggcaccagtctccctccctcccttcctcccctcagccacagttccatttagcaaagcagagagggccttggactcgtattgttaccctggaattaggctagacaatattttccagtgacttcttaaaagtctgtcc

SEQ ID NO: 688747 - DNA, 2212 bp, Homo sapiens
atgcccatcactggaccattcactgtggccaaagcattaggaactatggttggcagccccatcagaatcctactaaaaagaggacagtgctgttccaggcaaacaaagcaacaaatgcccaccacatagagctctttcagtgtttaaccatcagccaattttctccagaagtgagacctgagtccagttggggaatgtcataaaataaaagcagtatgtggtccaacattcctccttcccattctacaactaggatttttctgactgaggcaaactcttcctgatccttgatcccttcactcatcctatagggtccacagttcttacgcacgttggcttggttaggctgccctagctgttcactggacccccagyggtgggcatagcttaggcacaagcttaaagatatcattatatatattagcaaaaccaaacaggattagggaaacatgtacattacatcccggacaaatcctgagtaggttcttgaaattaaaccatatgacttcttagacctacagtttgcattctgaagacaagccagtgggattcatactcagggtaagaaaccctcccccgtgtgtgtgtgtgtgtgtgtgtgtgtgtgtgtgtgtgtgtgtgtgtgtatgtaaaccaggatgcaaatggtacatttattggcttcaggcccaaatgttattcacagaaaagaaaagctgattcctgctctgatataaacttgaacattatttttctgttcatggaaaattctatttttctttagcattgttacttaaccaaaagacttttagaaaattgcagcagtgctttgaagcactccgtgaagttgagctatttcaggcctgttccagaataggttgtatgcccatgtgggtttccatatctgcagtggatcttccatatctgcagtggtgttttggttgacatttaggatcttttcaagctcatggttttcatgagtacacagatgaagccaattcactttgtgaaatccacctagtttaaaattcctttcatctcctctcaaacatatttgagaaagtcattacaaatcaagagaccaatgtgaagcttaaaatgcattttcttaaatgtccttcaaaaagagattatgttttggacataatgttttggactaaaccaggaggtgaactgctgagcatccagaagtttctagagggtacagcattgtaggtttgttatgtttggaaaacagtggcctggactatttgtatgcaggcggggatatccccttactggggagtgagcactcatcctcaaagccatttgcatgttctgcacctttctgaacccttcccagtgccaagtccaaaatgagtcatgagactgactgcatgcaccatatggtaaacctgagaaccatccctctactgaaggacgcacaccagggcatgatttgtttaaggctacacaacttctgccgaaagatgactttgccacagcttttaaacatatgatgcaagttttgtgctgtgaaaagtccccacttacagtttaagtatttttgttcagaggaataaaagaaaacaaatacgtaagtcctaatacagggcctgtttatagcaatggatcaggcagatctcacttcccttactacatccctgactgcttctagctgcattaattagcttaaaggggcttcagggctacttggtaatgaaaacagccataccttatgcaattaattatatagaacagttacttagcttccatttttctgcacccctcatggtactgactttccactttctgttttcatttttagaaaataagttgctatgaaacttacatctattgactttgaggatgcttctagaaaatcatttgaatatttttaaaaccaaagatttctatatttctgctaactttttaaagaggagcccaagtctgagagacacagaaacccaactctaattatatctgtggtgcctgggagacatccccagcttagatgagtaaatgtgaaaagagaaaacaatcataggcaattagctgggtcttggcttaatgtcagcaatgtatccactgtgaacctcaagccctccctgctctgtgggcaccagtctccctccctcccttcctcccctcagccacagttccatttagcaaagcagagagggccttggactcgtattgttaccctggaattaggctagacaatattttccagtgacttcttaaaagtctgtcc

SEQ ID NO: 688748 - DNA, 2212 bp, Homo sapiens
atgcccatcactggaccattcactgtggccaaagcattaggaactatggttggcagccccatcagaatcctactaaaaagaggacagtgctgttccaggcaaacaaagcaacaaatgcccaccacatagagctctttcagtgtttaaccatcagccaattttctccagaagtgagacctgagtccagttggggaatgtcataaaataaaagcagtatgtggtccaacattcctccttcccattctacaactaggatttttctgactgaggcaaactcttcctgatccttgatcccttcactcatcctatagggtccacagttcttacgcacgttggcttggttaggctgccctagctgttcactggacccccagtggtgggcatagcttaggcacaagcttaaagatatcattatatatattagcaaaaccaaacaggattagggaaacatgtacattacatcccggacaaatcctgagtaggttcttgaaattaaaccatatgacttcttagacctacagtttgcattctgaagacaagccagtgggattcatactcagggtaagaaaccctcccccgtgtgtgtgtgtgtgtgtgtgtgtgtgtgtgtgtgtrtgtgtgtgtgtatgtaaaccaggatgcaaatggtacatttattggcttcaggcccaaatgttattcacagaaaagaaaagctgattcctgctctgatataaacttgaacattatttttctgttcatggaaaattctatttttctttagcattgttacttaaccaaaagacttttagaaaattgcagcagtgctttgaagcactccgtgaagttgagctatttcaggcctgttccagaataggttgtatgcccatgtgggtttccatatctgcagtggatcttccatatctgcagtggtgttttggttgacatttaggatcttttcaagctcatggttttcatgagtacacagatgaagccaattcactttgtgaaatccacctagtttaaaattcctttcatctcctctcaaacatatttgagaaagtcattacaaatcaagagaccaatgtgaagcttaaaatgcattttcttaaatgtccttcaaaaagagattatgttttggacataatgttttggactaaaccaggaggtgaactgctgagcatccagaagtttctagagggtacagcattgtaggtttgttatgtttggaaaacagtggcctggactatttgtatgcaggcggggatatccccttactggggagtgagcactcatcctcaaagccatttgcatgttctgcacctttctgaacccttcccagtgccaagtccaaaatgagtcatgagactgactgcatgcaccatatggtaaacctgagaaccatccctctactgaaggacgcacaccagggcatgatttgtttaaggctacacaacttctgccgaaagatgactttgccacagcttttaaacatatgatgcaagttttgtgctgtgaaaagtccccacttacagtttaagtatttttgttcagaggaataaaagaaaacaaatacgtaagtcctaatacagggcctgtttatagcaatggatcaggcagatctcacttcccttactacatccctgactgcttctagctgcattaattagcttaaaggggcttcagggctacttggtaatgaaaacagccataccttatgcaattaattatatagaacagttacttagcttccatttttctgcacccctcatggtactgactttccactttctgttttcatttttagaaaataagttgctatgaaacttacatctattgactttgaggatgcttctagaaaatcatttgaatatttttaaaaccaaagatttctatatttctgctaactttttaaagaggagcccaagtctgagagacacagaaacccaactctaattatatctgtggtgcctgggagacatccccagcttagatgagtaaatgtgaaaagagaaaacaatcataggcaattagctgggtcttggcttaatgtcagcaatgtatccactgtgaacctcaagccctccctgctctgtgggcaccagtctccctccctcccttcctcccctcagccacagttccatttagcaaagcagagagggccttggactcgtattgttaccctggaattaggctagacaatattttccagtgacttcttaaaagtctgtcc

SEQ ID NO: 688749 - DNA, 590 bp, Homo sapiens
ggtgtgagccactgcacccggccttaaaattttttaaataaaaacaatgaatattttttaaaataaaatgcactttagaggtcaaataaatggtgatggtagtccgtattgtctattattcctaaaaaccattattatttaaaacatttttgcaaactttttctaaagcttaattagggggctgggcactgcagctcacacctataatcccagcactttgggagaggccgaagaattgcttgagctgaagagctcgagaccaacctaagcaacataacctaagcaacataacctaaacaacatagacccccatctctacacacacacacacgcatgcacacactcacaaagccagccatagtggcgcgactgcactcctgcctgggtgacagagtaagaccttgtctcaaaacaacaaaaaagcccaattaaaggattgaaggccaccgatttatttcttatcaaatttgcttcttcttcaacaaattgtgacattatttcaagacaygctttattttaccttagcgtggaatcataaaattaaaagaaccttgaaaattagtcactgctcccacctcaaagccaggctt

SEQ ID NO: 688750 - DNA, 934 bp, Homo sapiens
tgatataaaagagtatagtatttgcatgtgatcaaatagtgtagtatttgtgcatcttcttgtatacactaaatcatctctaaattacctataatacctagtatagtgtaaatgttatgaaaataattgttatatttttattgttgtattgttattttttattgcgggtttttccatggaatattttcgatccacgattggttgaatctgcaaacatggaacttgtgaatctaaagggccaactgtatttcaaacctcttattcaaaaaagtatttttaatattcaagtgaatgctttcttactataatttaaatgttacccctttgatagagtgatgttattaaagggcaagaatatttactcaattttcaaaaatagttccttgacaatttgaagactattcagaactaaattggttttgtcacctccaaaggtacrtaagcctagatggattagcctctcaacacaaaacctatttcccaaggttttattcattttgctattcacctcaaactgattttcaaaatggaatataatattttaccagaggcttcaccaatgctcagtataaaaaaaagattctggccaggcgtggtggctcatgcctgtaatcccagcactttgggaggccaaggcaggtggatcacctgaggtcaggagtttgagaccagcctggccaacatagctaaacccatctctactaaaaacacaaaaaattagccagccgtggtgtcgggtgcctgtaatcccagctacttgggaggctgaggcatgagaatcgcttgaaccaggaggcggagggtgcagtgagccaagatcacgccactgcactccagcctgggtaacagagtgagattccatcttatacatacatacatacataaaaaaataagaaacagattcctacatcgtacctatatattttaacaggca

SEQ ID NO: 688751 - DNA, 934 bp, Homo sapiens
tgatataaaagagtatagtatttgcatgtgatcaaatagtgtagtatttgtgcatcttcttgtatacactaaatcatctctaaattacctataatacctagtatagtgtaaatgttatgaaaataattgttatatttttattgttgtattgttattttttattgcgggtttttccatggaatattttcgatccacgattggttgaatctgcaaacatggaacttgtgaatctaaagggccaactgtatttcaaacctcttattcaaaaaagtatttttaatattcaagtgaatgctttcttactataatttaaatgttacccctttgatagagtgatgttattaaagggcaagaatatttactcaattttcaaaaatagttccttgacaatttgaagactattcagaactaaattggttttgtcacctccaaaggtacataagcctagatggattagcctctcaacacaaaacctatttcccaaggttttattcattttgctrttcacctcaaactgattttcaaaatggaatataatattttaccagaggcttcaccaatgctcagtataaaaaaaagattctggccaggcgtggtggctcatgcctgtaatcccagcactttgggaggccaaggcaggtggatcacctgaggtcaggagtttgagaccagcctggccaacatagctaaacccatctctactaaaaacacaaaaaattagccagccgtggtgtcgggtgcctgtaatcccagctacttgggaggctgaggcatgagaatcgcttgaaccaggaggcggagggtgcagtgagccaagatcacgccactgcactccagcctgggtaacagagtgagattccatcttatacatacatacatacataaaaaaataagaaacagattcctacatcgtacctatatattttaacaggca

SEQ ID NO: 688752 - DNA, 934 bp, Homo sapiens
tgatataaaagagtatagtatttgcatgtgatcaaatagtgtagtatttgtgcatcttcttgtatacactaaatcatctctaaattacctataatacctagtatagtgtaaatgttatgaaaataattgttatatttttattgttgtattgttattttttattgcgggtttttccatggaatattttcgatccacgattggttgaatctgcaaacatggaacttgtgaatctaaagggccaactgtatttcaaacctcttattcaaaaaagtatttttaatattcaagtgaatgctttcttactataatttaaatgttacccctttgatagagtgatgttattaaagggcaagaatatttactcaattttcaaaaatagttccttgacaatttgaagactattcagaactaaattggttttgtcacctccaaaggtacataagcctagatggattagcctctcaacacaaaacctatttcccaaggttttattcattttgctattcacctcaaactgattttcaaaatggaatataatattttaccagaggcttcaccaatgctcagtataaaaaaaagattctggccaggcgtggtggctcatgcctgtaatcccagcactttgggaggccaaggcaggtggatcacctgaggtcaggagtttgagaccagcctggccaacayagctaaacccatctctactaaaaacacaaaaaattagccagccgtggtgtcgggtgcctgtaatcccagctacttgggaggctgaggcatgagaatcgcttgaaccaggaggcggagggtgcagtgagccaagatcacgccactgcactccagcctgggtaacagagtgagattccatcttatacatacatacatacataaaaaaataagaaacagattcctacatcgtacctatatattttaacaggca

SEQ ID NO: 688753 - DNA, 595 bp, Homo sapiens
gcttcccacggggctcccacatccacctgtttccctccaaccactcttcactctgctgcatcctgtcgtgtggctgaaccaaataaaaaccttcaaaagcactgcactgctctttcaaaagtttagaatttgtgcagtggcaccaagtcccgaatgacccggcccctgcctttacctcyggcctcacctcacgtcacctcctttcttgctctttagcgtcagccacactagcgaatgtcgttgtttccttcatgctcaggactttcacacttagcatcccctctgctccccaaactcccctaaatagggtggaaatcaccctatccttcagggctccactgaaatggcacaacttcaggagggctgtcctgacttctcagcctaggtggaagttcctagagagctctgaaatcctcctccatagcatatgctctaattactacttaatacctgtttccagtgttagactgtaagctccaatgcctggtatgtataagacaatcaatatatctggtaggaaggaagggagaatggaagataggtgtatggggaaaaagaattccccatccctcatatctcttccattggagccacg

SEQ ID NO: 688754 - DNA, 562 bp, Homo sapiens
ttggtcctaaattcaaatgaggtaaaaatgagtgtcatttattagttttcttaaactccaacaataggaaattagaaggattggaaaaagtctagaagagcctaattcttttttaaaacattttaaattgatttagggttatgtgtgcatgggtttcaagctttttcctaatgttaccagggcaaacctggagatatggctgagaaagtttactattttcttgaagagtagataactgagaaagttcattattttgttaaacagtagatagctgagaaagtgcattattttttcttaaacagtttttttttttctagtctatttatctgtaggtaagcttgctgaaaaacaactayagacggcctgggagcttcaggaccctttgccaattaccagaggaagataaagccattgagaaaacggagcaaacaagaaccagcaaccccttgttacctttagatcattaacatgtcattataatgctaaagtccctgccatagaagaaaatggccaccatttcttgaacatatgttgtataaggaagcatgtttatgagctgtac

SEQ ID NO: 688755 - DNA, 637 bp, Homo sapiens
aaatgaaatcttacactgtatatgaaggctacaatattccttatttgatcacttaattactttgcaaaaattaaataagactgaaataaagttacatataaaactcaaaatcattattttatrttcttatacctcattgatctttctagtcaggaggctatttcagagcatatacatgcacatatggaacaaatcaagaaaaacagattttaaggattaatggcttttctcattctgcttgtatttggttacagagtaaatttctcttctttagccaatggcctttatagctttgattcgagcatatttcaacatcattaaaaagctgccttagaaagtggagaacggagggaggaagaggaagcacaggctgacctgatgcacctgagaacacacacacagaacaagtctgactctcggaaactagggtcacctcaatggaacaaaggatctcggaaatgtgggaatggtaaagtattagggttctctgcaatatcagtctttcccaagagggggcaagagaagggagagaagagtcatggtagaaacctacaggaaggaaaactgggcccatttgtagctcaatttctaaactctacctctgaatcggtatttttttcttaagcgtctcattgta

SEQ ID NO: 688756 - DNA, 633 bp, Homo sapiens
gtgtgagccactgcgtccagccgtgtcttacaaatttttaaaccctttctctgtcatctttttaatctttttttaaaagtaatcaagattaaatgagattggtaggtttgttaaattgcttcatctatagattttcaagccatcatatttttcttgcaatatgttgaagaaacttgactgacagttttccacagcctgggttttgatgatcacatccccrtggtgatatttatttgttgccccatctcctatgaactgatctacatcacacatgcagcatgcatacaaatgccattgattgttttccattgtaacttaacaccataagcaccttatttcttgtgaggctttatttcaagctctttgagggaaagatgcttacagattcttatagcttcacagtgatagaaacttaggcagttttcttgttaacagaaacctacatctgctgcctgagagatgatgtccccaagtaattttgatctttcattctaccatgtcctactacttaacaagtttgttctttttagagactaaattttctcctatagaagttgaagtcccaatgcttgggttcaggtcccagctgcactgtgtgctaactagttgtgtaaccagggaagagtcttagca

SEQ ID NO: 688757 - DNA, 1643 bp, Homo sapiens
ttcaagacttgtgacatgcaaggcaccacattaggttgtgagagggcacaaagatactaagatactgtgtctaccttcagagcttcgtttcaaaagggaaataagcttaggaatataaaataaggtagaatgtattatataactgaagaaagaaatttcaaggcacaacaaaaacaaggcaaggagaaagaagtcacacgagtgaccaacagtggcaggtgaggctgtttaggctttcttctgctttggcaataggttaaggtgttcaggcttttttcaggttacagtggggggttttgtttgtttttcaggaacaaaagggagattacaactgatcttggggcaaagtaatctgccagtggaagctagaatggagaagaaagacagactggttggacgggtgagtacagttgtggactttgagtcctgcataaaggcctggctaagtgcttgagagtggctaaggtccagcccttgctttgctgaccaagccattggcctgggctcaaagataaacctggaggaaagaccttttataattcggcttcccagagggagcacctttttgccattcatctgccaggtataaaccatgtgttggatatgctagcagtggcgtagaccgagagttagagatcggcatgacaatccaggtgatattgtgcactacacttagaaaatcacaaaggggaactggttcgggatttctggggaaggtgatggaatcagcacatattgggtgtctagcatcaacaggacctccatgtggagatattcaggaggcccctaaaatgagaggaaaacaggcctggcactctagaaatgggagctgatggtctgctgcagtgggggagctgatgagcccagccagagagcaaggacagagtgacacagaactgctttaggaactgctgtaaacagcaacaactcctttcttggggccaagccacactttaagattcatgatgaggtggaagtgttagaacgtaagataatcaaagggccctttgctgttcttgcattccctttctcaatgccatgctaagcgatgtgcagaaaccaccatacagttttcagctctctgcctaaggtggtgaaattttggtgcccaggcaattgtgccccccttagttggcgcagctcacttggataaagggggagatactcttagccatgactggatggtgagttctaagaaactaagtgttcttaaccctttttatctcctcttctggagcagaagggcagaaagcatagtcccttggtgatatccaactataactcattttccatctggggcacatgtaataactcytaatcataactgtctcatctcatctgaggcgtgaagggccaactcccttactattctctgcgtgaaacagtaaatagaaaaaaacaagttcctggtcaaagaggcttctcacagaaatttagcaaaaagtcttctgttgctgcaatttctctctgggaactgtgagggccagaattcttagtatgagtgacttcataggcaagaatcacagtttgttaatcttatttgtttttttaaaaaaaggattactcattattcggtacattttaaggtccctctctttttttttttttttttttgagacggagtctcgctctgtcgcccaggc

SEQ ID NO: 688758 - DNA, 619 bp, Homo sapiens
tctctcattttttgaatcctgcctttttactctgctttcatgtttttcctgtcttatcaaatctatatatttgttattgcaaatcatttttagaagcaggaaaggtagtaataaacagcagcaagagatcttattagctctatatcacttccccttctgttagtagtttctcttctcaattctacattttaaaaatcccartaccaataatttcaagtatttataacctaattttaaaaacaaagcatagattaaaagcagattgattataatgaagtgttgagttggagccagtatcttttataccttttaatttcattttaatcaatagatattctccagggaactataactttctggtctttcacaatctgcatgaatctcttgataatggctaatttcttaaagacaaattcttgctgaaattaaattaagattaattccatgttcttccctactcagtttttaatcatcttcttttctctttgataagcttttcctgagagatctgaatctttaatatttcttgccctattcagggacacaaagttctgctagattataatgtaacttgccctgatacagcatctctgggtgtgatcactgaccatcatctgtg

SEQ ID NO: 688759 - DNA, 642 bp, Homo sapiens
gcagcttaattaaaattctatcagttttttaaatagaaactgacactaagattccaaaattaatataggaaagtaaagagtcagaaagggccaaaatcattttgaagaaggaggggagaacttcaatacctattataaaactatggtaattaaaagcaatatgatattggcaaccttttcaaggaacaacaataaaagccccaaaacagcaaygggacaatattaatgtttgttaaatctgaatggtggacacatggatgtgtgatataacagtggtccccatcctttttggcaccagggaccagtttcatgggaagacaacttttccacagaccagggtggggttggtggcgggggggtggtggtttcagggtgattgaagcacattgcatttattgtgcactttatttctattattattacattgtaagatataatgaattaattatacaactcactacaatgtagaatcagtaggagctctgagcttgttttcctgcatttagacagtcccatctaggggtgatgggagacagtgacagatcatcaggcattagattctcagaaagagtgggcaattaagaaccctcgcataagaagttcacaaaagggctctcgctcctatgagaatgtaatccctgt

SEQ ID NO: 688760 - DNA, 322 bp, Homo sapiens
tttctcagcctaagggaacacacttcctgggaatgactgagagaaagtgtgcctcctgggacatcagcctgcaggggcgtttctccctgactctcactgtacccacctaatggcacctccactgcagagggacttgtgccttccaggtgttcaggaccccagaaaaagcctgtcagggtgccacactcagcctccaggtgacaatcgcttgttggcgttcaaggtgtctascccgggaaagcgtgagaggaggaatggagcaccggccagcctgagtggttgcaatccagttgcaatccacccacctctgcacaatccaaga

SEQ ID NO: 688761 - DNA, 435 bp, Homo sapiens
gggctacacaaaaattaatttaaagttrtatcctgaggccaggcactgtggctcatgcctgtaatcccagaactttgggaggctgaggcgggcagatctcccgaggtcaggagtttgagaccagcctgaccaacatggtgaaactctgtctctattacaaatacaaaaaattagccaggcatggtggcaggcacctgtaatcccagctacttgggaggctgaggcaggagaatcgcttgaatatgggaggcagaggtttcagtgagccaagatcatgccattgcacttcagcctgggtgacagagctagactccatctcaaataagtaagtaagtaagtaaataaataaataaataaataaataagttatatcctgaatcttttctttaatttcaataagtatttagggaaaaagttacaaaaattgttggaagg

SEQ ID NO: 688762 - DNA, 1090 bp, Homo sapiens
agccaggatagtctcaatctcctgacctcgtgatccgcccgcctcagcctcyggtaaataaacctttgttggaacacagccatgtctattcatttacacattgcatttgtctgctttcactatacaaaagagttcagtagctatattacagattagagatcatatagccaacggagcctgaagaatttactatctgggttttacagaaaaattttgctgacccttggagatctgtgctgagcaatgcagtagccattagccacacactgctcttgagcccttgaaaggtggccggtccaactgaggtgtgctatacatgtgaaatacacaatggacttcaaggcttagtagaaagaagggctctatcttgattatatgtgaatggtgatatgttagattgggttataatgcattagtaaataatgcatttttaaacttactttcacccttttacttttttatcttttcatgtggctgcaagaaaaatttaaatggcataagtagctcccatttgcagttcttacaatatttccaggggcaatcctggtctagaggagttctgatttttttttttaatctgtcttttgagcactggttttagaatgagctccaaagttacaaaaaatgacaaaaagtgagaagcatgtttatatactattctttaacaaaactgtttaaccttaataaacctgaatgcagatacttcagagtacttgaaatatcaatttagtaatcttaagttggagatttctttcccttggctcttgaagaattaagaaattatttggacaataattgagaagttgagaaagagctagagggagctgatattgctcctgctaagagaagaaaacagcagtgctggatcaaggaagagggaaccagagacgctaacgtcaggagcatgactctcaggggcaggtgattgtcagggtccgcgtacctgagatcaaagaggtgcctgtcccaaagaggatgcaagggcagggatccaaagttgactcggtgcctggggctctgagataaaaaatggagcaataaagaacaggaagctgacagatgggaccaacgggtagcttaactagccaca

SEQ ID NO: 688763 - DNA, 625 bp, Homo sapiens
tctgtcctcctcccacgccttcttattttctgtcactctcatcacctgataattacatattataattttcctatttgtctatatccagtccctccccaccagagtgaaaacttaatgagctaatgacttatattgaattgaatttgttctcactgatgatctcccaaaccccagaacatttttgacacacagaagagcgctcaacaawtgcttctcaaacaatgaaatgtacaattagccctaaaacaaccactctttatgccataaatctctctctgaaaatctgttaaaaaaccaaagtaagctagtgaagtgacctgaccaaacaggcatgactcactgacttgcaggagacagggttgcccttgtaagtgacttttgttttctctcttatcctcattcaccctttcctctccctgtcctgggtacagatatttattgcaggtttagagattagcatttccaagtcgttacatggagaattccctgcccttttgtcctgggccagtttgtcactgcaaagtgtcacagtttaatctgataaaggcaatgcattctgcaaataaatccagatccagccataataatcaaaccttaaaggtaaattaagactgtttaatcacaa

SEQ ID NO: 688764 - DNA, 625 bp, Homo sapiens
tctgtcctcctcccacgccttcttattttctgtcactctcatcacctgataattacatattataattttcctatttgtctatatccagtccctccccaccagagtgaaaacttaatgagctaatgacttatattgaattgaatttgttctcactgatgatctcccaaaccccagaacatttttgacacacagaagagcgctcaacaattgcttctcaaacaatgaaatgtacaattagccctaaaacaaccactctttatgccataaatctctctctgaaaatctgttaaaaaaccaaagtaagctagtgaagtgacctgaccaaacaggcatgactcactgacttgcaggagacagggttgcccttgtaagtgacttttgttttctctcttatcctcattcaccctttcctctccctgtcctgggtacagatatttattgcaggtttagagattagcatttccaagtcgttacatggagaattcccygcccttttgtcctgggccagtttgtcactgcaaagtgtcacagtttaatctgataaaggcaatgcattctgcaaataaatccagatccagccataataatcaaaccttaaaggtaaattaagactgtttaatcacaa

SEQ ID NO: 688765 - DNA, 1133 bp, Homo sapiens
tacgaatttgtttacaatgaatcccagtttcattgcattgaagcaaaagcaaaagtctggaaagtttctgctctttgaaagtgatcacgtgctgttcacatcctctcccatgagggctttctgtagatgtttcataggtgtgttaaagaaaaaacatatttatatttttcagaaactaaattgctarttacatctataattcaacttctttattcaagtaattctataattaataaataacttggcatcctcagttaatgatcaatctctgtgagagtctgagggaaatgaattagaatgtgcaggacaaggtcagcacggactccctgtggaccacagcatctcagcctaatggccaaccccaggtagccctaatcactgggtgctgagctaagtgctctgcagagataagccatttccatcctctcagcagtcctatgaggaggttcctggtacgggttgaaatccgaaattcatgggttgaagtcctaagccccagtacctcaggatgtgaccttacctggaaataagggccttgcacatgtcattagtgaagatgggaccacattggaatagaggtggcctgaatcccacatgaatatatccccattaaaagggtgtcaatttgagcaaagacatgctcacagggaaaaagtcatgtgagcaggagaaaagagataaggagaacgagctgacaagcccaggaactccaggatcctggtatcagcaaggcacccaaaggccagccactgtgctcagaaccatcaaccctgctgacaccttggccacagacttctggcttccagaactgtgagatgttgcatttctgttgcttaagatacccagtttatgatactatattacagcagtcctgacaaactagtacagctctcatcattaccccattttcaccaataaaatgaggcttggttttattgtttgatttgtccagtgtgtctcagctaataaaggtggtgctcagctgcagagcacaagctcttaccacaacatcatgatggcccttggcattgacctggtgagcctctctcagtgctggggcaggggagcccagccagtctgataggcttgatgtcccctgcttggaggagcacacaaccaaccactgtcctcct

SEQ ID NO: 688766 - DNA, 1133 bp, Homo sapiens
tacgaatttgtttacaatgaatcccagtttcattgcattgaagcaaaagcaaaagtctggaaagtttctgctctttgaaagtgatcacgtgctgttcacatcctctcccatgagggctttctgtagatgtttcataggtgtgttaaagaaaaaacatatttatatttttcagaaactaaattgctagttacatctataattcaacttctttattcaagtaattctataattaataaataacttggcatcctcagttawtgatcaatctctgtgagagtctgagggaaatgaattagaatgtgcaggacaaggtcagcacggactccctgtggaccacagcatctcagcctaatggccaaccccaggtagccctaatcactgggtgctgagctaagtgctctgcagagataagccatttccatcctctcagcagtcctatgaggaggttcctggtacgggttgaaatccgaaattcatgggttgaagtcctaagccccagtacctcaggatgtgaccttacctggaaataagggccttgcacatgtcattagtgaagatgggaccacattggaatagaggtggcctgaatcccacatgaatatatccccattaaaagggtgtcaatttgagcaaagacatgctcacagggaaaaagtcatgtgagcaggagaaaagagataaggagaacgagctgacaagcccaggaactccaggatcctggtatcagcaaggcacccaaaggccagccactgtgctcagaaccatcaaccctgctgacaccttggccacagacttctggcttccagaactgtgagatgttgcatttctgttgcttaagatacccagtttatgatactatattacagcagtcctgacaaactagtacagctctcatcattaccccattttcaccaataaaatgaggcttggttttattgtttgatttgtccagtgtgtctcagctaataaaggtggtgctcagctgcagagcacaagctcttaccacaacatcatgatggcccttggcattgacctggtgagcctctctcagtgctggggcaggggagcccagccagtctgataggcttgatgtcccctgcttggaggagcacacaaccaaccactgtcctcct

SEQ ID NO: 688767 - DNA, 1133 bp, Homo sapiens
tacgaatttgtttacaatgaatcccagtttcattgcattgaagcaaaagcaaaagtctggaaagtttctgctctttgaaagtgatcacgtgctgttcacatcctctcccatgagggctttctgtagatgtttcataggtgtgttaaagaaaaaacatatttatatttttcagaaactaaattgctagttacatctataattcaacttctttattcaagtaattctataattaataaataacttggcatcctcagttaatgatcaatctctgtgagagtctgagggaaatgaattagaatgtgcaggacaaggtcagcacggactcccygtggaccacagcatctcagcctaatggccaaccccaggtagccctaatcactgggtgctgagctaagtgctctgcagagataagccatttccatcctctcagcagtcctatgaggaggttcctggtacgggttgaaatccgaaattcatgggttgaagtcctaagccccagtacctcaggatgtgaccttacctggaaataagggccttgcacatgtcattagtgaagatgggaccacattggaatagaggtggcctgaatcccacatgaatatatccccattaaaagggtgtcaatttgagcaaagacatgctcacagggaaaaagtcatgtgagcaggagaaaagagataaggagaacgagctgacaagcccaggaactccaggatcctggtatcagcaaggcacccaaaggccagccactgtgctcagaaccatcaaccctgctgacaccttggccacagacttctggcttccagaactgtgagatgttgcatttctgttgcttaagatacccagtttatgatactatattacagcagtcctgacaaactagtacagctctcatcattaccccattttcaccaataaaatgaggcttggttttattgtttgatttgtccagtgtgtctcagctaataaaggtggtgctcagctgcagagcacaagctcttaccacaacatcatgatggcccttggcattgacctggtgagcctctctcagtgctggggcaggggagcccagccagtctgataggcttgatgtcccctgcttggaggagcacacaaccaaccactgtcctcct

SEQ ID NO: 688768 - DNA, 598 bp, Homo sapiens
gcctcacttctctttttgtttggaattaatgaaaatacctgcttatgtcttcattcagcatagctcctgtctctttcttcaggtttgtggggcaccaagatatggaaatccttggcctcgctgtgcttatttgaagccaagaggcttgaagacaatcatgactgtagctggattcaatcttctaaaagatgaaactggaaaaaagctgcaaaagcacagcctttacagccacaaaatgcaacatctggagaaaaagaggatacctctttctcttaaaataagtgggggtccttcccagaagtttttaggacacctcttcggtgtctcattggcctgaattagggcacatccccattcctggataaccaatgggccggggctggattacttttaggtttatcaggcccattcctrcatttggggatgaggtcagccttccttgaaatacacaggctgtgtggggaggagataacttcaaaacacttgctaaaaattagagaactgttaggaagagaaaagagaagaatgggtgttggcctagtaaccaaaaatgtccaccataactttcttagatatcctttcaggatttttttctttc

SEQ ID NO: 688769 - DNA, 636 bp, Homo sapiens
agtatatgttccagtggcataaagtgctatttatcactttcaaatacccttgctgtctaaaacctagtcaaaaaaacagatgtctatagaagacctatctcactgcacagttgaaaatacgastttcaaaacatgctcctgaaggcatatacagttccatggacatggtgatctgcaaagttgttaacacacaataattgaatattagcatcatttacttggaccactctacaatgctaggaggccttcaggatctccttaccaaactcaatttgaaccccctaataaaagaaaactcactgctgagcaatgctacagtctaaagcaatagttcccaactcttaccaaacatcagaatcacctacagagcatttaaaatgcccaggcccatcccagaggggttttgtgagcaagaaaatggcatgatgtatgtgtaagcactttgtaaactcactataaaaatgtaaggcatattaaacagtaatttgaaagtattcacccaccattctagcccacctaattttttgtttgtttgtttgttttgagacagagtctctgtcacccaggctggagtgcagtggcatggtcttggttcactgcaacctccgccttccgagttcaagcgattctcctgcc

SEQ ID NO: 688770 - DNA, 621 bp, Homo sapiens
tatcacatatcttcaggggtcacatatttttgtatttgacactgcatatttgtatatcccctttctttggaggtgcaataggaaacatacagatattaatccagccctcccatcactgcatgagataaatcccaatcataattttgtttcacatgaatatttgtgccaggtaatatttatgtgcygtacatccctgccactgatcaaatttatgttcagactcccaagggatgagaaaaattctagtatatccctcatgtcactacacagaggtggaaaatgcccaaaaacctttctctgctagtctgggtggcaaaaactgagactgaaaatgcagcagttcatcacagaaacccagctttgatccccacagctttgctgaaccaggggatattaggaagagcttgaaatgagtattggaaaaagcatctgtttatttcctgaggggaataaacttcctagtggcaccaccaaaagtaatatacagataaaactgtagtatgagcaataatatttttttcaatagtagtacacagatatagctatagtattctggtgcgtgccctaattccccttactaaggcattggtacaattaatcaaccaagtaagcttagggaaa

SEQ ID NO: 688771 - DNA, 928 bp, Homo sapiens
gaacatggctcactgcaacctcaaactcctgagctcaagcaatcctcctgcctcagcctcctgagtagctggtggtacagatgcatatcaccacgctcagctaatattttaatttttttcgtagagataagatcttaccatgttgcccaggttggtctctaactcctggggttaaaagatcctccagcctcagcctcacaaagtgttgggattacagccatgtgccaccatacctagccaaaaattaatttttaaataattataaaataaaaatagtaaataaacaaatggacacagatcttgcgtccttttttttaaggacagtgtttaatagtactatgtttgtcttaacttagtaagataaatttgtcctgtttatcctaaaactgtataaaataattaaaaaaattttttgtatagttgtatgtrgttcctatacatgtgtcaaaagtttaatatgtcaaaaggtatttatcttttttagagtcttggatttctcaaatggtttatcacagatggttagatttttaattgctatatattctgatcatcataataaatacaactcagtaataccctggagagaaacctgcaaatgtattccttaatggaatttaaaagcatacgaatttagttcagaaagtaggtgttttccaaatgtgttgtaaagataagagtcagatttcacattgttaataatatagtccttttcagaaaatttgttcaagcaagtaagttattatataatctgtacactgactaaaacaaacacaaaacaaaccccagctttccctgcacacacattctcccagcctgttcctctaatccaaaacaccataaatgaaactttcatagctattctttggcctacaaaattaatttaaaatattggaaaattaatccataaaatgtaaagtgtacgcacatt

SEQ ID NO: 688772 - DNA, 883 bp, Homo sapiens
ggccccatctcaaaaaaaaaaaaaaagcccacctctcaactgtggcattggggattaagtttccacacatgaactttgggggacacattcaaaccataataccttggctttggcaaaagattcttagctatgagactatgagcatgggcaataaaagaaaaaaaaataaaatgaacttcatcaaaattaaaagcttttaccgaaagactgaaagaaaatatttgcaaataatgtaaagaacttgtatccagaatatataaagaactcttaccactcaataataaaaagataattagattaaaaagtaggcaaagattctaaatagacatttcttcaaagaagttacagaaatgagaggtagccrcatgaaaagatgctcaacatcattagtcatttgggaattaaaaccacagtgagatgccactttgcaccactaggatgacagccctgctgacaaggtccccactgtgggaagtgcctctgagagttcaaagagggtctcataagtactcacaaataagtccactttaactgggtactttaaggctcttcatagaactaggcaggcaataaattcaagtgacaggcatcctgtacattacttgtcccattaggagggtgagtagggctttcttatagggtgaagcctgtggctgttttcttttcttttcttgcctttttttttttttttttttttttttgagatgggatctcactccgtcacccaggctggagtgcaggggcacaatctcggctcactgcaacctccccctcctgggttcaagtgattctggtgcctcaacctcccgagtagctgggactacatgagtgtaccaccactcctggctaatttttgtatttttagtataaatgggatttcaca

SEQ ID NO: 688773 - DNA, 640 bp, Homo sapiens
ggctcttactacatgttttgatggtgttattgatgatcatgatgagtttcaggtgygtttttgttgcctaataatacagattctctggtgttctctatgacttcattgtatggggtcagcctggccagttctcctcatggccctttctccctttaagccccagaagccatcgggaaaagcctttcaccttattttttcagcaaagcctgcaggatgccatggggggatactcttacaggactattctaggcagcaagttttcttcatacagtggttcagagattttggataagcaataagaatggttctgctgggcccactggtcataacttgtctaattaatgcatgtcccattacttttgatatgtctcccttctccccaggaaacatcagatgcttgcaaaccattttccatatcacagagcaccgggccctggaatctttcttgggccccttcttaagactagattgctcaaagagttgtaggccaaggaatgaatgtatcctgtgttgcacaaaatacatttagatatttatcaagacttaatttaatgaacttttcctcccttgctccaactttactttgtaaccctcctcctgaagaaaaggtgccaacattccactttaagtctaagctgaa

SEQ ID NO: 688774 - DNA, 443 bp, Homo sapiens
acacaaaaataatggttacaatagaagttactggaattgaaattttggttcaacctatattaaaatgtaaggcttttgatatagctaatagatttttgaaatgatcagtcttaacgtttgtaggggagcacactcctgcatggggaaragattcactgtgaagcacagagcacctttatggttggatcatcttgtcattaaagttcaggcgttatctatcctgtaagtggcagaatcaagactgcaatatcgcctgcttttctttttaactcatgttttcccttgactacactggtcctcaaagtaaaacccctgtgtcagtgtactattcatggaatactctgcaattataaccaccttctaatacttttaatacccaatcaaaatttattatacatatgtatcatagatactcatctgtaaagctgtgcttcaaaatagtg

SEQ ID NO: 688775 - DNA, 3071 bp, Homo sapiens
tgtttttgaaggcgtcattctcaaggaactgcctgccagatgaaaataaataaaaatggaggactgtcttcaaccctttcaaactctactgttatcttatatgtgttgtcccttgtaattccttagaagggagccctaaagaaataatttggcattggagtagcccagtagtattccagtaatgtttatctatacaaactaatactgttaggttggctgttaacatacacttcaagcatttttctttagtaccaatgtatctacaggtacacacaaatagtttctgaagtttacgtttcttatccattgaccttctagtatttgcgcactattcatatggataaggtaatttttcaaagcacaatagattgtttacgattaacacctttgcatctggaagtaatcttagtaccagaagctaattaatgtcactcaggctacttataaggcttacacaaaacagaaatatctatataacaattcacttttatcaactctgatagtcaattttccccaatagtcttgatctattattttaatgaccatattgtcaactaaccaaaagctccacagaatttcaatggcagttacagcctccctgagcttttataatagactaagtaaaatgaaaaagtagcataatacacaccctggaagtcatctggaattcctaagccttgattaaatgctctgctgtagctgtaagaatttcaaagattttggctgcacctcatacctgaaggctccctagaggaatatgaattaccacttgggtttacttaggacccttcaagaccacactgtgtctaaggtaagatccttgaaatctctccgctccctcaagacaacaagtggagccattgtcatgtctcagttattcacagtagtgcattggcctctgatttttcttcactcaactctgcccccttcatattgtcctcctgtcaacagtgtcacctttaaaagatgtaaatctgggaatggcattgccttatttgcacattcccaatgcataattgctgttgcctactgtaccaaggttagtcccctcagcctggcacacaaggcccttcaccaccagatgctacccttccttccacccaacctcttggcattcttactaaaaccttctaaactctaatgacatggatatacttattctcctggtatgtttcttcttttatgcacattattaatcaattattgaacaagcaaacatttatgaagcagttagtatctactaagcattaggctaggtgctggaagtacaaagatgaattgcaaacattctaggaaactcatgtattggaagggagaagtaatcagatgttaatacaacaggaaaggcactgcaatgcaggtagcgaagggtcatggtgccactccttccaattcaagacaaacttcagaggtggagcatctcagctgggattgtgtctgtcttgttcatctctatataaatcctcaggatctggacgagtgcttaatagatagtagatgttcataaatatcatgaaaaaaatatcatgctcataaatatcaagctaagaaatggaaaaggaggtattctatgtagatatggctatatacacaaaagcccagttgcatgaaagaacatggcagtaacaacagaatgaagtatggatgaagtacagaacatgacagcccccagaaactgctacaataggcagcagcccctcaatactccttcccatatcccttgctatatcccgccaggttcacttccaggataccctagagtgcttggtctatacacctgagttcctcacttccagagtcagcttacaatacaatttaaactacacatcttctgctctctcctcacctcgctggtattattattattattattattttgagacggagtctccctctgtcccccaggctggagtgcagtggcaccatctctcagctcactgcaacttccacctactggtttaagtgattctgctgcctcagcctccccagtagcttggattacaggtgcctgccaccacgcccagctaatttatgtatttttaacagagatggggtttcaccatgttggccaggctggtcttgaactcctgacctcaagtgatccacccacctaggcctcccaaagtgctgggattacaggcatgagtcaccatgcccagccattggcattatttttaaaaacatgcacacacacacacaaagtttgtcttaatgataagctgcccaacattttaacaaagctttcctttgttgtaaatgtaaatgttgccttcataaaaattacatcttccttcattttatatataacagagcccccatataatatttgtaaaaggttagtttatccttctaaaatatattaatgagactcagttttacttcatgctttgtgtaagtaagcaagtcaatctatcctccagttattctgttatttcagagtttataaatcattattttttattaaataccattaactttggtgaggctccacagtctactgatttctggagaagtattgggcaaactgaaataaaatggagctccatggacaggttcatcrggatcaacagctaaaatgtcggtataccccatttttggtttgcaaatgactacatattcttgaagtatttctggtggattatcatttacatcttcaatgttcacagcaagtgttccagtacatgatctatcatctaaggagacaggaataaggtttagtgttattttaaaattctttcatagtttcttaaagaataaaaagtcaattatattctatacatgatctgtttttaaataaactgattattaaaggaaatgataaataaataagaacatagacagataaatagaatctgcagctaatttgaaatgactattgctactgataatatcagatacaactgtcaataaatcttttaccagaattactaccaaataaaaataaatgtctgaatttcaatctctatttttgggggttccaggtgccacatgttagtaagcagtaaagtggttacagataagatttctaatcccagtatatattcaaaccactaggaagatttttttaaaat

SEQ ID NO: 688776 - DNA, 3071 bp, Homo sapiens
tgtttttgaaggcgtcattctcaaggaactgcctgccagatgaaaataaataaaaatggaggactgtcttcaaccctttcaaactctactgttatcttatatgtgttgtcccttgtaattccttagaagggagccctaaagaaataatttggcattggagtagcccagtagtattccagtaatgtttatctatacaaactaatactgttaggttggctgttaacatacacttcaagcatttttctttagtaccaatgtatctacaggtacacacaaatagtttctgaagtttacgtttcttatccattgaccttctagtatttgcgcactattcatatggataaggtaatttttcaaagcacaatagattgtttacgattaacacctttgcatctggaagtaatcttagtaccagaagctaattaatgtcactcaggctacttataaggcttacacaaaacagaaatatctatataacaattcacttttatcaactctgatagtcaattttccccaatagtcttgatctattattttaatgaccatattgtcaactaaccaaaagctccacagaatttcaatggcagttacagcctccctgagcttttataatagactaagtaaaatgaaaaagtagcataatacacaccctggaagtcatctggaattcctaagccttgattaaatgctctgctgtagctgtaagaatttcaaagattttggctgcacctcatacctgaaggctccctagaggaatatgaattaccacttgggtttacttaggacccttcaagaccacactgtgtctaaggtaagatccttgaaatctctccgctccctcaagacaacaagtggagccattgtcatgtctcagttattcacagtagtgcattggcctctgatttttcttcactcaactctgcccccttcatattgtcctcctgtcaacagtgtcacctttaaaagatgtaaatctgggaatggcattgccttatttgcacattcccaatgcataattgctgttgcctactgtaccaaggttagtcccctcagcctggcacacaaggcccttcaccaccagatgctacccttccttccacccaacctcttggcattcttactaaaaccttctaaactctaatgacatggatatacttattctcctggtatgtttcttcttttatgcacattattaatcaattattgaacaagcaaacatttatgaagcagttagtatctactaagcattaggctaggtgctggaagtacaaagatgaattgcaaacattctaggaaactcatgtattggaagggagaagtaatcagatgttaatacaacaggaaaggcactgcaatgcaggtagcgaagggtcatggtgccactccttccaattcaagacaaacttcagaggtggagcatctcagctgggattgtgtctgtcttgttcatctctatataaatcctcaggatctggacgagtgcttaatagatagtagatgttcataaatatcatgaaaaaaatatcatgctcataaatatcaagctaagaaatggaaaaggaggtattctatgtagatatggctatatacacaaaagcccagttgcatgaaagaacatggcagtaacaacagaatgaagtatggatgaagtacagaacatgacagcccccagaaactgctacaataggcagcagcccctcaatactccttcccatatcccttgctatatcccgccaggttcacttccaggataccctagagtgcttggtctatacacctgagttcctcacttccagagtcagcttacaatacaatttaaactacacatcttctgctctctcctcacctcgctggtattattattattattattattttgagacggagtctccctctgtcccccaggctggagtgcagtggcaccatctctcagctcactgcaacttccacctactggtttaagtgattctgctgcctcagcctccccagtagcttggattacaggtgcctgccaccacgcccagctaatttatgtatttttaacagagatggggtttcaccatgttggccaggctggtcttgaactcctgacctcaagtgatccacccacctaggcctcccaaagtgctgggattacaggcatgagtcaccatgcccagccattggcattatttttaaaaacatgcacacacacacacaaagtttgtcttaatgataagctgcccaacattttaacaaagctttcctttgttgtaaatgtaaatgttgccttcataaaaattacatcttccttcattttatatataacagagcccccatataatatttgtaaaaggttagtttatccttctaaaatatattaatgagactcagttttacttcatgctttgtgtaagtaagcaagtcaatctatcctccagttattctgttatttcagagtttataaatcattattttttattaaataccattaactttggtgaggctccacagtctactgatttctggagaagtattgggcaaactgaaataaaatggagctccatggacaggttcatcaggatcaacagctaaaatgtcggtataccccatttttggtttgcaaatgactacatattcttgaagtatttctggtggattatcatttacatcttcaatgttcacagcaagtgttccagtacatgatctatcatctaaggagacaggaataaggtttagtgttattttaaaattctttcatagtttcttaaagaataaaaagtcaattatattctayacatgatctgtttttaaataaactgattattaaaggaaatgataaataaataagaacatagacagataaatagaatctgcagctaatttgaaatgactattgctactgataatatcagatacaactgtcaataaatcttttaccagaattactaccaaataaaaataaatgtctgaatttcaatctctatttttgggggttccaggtgccacatgttagtaagcagtaaagtggttacagataagatttctaatcccagtatatattcaaaccactaggaagatttttttaaaat

SEQ ID NO: 688777 - DNA, 1216 bp, Homo sapiens
ctagccaatttttatagctgtaaatttttgccaagaagatatgatgcttccacagataacaagtatttgtacatactgttatacttattatcagatctatttttgctttatctcatttgatgttccttttaaaaatactcattttgaatttgatagaagactgataatcatatttgtttctgagtaaagcctgaacaagtcctttcagatattctaggatttcattcccaagtaaagggatgcatgaaaagtcctcatttcagtgaaagaagccagacacacaaggccacatatgtacgatttcatttatatgaatktccagagtaggcaaatccatagagacagaaaagatatcagtggttgccaggggataatgcagggaggggaagaggagaatgactgcttaaaaggtttcctcttggggtgatgaaaatgttccagaactagatagtggtaacagtttcacaacattttaaatgtactaaagtcactgaattatacactttaaaatggtgaaaatgatgaattttaaccattcatagccatgttttatgaattttaccattttttaagtaaagggaaaagaaggttctgagattcaaacctttgcaatcaaaataaactgtcgaatacagaagcccgtaaacatgttctgaatactatttaatttttctgcccatgaaaccaagcctaattctaaataatataagagccaaaataaactgtctaagctggtattaacctttttcttaaattaaaaatgttatcaggttgataggtgcagcaaaccaccatgggacacgtttacctatgtaacaaacctgcacatcctgcacgtgtatcctggaacttaaaataaaataagtgttatcaatgttcattgtgaaaaaatcaacacagaaagaataaattatcaattccattgtctggaaatcatgtttcgggattatatatatgcacaaactttatttccctaaaaagagatgagatattgttcggtagtatatccaactacataattttaccaactacctcacacttataattcttttactatgtgcaggcagtgttctatgtactttaggtatagtaactcatttaatcattcaacaaccccatgaggctggcattgttcattgattttaatgagaaagctaagagaggaaataagtagcctttcaaaggtcacacagaagtaagtgacagatccaggatt

SEQ ID NO: 688778 - DNA, 1711 bp, Homo sapiens
ctctaaaataacatttctggcctggtgtgatggctcatgcctcttaccctagcactttgagagactgacgtaggaggatcattttagcccaagagtttgagaccagcccgggcaacacagtgagaccccatctctaccaaaaaaaataaataattttttttttaattagccatttgtgatggcatgtacctgtagtcacagctactctggaggatgaggtgggaggatcacgtgagcccgagaggttgaggctgcagtgaaccgtgatcatgccactgcactccggtctgagtgacagaataagattctgtctcaaaaataaaaataaaataaaaatcgtttctttttcaaatatatttgtaaaggtgccccgccccgccctgccgtttatatttttttacattaaggaaccgccaaaaatccttgcatgtgtgtgctatgaattgccttgttgtgtaaggcacttagaggtccgtaagaacagccatttgaaatgtgatttcatacatcaaaacaatctattcccacggaggaagctatgaatatctctcaacatcttttggccacccgtgaacatctcagcatcaccaactatggaaaaggaaagattagtaatacataacacatttttcataccaaatctcacttttctttaagtactttttctttgcagggatgtaaactgaccctgacaatgaataaaaaataaataaataaataaaagcactaacttcatatttcaaaatgtcctgtcagctggtgtaaatgtctacctatcaagttaagatcaaaaaagtgaatgttagtggggctagttagctattaacagtgttgatttggttccggtttatggatcctggttttcaaataggtagtatcacatactaaagttaactctgaaggtgaaaacaaatctctattctcggctttcttctattattccctccttttttttttttaattctttgttggacctcctttattcttattctttcagtcccccaggtcaacccttgtctgtcccttggtctgatttctctgtttagtgtctccatctcctctttctacactctccttttaaagtctcttggcttttgttttgttttgttttgtttttgagatgcaatcttcctctgtcacccaggctggagtgcagtggcactgtctcagctgactgcaaactcggcctccagggttcaggtgattctcttgcctcagcctcccgagtaactgggagtacaggcgtgcaccaccacagccggctaattttgtatttttagtagagacagggtttcaccatgttggccaggctggtcttgaactcctgacctcaggtgatccacctgcctcggcctcccaaactgctggtattataggcatgagccaccacgcctggctgattctcctttttaaagccatcttctgcctctcagatcctgcctttgtcgccagcatcccccaactcaccttacattctattactgcgttctctcttcaccctggcattcaaggcctgccagagttgatctgttggggaaatgtgtattatttaaagatgctgtcttaccctaacctagtcttgaccatcaaaaatgtatttcaagtgtaagtagaggtgactgatcttggaattttagcaactccatggaacagcctcycaaaaacgcaaaggaaatcagagcctcatgtttattatataaccaaatgcttt

SEQ ID NO: 688779 - DNA, 818 bp, Homo sapiens
aaatattattgcatttaacaaaacagctttaatttgggggtataatttcaaaacttcagtactgcttataagcaattactctaccctgaaaaatctttcactatctaacatgaaaagaattataattattataatttattgctttcttgctatatgccagacatggtataatgtgctctatgtatacaatatttcagccaaacccccaacaactttgtgaagcaacattactcttatttttcaaacgaggtatttaagacttagagaaattaaatacccaaggtgataatcaggtaaatgggagaagccattggtgacttactcaacccatcagaatcactcattccctacaaaataaaatatacttactattacatctattaaagggatgttttgcccctgtgctcatctattcttgcctgttttcttccttgctcagacttgcccttttgattctattggctttcagccaactattacamatgaagattaaatatgttgattttaccaggcagagccttctgtaatgataagctttctctgaagacattggagaaggggttgggttacttaaggactgatcataataagaagcataaattaacaattttgttaccatgcaaatttatattagattaaaggacaaaagtgaatattataaagggaaatcaaagaaatattacacagaattatacaacactgacaaagttggattttggtggaatatttaaattttcttttggaaagcatgcaaatacatagtgttttgaaaatggagagtagctaattaaggcaaagtgtactctgctaggaatcag

SEQ ID NO: 688780 - DNA, 818 bp, Homo sapiens
aaatattattgcatttaacaaaacagctttaatttgggggtataatttcaaaacttcagtactgcttataagcaattactctaccctgaaaaatctttcactatctaacatgaaaagaattataattattataatttattgctttcttgctatatgccagacatggtataatgtgctctatgtatacaatatttcagccaaacccccaacaactttgtgaagcaacattactcttatttttcaaacgaggtatttaagacttagagaaattaaatacccaaggtgataatcaggtaaatgggagaagccattggtgacttactcaacccatcagaatcactcattccctacaaaataaaatatacttactattacatctattaaagggatgttttgcccctgtgctcatctattcttgcctgttttcttccttgctcagacttgcccttttgattctattggctttcagccaactattacacatgaagattaaatatgttgattttaccaggcagagccttctgtaatgataagctttctctgaagacattggagaaggggttgggttayttaaggactgatcataataagaagcataaattaacaattttgttaccatgcaaatttatattagattaaaggacaaaagtgaatattataaagggaaatcaaagaaatattacacagaattatacaacactgacaaagttggattttggtggaatatttaaattttcttttggaaagcatgcaaatacatagtgttttgaaaatggagagtagctaattaaggcaaagtgtactctgctaggaatcag

SEQ ID NO: 688781 - DNA, 977 bp, Homo sapiens
agtcaaatgagaaagcctgatttaatgttaaattatatagagctcrcttatttataaattcatacagcagcatcaatctctgtaacaaaacccactgaaatcaatcagtttgcaagtactaaatatggagtgttcttcagtatctggctctgtctacatatttatatttatcttttgatattcattccttctgttccttctctagtggcactaaactgcatgcagttttctttttttctttttagagacacggtctcactttgttgcccaggttggagtgctgtggcatgatgttggctcactgcaatcttgaccttctgggttcaagcaatgctccctcttcagcctcctgagtagctagagctacaggcatgcgccaccatgcctagataatttttgtattttttgtagagatgaggtctcgctatgttgcccaggttgatcttgaactcctggcttcaagtgatcctcgtgccttggtctccttaacataacaccacaaacaacagcggcttcaacaagacagaaacatatttctcaactataacgagataccatctcacaccagtcagaatagctattaacaaaaagtcaaaaaatagcagagggttgtgaggttgtggagaaaagggaatgcttatacactgttggtgggagtgaaaattagttcaaccattaaggaaatattgcttctcttcaaacaaaaaatacaaattctggccaggtgtggtggcttattcctggaatcctagcactttgggaagccaggcaggagaatcacttgaggccaggagtttgagagcagcttgggcaacgtggcaagactctgtctctacaaaagatgtttttttttcaaattacctgggtgtggtagcacacacctgtagtcctagctacttaggaggctgaggcaggaggattgcttgagcccagtttgaggttgcagtgagctatgattgtgccactgcattccattc

SEQ ID NO: 688782 - DNA, 977 bp, Homo sapiens
agtcaaatgagaaagcctgatttaatgttaaattatatagagctcacttatttataaattcatacagcagcatcaatctctgtaacaaaacccactgaaatcaatcagtttgcaagtactaaatatggagtgttcttcagtatctggctctgtctacatatttatatttatcttttgatattcattccttctgttccttctctagtggcactaaactgcatgcagttttctttttttctttttagagacacggtctcactttgttgcccaggttggagtgctgtggcatgatgttggctcactgcaatcttgaccttctgggytcaagcaatgctccctcttcagcctcctgagtagctagagctacaggcatgcgccaccatgcctagataatttttgtattttttgtagagatgaggtctcgctatgttgcccaggttgatcttgaactcctggcttcaagtgatcctcgtgccttggtctccttaacataacaccacaaacaacagcggcttcaacaagacagaaacatatttctcaactataacgagataccatctcacaccagtcagaatagctattaacaaaaagtcaaaaaatagcagagggttgtgaggttgtggagaaaagggaatgcttatacactgttggtgggagtgaaaattagttcaaccattaaggaaatattgcttctcttcaaacaaaaaatacaaattctggccaggtgtggtggcttattcctggaatcctagcactttgggaagccaggcaggagaatcacttgaggccaggagtttgagagcagcttgggcaacgtggcaagactctgtctctacaaaagatgtttttttttcaaattacctgggtgtggtagcacacacctgtagtcctagctacttaggaggctgaggcaggaggattgcttgagcccagtttgaggttgcagtgagctatgattgtgccactgcattccattc

SEQ ID NO: 688783 - DNA, 599 bp, Homo sapiens
atttcttgaagtttttctaaactgccacatacctataatacatttggcatatacatcctagcaaattccaatcctgtgatgtccatttcagagtgcacaattttgacagactgttagtgactgggaagtttggggtttttttccctttattatttcaatagctaactttaagtagatataataaataaggtaaaacattgcacaatgagaaagatggccagagagatgcctttttgtcctgttttgcctgttttatctctgcaaaggcactcctggtatttttcaaccacaaaacaagaatttatcagtgtataagctaagaatcaattcagacaagtccatcttaggaaataccactcacggatgctttcaaaatcaatagagcattgcaaggaatcaagggctgcaccataaacttgacaggactaaggcaaataacacatctccgctctgcagttaccacgctaaaacaatctggctcacagcatgcaaatggccattgtgtacacatttacagactagaacactgaagcacagcaggacagctaaactgtgcctgcctccaacagacccaactgytgacgcctccaaatgtgacc

SEQ ID NO: 688784 - DNA, 649 bp, Homo sapiens
cacatctgtcttatctctactacttgagtgtaaatgcctccagggcagaggctggtacgaggtgtagcttgcatcctccccgggatgtgtgatggcagcctggggaagctggcccatgtgggccccagctttccttagcatctcrtcattcagctggaatactcttaaccctctccatatgcttatctaggggaatgaaaacttccttctgtcttcctaggttctgtgtctgggcttaagaattaaatggacataagaccgattaacagggaaaaggcatacacattttatgcgatatttttatgtgtacacaggagtcttcaaaagggaaataaagacccgaagaagccacgaagcccaaaagctcatatgcctttttacacaaagaacgataaattgcaggatctgacaagacaaaggggctgggactcagggcagtaaactgtgggacagtgactaggaaatatatgggggaaactaatgggagataagggttattttagtaggtttgtttgtacaggtccattgactcccagtctctggtgataagaatatccttctcttcctggtacagggaggacacctttctcatgggaaattttatgaactacttttaggtagaaagggggaggtcagggagcctttcctg

SEQ ID NO: 688785 - DNA, 626 bp, Homo sapiens
cggtgtccacccacattgacgatgggtcttcttctcccagtctgactcaaatgttaatctcctccagcaacaccttcactgacacacccagaaactattctttaccaattatctaggcatccttcaatccaattaagttgacacctattattaaccattacaatcctgaaaccatcttctgctcccctgtccgtggaaatattgtcttccacaaaaccagtccctgttgccacaaaggttggggactacrtagaactcaatgaaatgagaagtagtttctgattcaactaatgtctgttaagtgattctctctataggtccaagtattatgagcaacctcacacaatcacattcatgagatttctattactctgtgtgttggacttcaaggaaggaatggaatgccatcattaggcaccaaatatttccactattgattaacattgagatttttagtaaatatttaggagtactgggggatgaaggagagacaacactatttattcttgtactagaatactcatttctaatgcctataattaaatcaataggagagttattgagaaaatgtgggcattttgagatagttgaagagtaagtattccatatgtatgtcagttgaaaat

SEQ ID NO: 688786 - DNA, 1946 bp, Homo sapiens
tgtttcccctttctcctctcccttatccctctctccctatcataaggagttctctgcaaaggttttctattgagggtccctaataaggatagctcagatgggggtgcctgagacttgaatggcagacatgcacaggaggatggttggctagcggggaatgagtcctagactgcagctcccattagatattgtaatgcactggctgtttgccaattctggtatagggagagtatctttgtctagtgaggcctgccaggtaaagccattgtcatggcctatggttaggtctgaaagattacacatagggtttctgcctggagttggactcctcagatgccttttggaatttctgtcaagtggtaaacattaatggaagattaaaacaactccaatttgacaagacaactaagggcactgttcatgaagagtgggctcttgctgtggaaacttggataatttaggatactatagagaagtgtggaatgaataatataaaaagaatggtacaaataccatccacagttccatgatcagttataaaattaagtatgtaatacattcttgggttttcttctcttctgcattgtcatgtatataattgtttgtcttattttatcttccatttttcctatcatttttagggtaggctggtttgaataacttcataatttattatcttatttcaggatattaagacatagttgagactgaatctgaagaggagtgaatatcatggatacctattttggataggaccactgcattttaatttgtgcaacatatatttgaattatatttgacaggatcatgtacttgttactgttactcttttgaagtttaagctttagaaaaggcaggtgcatggatattgaatagtcttaagctggaccatcggctatttcagactggcttactcaggcatattccaaaactctggtagtttgactaagtacttgctcaatttggaacagctaaaaatgatatccccaggcttactcacaattcaggttttacattaaacctatcttctttaaggaaaagagcctgagatagaaggtgccttcctattctttttcctgacaagcagtgtaacaaaaccatttactttcctgtaacgacagtcacaaatgaccaaatgtccagtccttagttctgtggccaacattctgtgttattcaaatatgaaccatggctgagatcctatgatcaagaagcaagcagctatgacagaagtattttaatgcttagagaaaaaaaaaacaaaggtagcaactaactgttaggttagggttagtctgcagatacctggattaagatatcttaagccactgtgtggtccctggctgaccagagtgagttcatttatatctatctcctctatttggataacaataaaaacataacagagagagatggattccataaatatgactgttgaaaatgttatagctacagaggatctaagatgtatgtttggtagttggactaatrtattgtttggatcaaataaaatatgtgttagagaatgcaactgtttattcaaagtataggggcacagtttaggcccagatcagtcaggaaggtggcaaactgtttcacacacttcctgccatgtaaatcagaaatgttgtgtagaacagaacttatatacaagctaaaataagtaaacacaaaacaaaagatagtgaccaaaatctttagcaagaagaggtgcatcacaaaaggaaagaggaacaggtatgacctgatatgaaactataaggtacccctgtaagagttatgaatggaggctgctacagtaagtctaaggccaacaatgtagagagaaacagatgaaatttttcttcgtattgttaaattaaaatgcaaacattcgagcttcccagcttcaacatcaaagtagaaaaaaaaaaagaaatttgcattagaaatgtgtgtctagcttt

SEQ ID NO: 688787 - DNA, 1946 bp, Homo sapiens
tgtttcccctttctcctctcccttatccctctctccctatcataaggagttctctgcaaaggttttctattgagggtccctaataaggatagctcagatgggggtgcctgagacttgaatggcagacatgcacaggaggatggttggctagcggggaatgagtcctagactgcagctcccattagatattgtaatgcactggctgtttgccaattctggtatagggagagtatctttgtctagtgaggcctgccaggtaaagccattgtcatggcctatggttaggtctgaaagattacacatagggtttctgcctggagttggactcctcagatgccttttggaatttctgtcaagtggtaaacattaatggaagattaaaacaactccaatttgacaagacaactaagggcactgttcatgaagagtgggctcttgctgtggaaacttggataatttaggatactatagagaagtgtggaatgaataatataaaaagaatggtacaaataccatccacagttccatgatcagttataaaattaagtatgtaatacattcttgggttttcttctcttctgcattgtcatgtatataattgtttgtcttattttatcttccatttttcctatcatttttagggtaggctggtttgaataacttcataatttattatcttatttcaggatattaagacatagttgagactgaatctgaagaggagtgaatatcatggatacctattttggataggaccactgcattttaatttgtgcaacatatatttgaattatatttgacaggatcatgtacttgttactgttactcttttgaagtttaagctttagaaaaggcaggtgcatggatattgaatagtcttaagctggaccatcggctatttcagactggcttactcaggcatattccaaaactctggtagtttgactaagtacttgctcaatttggaacagctaaaaatgatatccccaggcttactcacaattcaggttttacattaaacctatcttctttaaggaaaagagcctgagatagaaggtgccttcctattctttttcctgacaagcagtgtaacaaaaccatttactttcctgtaacgacagtcacaaatgaccaaatgtccagtccttagttctgtggccaacattctgtgttattcaaatatgaaccatggctgagatcctatgatcaagaagcaagcagctatgacagaagtattttaatgcttagagaaaaaaaaaacaaaggtagcaactaactgttaggttagggttagtctgcagatacctggattaagatatcttaagccactgtgtggtccctggctgaccagagtgagttcatttatatctatctcctctatttggataacaataaaaacataacagagagagatggattccataaatatgactgttgaaaatgttatagctacagaggatctaagatgtatgtttggtagttggactaatatattgtttggatcaaataaaatatgtgttagagaatgcaactgtttattcaaagtataggggcacagtttaggcccagatcagtcaggaaggtggcaaactgtttcacacacttcctgccatgtaaatcagaaatgttgtgtagaacagaacttatatacaagctaaaataagtaaacacaaaacaaaagatagtgaccaaaatctttagcaagaagaggtgcatcacaaaaggaaagaggaacaggwatgacctgatatgaaactataaggtacccctgtaagagttatgaatggaggctgctacagtaagtctaaggccaacaatgtagagagaaacagatgaaatttttcttcgtattgttaaattaaaatgcaaacattcgagcttcccagcttcaacatcaaagtagaaaaaaaaaaagaaatttgcattagaaatgtgtgtctagcttt

SEQ ID NO: 688788 - DNA, 1946 bp, Homo sapiens
tgtttcccctttctcctctcccttatccctctctccctatcataaggagttctctgcaaaggttttctattgagggtccctaataaggatagctcagatgggggtgcctgagacttgaatggcagacatgcacaggaggatggttggctagcggggaatgagtcctagactgcagctcccattagatattgtaatgcactggctgtttgccaattctggtatagggagagtatctttgtctagtgaggcctgccaggtaaagccattgtcatggcctatggttaggtctgaaagattacacatagggtttctgcctggagttggactcctcagatgccttttggaatttctgtcaagtggtaaacattaatggaagattaaaacaactccaatttgacaagacaactaagggcactgttcatgaagagtgggctcttgctgtggaaacttggataatttaggatactatagagaagtgtggaatgaataatataaaaagaatggtacaaataccatccacagttccatgatcagttataaaattaagtatgtaatacattcttgggttttcttctcttctgcattgtcatgtatataattgtttgtcttattttatcttccatttttcctatcatttttagggtaggctggtttgaataacttcataatttattatcttatttcaggatattaagacatagttgagactgaatctgaagaggagtgaatatcatggatacctattttggataggaccactgcattttaatttgtgcaacatatatttgaattatatttgacaggatcatgtacttgttactgttactcttttgaagtttaagctttagaaaaggcaggtgcatggatattgaatagtcttaagctggaccatcggctatttcagactggcttactcaggcatattccaaaactctggtagtttgactaagtacttgctcaatttggaacagctaaaaatgatatccccaggcttactcacaattcaggttttacattaaacctatcttctttaaggaaaagagcctgagatagaaggtgccttcctattctttttcctgacaagcagtgtaacaaaaccatttactttcctgtaacgacagtcacaaatgaccaaatgtccagtccttagttctgtggccaacattctgtgttattcaaatatgaaccatggctgagatcctatgatcaagaagcaagcagctatgacagaagtattttaatgcttagagaaaaaaaaaacaaaggtagcaactaactgttaggttagggttagtctgcagatacctggattaagatatcttaagccactgtgtggtccctggctgaccagagtgagttcatttatatctatctcctctatttggataacaataaaaacataacagagagagatggattccataaatatgactgttgaaaatgttatagctacagaggatctaagatgtatgtttggtagttggactaatatattgtttggatcaaataaaatatgtgttagagaatgcaactgtttattcaaagtataggggcacagtttaggcccagatcagtcaggaaggtggcaaactgtttcacacacttcctgccatgtaaatcagaaatgttgtgtagaacagaacttatatacaagctaaaataagtaaacacaaaacaaaagatagtgaccaaaatctttagcaagaagaggtgcatcacaaaaggaaagaggaacaggtatgacctgatatgaaactataaggtacccctgtaagagttatgaatggaggctgctacagtaagtctaaggccaacaatgtagagagaaacagatgaaatttttcttcgtattgttaaattaaaatgcaaacattcgagcttcccagcttcmacatcaaagtagaaaaaaaaaaagaaatttgcattagaaatgtgtgtctagcttt

SEQ ID NO: 688789 - DNA, 672 bp, Homo sapiens
ccagctactcgggactacctttataagagctttggagttcacaaagtgattttgtatatagcatctcattggattctcacagcaatcctatggaaatggccagacaagtttgataatgctcatttcacaagtgaagaaaacaaggactcagagaggtaaactgaaattgtgcgatttcgcacaacaaataaggagagtgcccagcctggaacccaggtgtttggacttctggtctaccgctctttccattaaatcacaactttgctgtttcatttacatcccaggtttaccaatctcattggaactgatctccttcctaatcagttccttctcctactttctcccttttctaagttgtgaataaaccgaaggacttgagaagtcataacctggccagtgagaacacatgcaaatatggaatttgaaaatagttacagaataatacacacatgaatgaaaggtgagtttgtgcttagtaggtaaattcctaaaggaaccaatcaatgtaattcaaaataaacctaagtaggcaggatgcrgtggctcacgcctgtaatcccagcactttgggaggccgaggctggtggatcagctgaggtcaggagttcaagaccagcctggccaatgtgacacaaccttgtctctgctaaaaatacaaaaaaaaaaaaaaaa

SEQ ID NO: 688790 - DNA, 1123 bp, Homo sapiens
tgccatacatctacaccatctgatctttgacaaacctgacaaagcaatggggaaaggattccctatttaataaatggtgttgggaaaactggctagccttatgcaggaaactgaaactggaccccttccttacactttatacaaaaattaactcaagatgcattaaagacttaaaagtcagttctaaatgtgtaaaaaccctggatgaaaacctaggcagtaccattcaggacataggcatgggcaaatacttcatgactaaaacaccaaaagcaatggcaacaaaagccaaaattgaaaaatgggatctaattaaactaaagaacttgtgtgcagttttatttgggagtgtgagtggggtacctctgagttttaaaaatgaagaaagtaagtagtcgtgctttcctgactctttggtagacatagccttttaagacagtcattctgagctgttatrgtcttagggttttctgtactactaaaacttattgacgacatctaaccaagaacttgaattaaatttttttttttaaaaaagaaaatcacccaaatacacattaaaaacctcttacaacatatgtgcacattcatagataccctgtagaacttgattttgtgtattaaaaccttgtagaaaagttcagacagtgcacacaatgactgcaacttggtctttgcaaaatcagtgatatatatttcagatctatccacattgacccagcgaggtatttgatttattgtatgatctaatgatatgccatgtgatgactgcagcatatttaattatgctttcttcatgctgataccatatggtcataaatatgatgacataccagcatggatatgcttacgtggttggttttattgatttgtactatattagaaatgaaacagaagtattagaaatcctagcaagcatagctgtatctctcccatggctgtgttgattgcaacagtttccccttaaagcatgtctttttgacatgtcatgaccctgagaaaatccagtgtatgcttttcagagaatgacagtaaggagaggaaatggccgatggtcaaactgttacttgttctcttggctccccctcatgaatgttaaactctaaactactcaggtcacaat

SEQ ID NO: 688791 - DNA, 1123 bp, Homo sapiens
tgccatacatctacaccatctgatctttgacaaacctgacaaagcaatggggaaaggattccctatttaataaatggtgttgggaaaactggctagccttatgcaggaaactgaaactggaccccttccttacactttatacaaaaattaactcaagatgcattaaagacttaaaagtcagttctaaatgtgtaaaaaccctggatgaaaacctaggcagtaccattcaggacataggcatgggcaaatacttcatgactaaaacaccaaaagcaatggcaacaaaagccaaaattgaaaaatgggatctaattaaactaaagaacttgtgtgcagttttatttgggagtgtgagtggggtacctctgagttttaaaaatgaagaaagtaagtagtcgtgctttcctgactctttggtagacatagccttttaagacagtcattctgagctgttatagtcttagggttttctgtactactaaaacttattgacgacatctaaccaagaacttgaattaaattttttttttwaaaaaagaaaatcacccaaatacacattaaaaacctcttacaacatatgtgcacattcatagataccctgtagaacttgattttgtgtattaaaaccttgtagaaaagttcagacagtgcacacaatgactgcaacttggtctttgcaaaatcagtgatatatatttcagatctatccacattgacccagcgaggtatttgatttattgtatgatctaatgatatgccatgtgatgactgcagcatatttaattatgctttcttcatgctgataccatatggtcataaatatgatgacataccagcatggatatgcttacgtggttggttttattgatttgtactatattagaaatgaaacagaagtattagaaatcctagcaagcatagctgtatctctcccatggctgtgttgattgcaacagtttccccttaaagcatgtctttttgacatgtcatgaccctgagaaaatccagtgtatgcttttcagagaatgacagtaaggagaggaaatggccgatggtcaaactgttacttgttctcttggctccccctcatgaatgttaaactctaaactactcaggtcacaat

SEQ ID NO: 688792 - DNA, 1123 bp, Homo sapiens
tgccatacatctacaccatctgatctttgacaaacctgacaaagcaatggggaaaggattccctatttaataaatggtgttgggaaaactggctagccttatgcaggaaactgaaactggaccccttccttacactttatacaaaaattaactcaagatgcattaaagacttaaaagtcagttctaaatgtgtaaaaaccctggatgaaaacctaggcagtaccattcaggacataggcatgggcaaatacttcatgactaaaacaccaaaagcaatggcaacaaaagccaaaattgaaaaatgggatctaattaaactaaagaacttgtgtgcagttttatttgggagtgtgagtggggtacctctgagttttaaaaatgaagaaagtaagtagtcgtgctttcctgactctttggtagacatagccttttaagacagtcattctgagctgttatagtcttagggttttctgtactactaaaacttattgacgacatctaaccaagaacttgaattaaatttttttttttaaaaaagaaaatcacccaaatacacattaaaaacctcttacaacatatgtgcacattcatagatamcctgtagaacttgattttgtgtattaaaaccttgtagaaaagttcagacagtgcacacaatgactgcaacttggtctttgcaaaatcagtgatatatatttcagatctatccacattgacccagcgaggtatttgatttattgtatgatctaatgatatgccatgtgatgactgcagcatatttaattatgctttcttcatgctgataccatatggtcataaatatgatgacataccagcatggatatgcttacgtggttggttttattgatttgtactatattagaaatgaaacagaagtattagaaatcctagcaagcatagctgtatctctcccatggctgtgttgattgcaacagtttccccttaaagcatgtctttttgacatgtcatgaccctgagaaaatccagtgtatgcttttcagagaatgacagtaaggagaggaaatggccgatggtcaaactgttacttgttctcttggctccccctcatgaatgttaaactctaaactactcaggtcacaat

SEQ ID NO: 688793 - DNA, 591 bp, Homo sapiens
gaatcagtaaagatactaatttctttttgtggagggcagaaagtccagtggaacataggaaatcaaaaatattaacttctgctattttaagcacttccttgtaacaaaaattccctaaacaatttgggatattaaaataactcagattaacaagtcactttatacttttgctactggatgttaaaaaagtcatccatttggctaattttggaattaaaccttgtataatttccatgcttatatcccccctttaggaattacactaatgtcctaagtttactttcagagcattttcagaagcagcaacaaaatatggcagcagaaatgtgatcacatgaattagatgcttaaatttcaatccagcaaactctacgtaaaagttttaaaatgagaaatcttttttatagagtgctaaaattaagacccagatatgtaaacacaccaaaaggttcctttgtttttaaattcctgagtcaaacgattaataagatattgtgcaaatttttaaaagttctyctagaaaatctgaggtgtaagaaacattgtatctttataagtttcaaagcccatccacatttgtcacacacaaac

SEQ ID NO: 688794 - DNA, 514 bp, Homo sapiens
caaggagttcatcttagagctgctgtccaacctgcactcgcgtgggaacgagaagacactcgtggaggcgtcggcagagcaggcagactaaggagttcatcttctcagaactgctatccaacctgtactcgcgtgggaacgagaagacactcctggaggcgtcggcagagcaggcagaccaaggagttcatcttctcagagctgctgtccaacctgcactcgcgtgggaacgagaagacactcgtggaggagtcggcagaggaggcacagcggcgtgacgagactcgcgtgggaagaagaagacactcctggaggagtcggcagagcaggcagaacaaggagttcatcttctcggagctgctgtccaacctgtactcgcgtgggaacgagaagacactcctggaggagtcrgcagagcaggcagaccaaggagttcatcttctcagagctgctgtccaacctgcactcgcgtagggacaagaagacactcctggaggagtcgctagagcaggca

SEQ ID NO: 688795 - DNA, 2404 bp, Homo sapiens
aatatgaatgttttaattttagatatataaaattattttttccaatatattgtctcaatgtgtagttcaactaaggcttcccagacccttttctttcctcagtaacatgaaagaatacttgtaaaagttgtgactggctttactacttaattagaggttcatcatttaatacagtggcacataytgaacaagaaaatgtttgtacttttttttaaaaaaaaagaagaaagttaaaattgtcaaatagaataaaggcttttattaaatttaataggggaagaagagaaattttatttctcttctgttgtagattcatagattaatcagtgaagagaaatttactaccagcttttatctttatttctgcactttgttgcctatctccaactgacacactgctccaagaatactttacgtggattgaatagctatgctgagacatttgtgtttccataatgtaagtggatttaagggttatgcaattatccaagaaacagaggaacagtgatggtaaatataaaaatgcacacctggggaataagaataacccagtgtgggcctccctctaatgtctctggttgtggaatctcagcaagtctcttctccttccatgtactcagttttttcagctttgatgagagaggagaggtctgcataaattcctcctgttgttactatgaatctcacgctgaggaaaagattttagatactattagacctctcagccgtaaagatctgacttgagaattcaccctagctttattgccaccaacttccaacatcaacatcttttaaatacaaacgaaatggaggaaaacactgcatttgacagcatcgtttttcttcttaggactagctcctttacaagatttccactacaaagcagattttaatcctgccaatccctcaagtggcattttctcaatattttatatgttgagggaaaaaaccagcactttaacagccatagcactgcagatgatggagttatgattcaaactcttggctgtctgactttggtcccttgtaaaattttagtgtatagcaggacaattaaaatcccattccaccagtctgcattctgcctcaaaaatcaatccaaacatttcagaacttacatttattcatgttaagactctatcttccccagatataaaaatgtatccaagttgatgatttgacagatttagggacagaatagttatatctagccacattagatggatagcaaaattagctgagacatttctattccatgttgctaaggagaatgagtcagcctcagtggaggaatcagattgtgaaggatgtgttttctcagtcagagcaggaaatgaaaacttacggaagattttctactcattcagagtattccttcagctcttaccttctgctttgtattacaagtgagaaataagtatgtttaattattacaaaataatattataatgtgggctagttaacttgtggtagtttctaactcttgtatcttatttatatttctaagtattgcaactagagggaaaatgggataaggtaaatgaagggtctataatttatttaacaaatcaaaatctctttcaatccttctttcgccaaaatctttctctctctcttttatgcctcaccattgttttggcaatctctggattatcttttcctgcaaatattgcaatcaattacattttaaatccactgtctatgttatttgcaatacatactctggagaattacagtctgtcttaaaatgggtattgatgggaaatgaacctgctttgttctttgcctttgccttttaaattctagtttttaaactttatcctttcaattctattctgccttttaaatatcttaagccttgtcaataaagcagctttatgaaaagagtttctggaatcatgggaacatggaaagtgctttgggagtttttattccaccattcccagagatcttttacatatttgacattgtgttattatgtgtcattaactcaaatggatgtaacaatgttgcaaatagaaataccatgtgacatctttcggtttttttaaattcttacaagcaggtcatgattaacaaatttagagaaaatgacaaaatgtaacctcccacacttgttgctaaaatatgaaaaattacatgcatgcaaaatgatcagttgacataagaaaggcaggtagtaaatatacaaaagtgaaaatactcacctttgttaagtgacaataatgtgtataaatgtatatttgagatcaaattatgcatacaaatgtatatcaaggagctggtttttacgctaacacattattaaaaattacaattgttgaagccattgctaccaaaacacagtaaaattggagcatgcctatactttttgcgttgtaaggtggtataggctttttgaaaa

SEQ ID NO: 688796 - DNA, 895 bp, Homo sapiens
cagttacatatggcataacatggggagaactgtatagattctggaaacatgaaacctgtgttgaactgcagcatttattatttattacataagttatttaactcctttatgtctcattttactccccttttccaagaaatataaattatttaatcataatataatcaaagaattttggatatataaaatgaattcaatttatgagaaattcaggggacacataacaattatttatgtttcacagcttctatgagtcttgttatttaatgccacatttttttttctttttctttttttggagatacagtctcagtatgttgcccaggctggagtgcagtggctcaatctcagctcactgcaaactctgcttcctgggttcaagtcattcttctatctcagcctcctgagtagctgggattataggcacatgccaccagggccagctaatttgtgtatttttagtagagacggggttttaccatgttggccagactgatctcaaactcctgaccttaagtgatccgcccacctcagactcagcctcccaaagtgttgagattacaagcgtgagcagctgtgcccagccttaatgccatgtttcatggkttttttttcttttttttttttttttctcatttgatgggccattgggttttctctcctttaaaatttaggacatttactctatttgtgttttaatatgagcatatgactaatgctgcacttttcttatcatcttggttttgtgtgaaagattttcctaatagttagggaaaactgaaagacttacatagtggtttagagaaggcagaaaagtaactaattaaatgcgagttataggaacttctctttctgctagggaacatgaccttatataaaactcaaaaatggtttc

SEQ ID NO: 688797 - DNA, 668 bp, Homo sapiens
tttacccacagccacaaagaagctacatcatcctttgctataacaaacacataacttaaatctgcttgcgaagtttatatgaaaacactttagcacctgaaggccatccatatcatcattgcaccatyatgataacttgctggttaaaatagaggatgcatccatcagataaaagtgttctttgctccatcttgcttttaacccagatacaagcaaacccatgaagacacaggagttgtgctaggcaattgtcgtgctccatgaaatgggccacattttgttttctggtctttgtttttgcacttgtctaccactcaccagcatttttaaaggatatgcatgtcaggtttatggatgagggttttacatcattcactccacaagaaaaaacaaacgacatgaccaaaatgcctcttttcacccaacctttaagaatctatttgctgcctttgtgctatgcactgtcaataattttttgctgtctctgaaaacctagaaataaatatagcttcactgttagttttccagttttcaaggaatagctattatgtaaggagtttggactgagacagtcccagaatgtggacaatgtctaagaaatgagcactataaggataaaataaacaagaatccacataaaatggatccaattggtatttacatcacct

SEQ ID NO: 688798 - DNA, 635 bp, Homo sapiens
agtttcggaatcattgctttaaactttcaacttacctttttttttgaagacagagtctcggtttgctgctcaggctgcagtgatcacagctcacaactcctgggctcaagtgatctctccaccgcagcctcctgagtagctgggactacagggaccatgtcaccatgcccagctaattttttactatttttttttttcagctgggtgcagtggctcacgcatgtaatcccagmactttgggagaccaaggagggcaggtcacctgaggtcgggagttcaagaccagcctggccaacatggtgaaaccctgtctctactaaaattacaaaaattagctgggagcggtggtacatgccagtaatcccagctactctggaggctgaggcacgggaatcacttgaatccaggaggtggaggttgcagtgagccaagatcatgccactgcactccagcctggatgacagagtgagatgctgtctcagaaaaaaccaaaccaaaccatatatatagttttttttcagcccaggctaaccccagacctatcttaaatgtttcactgaggatggctttctcgaaacttattcatgttgcctgtcctgcttcagacaggctccccaggaaaggacccagaggtc

SEQ ID NO: 688799 - DNA, 635 bp, Homo sapiens
agtttcggaatcattgctttaaactttcaacttacctttttttttgaagacagagtctcggtttgctgctcaggctgcagtgatcacagctcacaactcctgggctcaagtgatctctccaccgcagcctcctgagtagctgggactacagggaccatgtcaccatgcccagctaattttttactatttttttttttcagctgggtgcagtggctcacgcatgtaatcccagcactttgggagaccaaggagggcaggtcacctgaggtcgggagttcaagaccagcctggccaacatggtgaaaccctgtctctactaaaattacaaaaattagctgggagcggtggtacatgccagtaatcccagctactcyggaggctgaggcacgggaatcacttgaatccaggaggtggaggttgcagtgagccaagatcatgccactgcactccagcctggatgacagagtgagatgctgtctcagaaaaaaccaaaccaaaccatatatatagttttttttcagcccaggctaaccccagacctatcttaaatgtttcactgaggatggctttctcgaaacttattcatgttgcctgtcctgcttcagacaggctccccaggaaaggacccagaggtc

SEQ ID NO: 688800 - DNA, 891 bp, Homo sapiens
tccctccttataagtacatgaatggcatgcccagtgcctgaagaaacctggagtacataatgacccagccacccatgactcagaatgccatgggtgcaaaaatcacggcctgttcctattaagtgtcctgacaaatcattacagtgacaggttcagagaaatacaagcaacccaaagtcaatatgtagcaatcaatctagcaaataactttacagcctagccctagtgaaccaatcaaactcagtgactgaaaagaaggtgggcttaccaggctaataattaatgccacttggctgatgtgtgggatcatgctaccttgaacctttagcatttactgagccayggttctcaaactttagtaagcattggaatcacttggagggctttttaaaaaagagtgttagactcgacccccacaatttctgactaagtccgcagggagcctgggaatctgcattcctaacaaattcccaggtgatgttgataccacaggtctgaggaaccacacactgactatgactatatgaacgcttgagtgtccacttttaaaaatactcaaaagctatataatatagaggtcttagatgatttagatgataacatattgtctgaataaacaggatgtggagaaatggaacccttctactctgttaatgggaatgtaaattagtacaaccattgtgaaaaacagtgcagacgttcctcaaaaaactgaaaatagaatcaccacatgatctggtaatcccactgctgcgtatttaccccaaatattttaaatcagtttattgaaatgatgtctgtacacccataccaagttatggaagtgtccatcaacagatgaatggataaataaaaggtggtagataggctgggcacagtggctcacgccta

SEQ ID NO: 688801 - DNA, 649 bp, Homo sapiens
ggagtgcagtggcgctttcttggctcactgtaagctccgcctcccgggttcttgccattctcctgcctcagcctctcaagtagccgggactacaagcgcccgccaccacgcccggctaattttttgtatttttagtagagacggggtttcactgtgttagccaggatggtctctatctcctgacctcatgatctgcccgcctcggcctcccaaagtgctgggattacaggcgtgagccaccacacccagctgaggacataggtttttttatgccagatagacttaagtttgagtcctgattcctattaacaattggatctttggcaagttaaagtctataatgctagctaacattattgcrtattagggtctgttctcaagtagtttaacatgtatttactttagtcctcatgtgagagagagactatatggaagctaagagaagttaaataattcactcaagatcccatcactctgtagctaacctgagatatactcgtggaaaatgtactgtcaccttgagtctcagtttgcctgtcaataaaatgggacagaattacctgttttaagtttgtagttcaaatggaaccttctgaaaaggaagtgtggaacaggtcgaaagtatacaaaagggggacttttcagatca

SEQ ID NO: 688802 - DNA, 649 bp, Homo sapiens
ggagtgcagtggcgctttcttggctcactgtaagctccgcctcccgggttcttgccattctcctgcctcagcctctcaagtagccgggactacaagcgcccgccaccacgcccggctaattttttgtatttttagtagagacggggtttcactgtgttagccaggatggtctctatctcctgacctcatgatctgcccgcctcggcctcccaaagtgctgggattacaggcgtgagccaccacacccagctgaggacataggtttttttatgccagatagacttaagtttgagtcctgattcctattaacaattggatctttggcaagttaaagtctataatgctagctaacattattgcgtattagggtctgttctcaagtagtttaacatgtatttactttagtcctcatgtgagagagagactatatggaagctaagagaagttaaataattcactcaagatcccatcactctgtagctaacctgagatatactcgtggaaaatgtactgtcaccttgagtctcagtttgcctgtcaataaaatgggacagaattacctgttttaagttkgtagttcaaatggaaccttctgaaaaggaagtgtggaacaggtcgaaagtatacaaaagggggacttttcagatca

SEQ ID NO: 688803 - DNA, 649 bp, Homo sapiens
ggagtgcagtggcgctttcttggctcactgtaagctccgcctcccgggttcttgccattctcctgcctcagcctctcaagtagccgggactacaagcgcccgccaccacgcccggctaattttttgtatttttagtagagacggggtttcactgtgttagccaggatggtctctatctcctgacctcatgatctgcccgcctcggcctcccaaagtgctgggattacaggcgtgagccaccacacccagctgaggacataggtttttttatgccagatagacttaagtttgagtcctgattcctattaacaattggatctttggcaagttaaagtctataatgctagctaacattattgcgtattagggtctgttctcaagtagtttaacatgtatttactttagtcctcatgtgagagagagactatatggaagctaagagaagttaaataattcactcaagatcccatcactctgtagctaacctgagatatactcgtggaaaatgtactgtcaccttgagtctcagtttgcctgtcaataaaatgggacagaattacctgttttaagtttgtagttcaaatggaaccttctgaaaaggaagtgtggaacaggtcgaaagtatacaaaarggggacttttcagatca

SEQ ID NO: 688804 - DNA, 629 bp, Homo sapiens
cattacctatggtaaggagtgcttggttcatctattttcattaaaccatagtctttgtctgctggatgatacgtcgccaagatgttcatttcatcccacttctgggattttttgctaaaattaaaaagaaaaaacgtttttcccaatgcagaaaaagataaacctgaatatcaaaattcacaaatgtccaaatttaacatttcaacttctatttgatggccaacctctattttcacatatactttcttggaatagaagctgactcagggtaaaaaccattaagtaactacaataaaatgtcagtaaatatagaacacctagtgcccacatattaaaaacacaatatttagtatctatatcaggcattcaaaacattaccatactatgacatgcttagccttcatttggcctataaaataatgcaagtcaaaatctatacattcgctgaagtcagtaggcatttttgatctatatatcagtaactgttcggtaaaaaacacaacaggagtacttccttggcataatttctttctgggatatctgttaacactcagaacataaagattcaaagcataaaactayagagaaaacctcatcaaactcagacaccactaaatcattagattgca

SEQ ID NO: 688805 - DNA, 1276 bp, Homo sapiens
tttgaaaatctcttttgcatcatgcttcacttactttttgcttttttttttcctgtttgcttcaaatttctctcagtttctctggtggtcttttcttttcccctctcttggtattttattacaaattgaggcatattttatgaccaagataaacagaaatgagcttggttgacgctaaggacattagcacattcctaaaaataaaacaacaatctcatggcggattcagcccagataagaacatttatttatttgagacatatgcatgactcacatgaaaactcataaagaaaaaatgaagagacagtgtggtagcgtggagagaacttgggcttcggattaagatagacttggactttagtctctctccatcacttgacagctatggagacatgggcgaatctaagaaccgtgatttgttaatttaagtttacttttttcccaacttttggcaggttaagagacatatattttatcagtttaagctgcacatttgctgtaatgttccttagattatacagtggacagaaaagtttatttctttgaagaaggaaataccactgtagatactttatttgaagtataggctatcacatagtgaagaacgtttttcttttcttgtttccaaaataccaaattttattaaaataaatgttatatgcacttcaaatgttaactattaaaatatactagcagtataaacgtactatttatttatgaaggagaggatttttctaaaccagaccaagataaaaagtaacatattgtcacctacttgaattctaacaaatgtacttttctaaggaatatattttaagattaaattttagcagattgggtatttagtttttctcctccctctttctctctttttccttaaaatarcatttagttttcaaaattgaggactcctacctgttgcttctttcacttgtacaacctgtatatgtagtaccatgtaaaaatagttctgtcagaaagacagatgccattatattcttgtataatactttatattttttctaatgatctaattgcttctttctttaacttccctaagatcactagggaatctgtacaatctggagtaaggaaaatgtaaggacttacagtataattttgttatttttggaagcttagttcaaaattctaatttagcacccaatgtcatctttggatactgtgtgccagtccagaaaactagcaccttttgctcagagccaaactgacagagacatgctcaaataaattcacattcccattttaactaataatt

SEQ ID NO: 688806 - DNA, 1276 bp, Homo sapiens
tttgaaaatctcttttgcatcatgcttcacttactttttgcttttttttttcctgtttgcttcaaatttctctcagtttctctggtggtcttttcttttcccctctcttggtattttattacaaattgaggcatattttatgaccaagataaacagaaatgagcttggttgacgctaaggacattagcacattcctaaaaataaaacaacaatctcatggcggattcagcccagataagaacatttatttatttgagacatatgcatgactcacatgaaaactcataaagaaaaaatgaagagacagtgtggtagcgtggagagaacttgggcttcggattaagatagacttggactttagtctctctccatcacttgacagctatggagacatgggcgaatctaagaaccgtgatttgttaatttaagtttacttttttcccaacttttggcaggttaagagacatatattttatcagtttaagctgcacatttgctgtaatgttccttagattatacagtggacagaaaagtttatttctttgaagaaggaaataccactgtagatactttatttgaagtataggctatcacatagtgaagaacgtttttcttttcttgtttccaaaataccaaattttattaaaataaatgttatatgcacttcaaatgttaactattaaaatatactagcagtataaacgtactatttatttatgaaggagaggatttttctaaaccagaccaagataaaaagtaacatattgtcacctacttgaattctaacaaatgtacttttctaaggaatatattttaagattaaattttagcagattgggtatttagtttttctcctccctctttctctctttttccttaaaatagcatttagttttcaaaattgaggactcctacctgttgcttctttcacttgtacaacctgtatatgtagtaccatgtaaaaatagttctgtcagaaagacagatgccattatattcttgtataatactttatattttttctaatratctaattgcttctttctttaacttccctaagatcactagggaatctgtacaatctggagtaaggaaaatgtaaggacttacagtataattttgttatttttggaagcttagttcaaaattctaatttagcacccaatgtcatctttggatactgtgtgccagtccagaaaactagcaccttttgctcagagccaaactgacagagacatgctcaaataaattcacattcccattttaactaataatt

SEQ ID NO: 688807 - DNA, 619 bp, Homo sapiens
gtttttgttgttagtaaatcagaaaaaatcgaagatataaaattacattttataatctcagtggcataatctgcaactagagtgttaatattcaatatctaatttaaaaaaaggaaatctgatttgacacaaaaactaatacaagtaacatttgcctcaacaaaaaagggtacatcaattcataaaaaaatactttcaaataaagtttattttattttttcccaaataccccaaacttgaaaaaaagatttgaatatttaactttgaccatacaatttcatacccatacaacttcaccctgctttagtcacttcttatttagttttaatattctttttgattcttcgttccaaatcttggtaaacttcttaagatcagccagataataaagaacaccctcaaaagggtcagcgagtcttttataaacaaattcttggcaaatagatgtgtatattcataaggttgccagttttcccttaggttgaaatagcagcctcagcaggatcgtgataygtggaggggcttgaagaggggtgctggttatttctggaaaattttaatttgcgtctgtgcagttaaagtgtgtttatcatttctttacttttctccactcctattt

SEQ ID NO: 688808 - DNA, 600 bp, Homo sapiens
cagtcaaatatttattcatgtcagaaataacaaagactctgcattctagacaatgggttatcccattatctggtataaccacccttaagataaagcaaacctcttttgagacaaattaagaaaataaaggatgtttgaacagacatgctgctttaagtrggagttagatgactacctaaatgcatattatctttttaatgaaaagacaacttttgtaggcttccttaattgtaagtgaacagaatttccttcttactaatattagttaaaaatagtccagtgagttccagtggcttaaacaaaccaaatattccaagctatttcagttacatctggtggcagaagtaacaagatttcatcaggcattctgtaagaatgattagagaggaaaaaaactagtgttttgggacgcattctgtgcattgcgcactatgttattttttatcttctttaatttacttctcaagcaaccctgaaagatacaaataacagcaaactaaaagagaggttaagtaacttgccttatcattttctattatggggatgaacactccttggggcatgcaaagaagacaatgtcaatggcagctcctagaatga

SEQ ID NO: 688809 - DNA, 1579 bp, Homo sapiens
tgagaaaaatacgtagataggaaggatgaaggtgtgaaaggagtggggggtgtcattttagtaaagaacatagtaatatttgcacaaagatataaagagtgaggcagttagacacacaggtaaactggaggaagaatgatcaccacagaaaactttaaaatgcacaatctggatttgcattgaactgttacctaagcgtgaaagaaactgaaattttggagttatattcttggagcagctaccaaaaccctaccattgactgccagtttgtaaggcatagagtgttttgtgtttttatttccttgccaatcctttctccccctttccttcctttcccccggtaggcactctcgcgctcgctcgcttgctctcgctctctctctgtccctgtctttctctctgtctctccatcattttcaccattggttattagagaagcaagaaatcctggtttggttaaacagcaatcggcaaatggcatgtgctgttggggagcaggcactggcttgtggatcacaagatgtcatttctcattctaaatctgccacttccttagcatgcaatttccttttcccaagtctctaagggtcctctaaactctaaaattatctaaatatgaatttaatgcttataaaagataaaatgacaatttacattaattattttattttccatggaacacaagaaattaaacctatagaagttcattactcatttcctgctcctattccactcacaatttagttttctaggcagagatttttctgtttacttttttctttaattcctataactcatctatttctggaaaagaaatacacagcatcatcttgctggaggaaagctaaatcaattttgaacatttgccaaataccaccacatttatgaagtcttttcagatctttttttcccctaccctacagcgctgactagagctaatcattttattttctaaattccttcacatttgttttcttttcttttttactgccctcccttccttcctcccttccttccttccttctttccttctttccttccacccgcccgcccccccccctttcttcttctttttctttcttggtatactggagaagtcagcataatatctgggtgaaaaaactatctgtacgccaaacctctatgacatgcaatttacccatgtaacaaacgtgcacatatacctcttgaacctaaaagttggaaagcaaagaaaatttttcaataaatgcttattaacagaataaaaatgaaaaaatatataacagaagtagaaaaattgaagtaaattaactaagaaaacaaataatattagagtatgcagatagttttaaatcactgtcctgatgaatgatatgcaaagatattgctatgacttggatatggtttgtttggtccaggtctcatgttgaaatytgatctctaatgttgaaaatgaagactggtgggaagtgtttggatcatggaggcgcatccatcaacatgttttaagagcaaaacagcacaactggaaatgcattctaaaattataatctaaaagaaagaaaatctgtgttagcaggaatgttcctttaagcct

SEQ ID NO: 688810 - DNA, 583 bp, Homo sapiens
taatatttttttccacaaaccagtctcttgatttctaggtcttctcattgaacaacatttgccttcacctgggattaaatatgttaccaatgctatgagactcagttgattccgtttaccgcactgggagagtagtatactttaagaaaacgtggaagaaaatttgtgttttattttattttcacctaatcttttcttagatcagcatggagatgcctgtaagcagtgagtcacagatataaagcaaaaaagcaagccaaattgtaactaattgcrgtgctactataattgtgtgtttcttcattttagcctattataatttgttctattataaatgtcagaagggagagaatgacaaatgaccacatgattttttttaggccagtattcttgaggttaaccctatctgaatacatagaactatgcgtattctcttcctttcttccttctcttctttcttctttccttctttctataaatatttattgatgcctacaatgtgtctggctgtggactagatgtttaaaatactatgtaaaccaaaaagttaaaaaatttcttaccttcgtaaactttatatcct

SEQ ID NO: 688811 - DNA, 645 bp, Homo sapiens
aaagtcaatttatccttcattatgtaaataatgaaactgagattcaaagagcttaaataacctgcatatagtaagtgttaatgttagtatatttacatcatgagataatttatatgatatagctgagccatacataagtaataaggttggtattatagatagataatatgcatttggttccaaatgtgattgatactcatgttacttgtttagcctggagggagttgagaccatttgctatttaactttaaaacaataatcagagaagatcttaagagaaaagtgaacagtcacagttataaatgagtactcattattatgaggacaatagttaacatattctactggagtttgctttgctcgggtccagtttmgtttgtagaaagagaatactgtttacattatctctaaacgagccataaaataatttatgctcttgactcataatttaaagtgtataataaacattgaaaaaaaatacacttttagaagtaggaaacctatatggtagtatatataagatagtataggttgtgcactgcacaagcatcacattgatggaagagccattttcagcacagacactgtagatttttatatttttgctgttacttttctggtatatagtaaaacatcatgtttgta

SEQ ID NO: 688812 - DNA, 1947 bp, Homo sapiens
caaacgatcaagggggtcagcatgtctgagtgttggtcaggcctctgactggccatgttacctagagcacctcctggaaggcctgtccttctccatggctcagtagtacctcaagcacatactgagcatgtagaatgttccagactctgtactaggtatratggagcacacagttacaaataaaacatggtctctgcaaccgtaggacctttcaatagggtaaagaaaattgttatttatccaagtatccacggcaacttggatccagtgcctcaagtgagacatgcactaagtgcacagcatcttcatgggctgctcttggcctcacgtaggcttccacaggctagaaaccgtaagacgctactccctgaaagcattcaccgttacacaagtgggtaggaaaacagcatctagattcccagagtccacccactttggggctagatctaggaaactggccctagtctgatgaatgcccatatatatccctagtgttgggctgggccaagccaacaagtgatgtggggtgggggaggaaaaggcattgtttgccttggtattcgcctgggttcctctggctttgtgtcaggtagcaggagcatgacaggagctgaggaactcattaacactgtgaaacagcctttccccttctttccaaaagcagagacttgcttaagggtttcgggtaagggttttggctaaggaagtcagacggaaatatttcttaataagaaagtcacctgaggtctgaacttggttctgctccttcccacatgtgggcaggtgaccacagctcctattattcctatggccaaataccggctcggacagaaatattcttcttgctcctatgtaacagggagactttctcgtttttctgagaatatattcatggaaaacataaaccaactgtcgtcaaagttgcatgaaatcaggaaatggagcggccgggagaaggctgccatgtggccggatgttatgtatttctaattagtgctatacatctttcaacagcaagtgtccttctgctgggaaacacaacacactgcccttgttattgtaactgtcagagaagtgcttaaacagataatctccaggaaaagtgataaacacgtcccctctcccaccagtatgtgtgcgacggtgctgccaaagcaaagctgtgcctgacagctccaggatggcaaagcatcctcctgcaggaaatgggagtgaggcaggaggggcggagagggaagagcaggggatgggaggcaggcccacctgcctgggccctctaagccgagccaagggatggtggttcagaaccactgcttctgatcaattccagtgttgccatcagggagagatttgaaggaaaccagtaccagtgggatggagtttggttggtcacagaaaaatctggcagcgatggaactatcagagttcccttggtgcacacagccagtttcctggcaagagcataagaagagtaatgaagagaagacacaggatggatgacacctaagtctgatgctctgatagcagcagaggggattctgagggcactggggtccacgagccattccagcccagagaaccaactatctgcctggctgcatcactaagagctggagaaaaacgcaggcaagaccacttattcaccaattccctccccactgtctcctcccaaagaaaggaaatgaatggtcagtcacctccaaactaccaccacctggaggcaatttgttggcccttatctttccgacataaggctgcttttctcatgagtcagttaccagtcagacacaaggctggcacagttcctaagcagcccaccaaaacctccttgtctacaggaagtgggcagtgagagtatctttcaactgctgctgcttgagccacagagttccccgtggcagctgctagctgaagaggaggtagaggaagcagtcgctgtataggaac

SEQ ID NO: 688813 - DNA, 615 bp, Homo sapiens
caaacaaagttagatatctggatattaatgtgaaacctcccaatttaaaatgttagcaactgaataatatatatttttaaaaccattgcatgggcccaatgaaacatttctgcagattgcatttggccagatgtctatcagtttgaaacttcagtctaagggagaaggtgccaacattttccactttagaaggttacagtcattccaggcagggggacatgggccaactgaaaagccatgcagcctggaggaagctgggccgctcaccatagagtgactctctgttggccttgttcttgtccacaatggctgatgccacccacaccatacctagcaccagcagagtgaggagcatcaacatcaccactgtctcatagacccggcccaggacaccctacgggaggaggcaaccagtgaagaaggttaacatcagggcagtgwgggaacattggagatggcaggcagcctgcaggaaccagaaaggtttggattcaggaggtaagagagagggttttcctcttattctgctaagttgctctgtcttcccactccccagtctaaggtcaccccacataccaggtgttcttcatttgcatctcctttccccagacctat

SEQ ID NO: 688814 - DNA, 1430 bp, Homo sapiens
cccgcttggtctcccctagggtggcaacagtactactgcagactcagtttcccggagggagccccctttgggcggattttaccaccctcctcctactgtaccagctttgaccgacacgtggacgtggttgcgggactcgtagtagacccagtcgaagccggcttccactgcgaggcgcgccagcaacccatacttgttgcggtcgcggtcagacgtagtgatgtccaaagcacggccttcgtagtggagtgaatcctgagcgtggtggccgtcctcgtcccagccctcagtcactcgtaggcgcactccgggccacatgttcatcacggcaatggccaaagcgttcacccgctccttacaacgctggcggggaataaaggagtcagtctccccaccaccacccttggggcaaaagggacctggataggagggttgattctttgttattccggccctactcttacccctcccagcttttgagtgtcctggagaaatgagaatctgagtcgatggtagtcaccaatctgcactctgttcccaggacgtcgttggagaactgtgggctcacctctgaggttgagagggggtgcccatacctagctccttccccatttttaatgcccgtccctcacccctattggttcagggacagcggctcaacctgggagaaggacagagttaggagggcgaatggaagcgtggtcagggagggcctggttgctcccggagagcccctgtttgagcctggcccccgccccaggcaccggctcccctccctccgcctgattcatcttttgtttcattgccttccctggcaccgggcatcgcttccttccttccttcctcctcctcctttgggcccttagcattaaccccttcgtgctctgggtgccccccagagaggtgcccaagaggagctgtgcgggatcaaggctgctggaaaaaggattggggtggcgggggttgcgcgaagtacaatggccattatccgggatgacttaaccgagcgagaatcctgagcccaggccgggaacgcgctgggagaagcggactcagcagctccggccacaaaggcgcttttcagccgccccggctcagggagaggaaagggcagaaagccgcgcccccaatccctgctccgtccgggtaggtcccctccccccgcgcgtccagtcttcccagttccagctaaggctctgccagtccggagagcccctatctctcccatctctgctctagatgcagcccagaagggcgtgggagtagcacctgagaataacggtctccttgtgcggatctggggagccccctgcagggtgagagcggagaagaggaaaagaagctgcggctggaagcctgcacctgggggagtgagaccacagttatcttggccgctccagcctgggagckggagaccttggcgcgcacca

SEQ ID NO: 688815 - DNA, 609 bp, Homo sapiens
tttctgctttgctgtcttagagaaagaagactgtcctcttttctaaggtcatatttatcttaattaaaaaactkttcatatttatcttaattaaaaaattttttaaagttctgattatttgatggtcaagaacaaatcatcaagtagtggttgttttccacgtatattttaaattccttaacctagaatccatcattttaattctactctatttgcccaattttttaaattaatacttatccaaaaatcttcccagaataggcttttttaaaaaaattacttcaccacctcagtaccattgctttttcatttctctggaatgcacttctcttgtctggtaaccaaaatgtttccttattcaatattcaacaagaatttggatttattgtgtggcagaaataattactaatcattaataacaatgcattcttacacatttcccagcccccaggaattctggtgaattcatgttactcatcctaacctatgggtttttagtgaaacatagaaaaggtggtttgaactccatgtacacttcatccaactatgggaaccatggtgtttttgtgttcctaatgatgcagctacaaggtgtctgaatttacatta

SEQ ID NO: 688816 - DNA, 609 bp, Homo sapiens
tttctgctttgctgtcttagagaaagaagactgtcctcttttctaaggtcatatttatcttaattaaaaaacttttcatatttatcttaattaaaaaaytttttaaagttctgattatttgatggtcaagaacaaatcatcaagtagtggttgttttccacgtatattttaaattccttaacctagaatccatcattttaattctactctatttgcccaattttttaaattaatacttatccaaaaatcttcccagaataggcttttttaaaaaaattacttcaccacctcagtaccattgctttttcatttctctggaatgcacttctcttgtctggtaaccaaaatgtttccttattcaatattcaacaagaatttggatttattgtgtggcagaaataattactaatcattaataacaatgcattcttacacatttcccagcccccaggaattctggtgaattcatgttactcatcctaacctatgggtttttagtgaaacatagaaaaggtggtttgaactccatgtacacttcatccaactatgggaaccatggtgtttttgtgttcctaatgatgcagctacaaggtgtctgaatttacatta

SEQ ID NO: 688817 - DNA, 609 bp, Homo sapiens
tttctgctttgctgtcttagagaaagaagactgtcctcttttctaaggtcatatttatcttaattaaaaaacttttcatatttatcttaattaaaaaattttttaaagttctgatwatttgatggtcaagaacaaatcatcaagtagtggttgttttccacgtatattttaaattccttaacctagaatccatcattttaattctactctatttgcccaattttttaaattaatacttatccaaaaatcttcccagaataggcttttttaaaaaaattacttcaccacctcagtaccattgctttttcatttctctggaatgcacttctcttgtctggtaaccaaaatgtttccttattcaatattcaacaagaatttggatttattgtgtggcagaaataattactaatcattaataacaatgcattcttacacatttcccagcccccaggaattctggtgaattcatgttactcatcctaacctatgggtttttagtgaaacatagaaaaggtggtttgaactccatgtacacttcatccaactatgggaaccatggtgtttttgtgttcctaatgatgcagctacaaggtgtctgaatttacatta

SEQ ID NO: 688818 - DNA, 609 bp, Homo sapiens
tttctgctttgctgtcttagagaaagaagactgtcctcttttctaaggtcatatttatcttaattaaaaaacttttcatatttatcttaattaaaaaattttttaaagttctgattatttgatggtcaagaacaaatcatcaagtagtggttgttttccasgtatattttaaattccttaacctagaatccatcattttaattctactctatttgcccaattttttaaattaatacttatccaaaaatcttcccagaataggcttttttaaaaaaattacttcaccacctcagtaccattgctttttcatttctctggaatgcacttctcttgtctggtaaccaaaatgtttccttattcaatattcaacaagaatttggatttattgtgtggcagaaataattactaatcattaataacaatgcattcttacacatttcccagcccccaggaattctggtgaattcatgttactcatcctaacctatgggtttttagtgaaacatagaaaaggtggtttgaactccatgtacacttcatccaactatgggaaccatggtgtttttgtgttcctaatgatgcagctacaaggtgtctgaatttacatta

SEQ ID NO: 688819 - DNA, 653 bp, Homo sapiens
tgaaatcagattccaattttaggactttattcaacacatgtattagaacagatatgcaatgatgtacacagaaatgtttaatttagcaattcagttttaatactagatgtctggtagcaatggcaacaactatagctcatttatttgggcctggaaatataaataaattatatccatagaataagatattatktcatttttaacataaaattagttggaatgtccttacagttgggtttcatgaggtgagatagtcctgagaaagaaaaaaaaaaaaaaaactaccatcaccaggtatcaggtagagagggctccaggtagtaagaacaaagctaaacttgcaactatccgtgaggttctagatgctttggaggctggatttctatagtagagaaaatccaaggagcactgatgaagtcctccgtttttaaaagtgtggtcatttttaggggccagtgaagtacagaatgccaacatagccatctctagcaggaacaggaatgtttggatacagttcagagggactttacagaggatgtgatcttggagagctatcaaagctgtgctcactggggttttgagttcacagtgaatggaataaggacacacaattctgactttcccactgaatacaacaaaaaaccctggacaat

SEQ ID NO: 688820 - DNA, 599 bp, Homo sapiens
taactaaatattaaattcagatgagaaactcaacaaagaagcatagaccacactacccaactgaatgaatggggaaatgaatggaatcattgtattccattaaccaagattgtgaatccaggaaactagaaggagaaaagtgaggaaggagagggaaaataartggagaaaaaggaggtaatatttttatattatagaatagaacaaagtatgtttttgtaatgttaacttcaaaaattccatttattgctagtaaaggaaaagtaataacaaaagttccttcccataacaccatgactgtctttaaatcctttccaatagttaaatcctgggctgcctagcttcagagtccatatttgcaatctgaactctatgctgcatcctgttgtatttttatgttaatggaaaaggggctcaaaggacctacaataaatcaaaaatagtagggatttgcacccagagctatgagacactgaaaagagcatgcctaagccatctatctttctattactaaaaatgcagtctgaactaaagtctattgttttaaaaagctttttgaaggaaaaaaaatagtagaggcagtgtgtacacaatgccag

SEQ ID NO: 688821 - DNA, 650 bp, Homo sapiens
atttgatgtgcatcagtacgtggagtggtttggtggatgtgtgctgagatcttgcgactggggaggcacatgtgcatcacagcacatttcagcgtactgatggaaacggcccagccctgggctctcctgttkccttagcttgtctcacttggtgttacgccgggacattttggtactctgtcccccagaggctcatcaaatgagtgaataacattttgatctagggtctgactaaaacttcatatccacattcaggggatagaaagagaacattaaatattaaattactgcgtgaaacagaatgagatattccaggtcaggcagtgaccagaaattgataacattggtggacagtagtgattcagtgactcactacatgcgatttgaaatcggggtgtgtgtgtgtgtgtgtgtgtgtgtacaataaactatttaagctttctttggtttttctcggtaaagcctaatgtagctatagaagaaaatatattaaccttgacatgatagtaatgttcttcagttacacaggatgaaacccagctcattgctgagtatgcatacatctttttaaaaacaaaccatggggctagaccctgtggaatacaaagatgaacaggccagggttcctaccttcagaggtcacaagctta

SEQ ID NO: 688822 - DNA, 632 bp, Homo sapiens
cttgttttcttctcattagaaaccaagtcctagcccggcagaggcacattccacaggggctggttgggtttgggaggaggccggagcacagaaacatcttcggtcccccttcttgcctttctataacaaaatctcagcagtagcttaaatctcaggaggcctgggatgaaacaccacccaggcctggctggacaggaacagacataagcctggagcccaaatgctacttgtggcttttaagagcttggcatgaccccagttaagcaattctggaatccacagaggctctcccttgactcccctctccccacacccactctcctgagaccttcctgcaaaaagcaatgcaggattggcaaccacctcrtgcttcctttttttctgccagccatctgtatttccaaaggaatcaggccccaagtctaaccacagtgctcagtaaatggaggctgctttctgaaccttcaagcggccttacagcaggcagccagctcttcccccctcactacatgaaagagagagaaagcgtgtgtgtgtgtgtgtgtgtgtgtgtgtgtgtgtgtgtgtcctttaaggcaacacaagaagagtctgatgtttggttagatcttactattatattttaaatgtca

SEQ ID NO: 688823 - DNA, 595 bp, Homo sapiens
gcacagtgggtcacgcttgtaatcccagcactttgggaggccgaggtgggcggatcacctgaggtcaggagttcaagaccagcctggccaacatggtaaaaccccgtctctactaaaaatacaaaaaaaattagccaggtgtggtggtgggcacttgtaatcccagctactcgggaggctgaggcaggagaattgcttgaacccaggaggcggaggttgcagtgagccgagattgcaccattgcactccagcctgggcaacaagagcaaaactctgtctcaaaacaaaaaaaagaaaaaagaaaaaaggaacaccaaactaataatggatgtttacacttacacagccaaaccatattgaatgtttggaaagaagsgcatgatcatcctgtagttctctggtctgggtagattttcgagtctgtgttaacttctggacactacaccctgaaaggagcccgctgttacgtagacatgtgtgaggccagattgagaagctcttgctttgatagtctcctgacttttagtttacagagttaattaacagtgacaggaatgtcatggaatgaatatgtagcaggaagaaaaaaaaaaca

SEQ ID NO: 688824 - DNA, 606 bp, Homo sapiens
  misc_feature 158, 169, 170: n = A,T,C or G
caccatggatgtcttcaaatagctcatccttctggaagatttccttatcttcaattcgattatttagctgataaccctactgtcactcccaagcccactcaagtttccatgcctccccacccactrgttactactgctctctccctgtcatccctcantggagtccganngcacagtgctgaatcatcaacctagccacaggagtcttgtagtcagatcctatcacccctccccttaaaccactttggttggcggccaggcgcggtgggtcatgcctgtaatcccagcactttgggaggccaaggcaggcggatcacgagatcaggagatcaagaccatcctgattaacacggtgaaaccctgtctctactaaaaatacaaaaattagccgggtatggtggtgggcgcctgtagtcccagctactcaggaggctgaggcaggagaatggcgggtgaacccaggaggcgaggcttgcagtgagcctagatcgcgccactgcactccagcctgggcgacagagcaagactccgtctcaaaaaacaaaacaaaacaaaaaaaaaaacgctctggttggcttccattgcagttagaataaaatccaaact

SEQ ID NO: 688825 - DNA, 2585 bp, Homo sapiens
gcatgttaattataaggcaaaagatctgtaaaatactagataaaacagggaagtatgggtggctagcagtgtctctgatacacagtgagaacttaataagtattaaccaaagaatggcaagttgagcaaatgattaaataaaggtctatataccataccccacccagagcaactactcttgacattttagtgtgtacatttccagatgttttcctatatatatggttatacacttttttattcttttacaaaagcaaggtcatattgtacataattatttgtaaatcactttttattcccactcacctatttattgtggtcatcttttcatttattgcagtcatcttttcttggtagcaactatggtagaaagactatactgtgattttgaattctccagtgttgactatatcagagtagacccaaggaaaagagatgtttttaattcacagagttattaactgtctagttaaaaatgagactataaaatttaagttttaaaaacctcaaagaagcatatatcagtgattatttggtggtacttgaattaagatacagataacacacacacacacacacacacacacacacacacacacaatgggtattaacatctttgaatatctgcatgctgtttgaataaatggatgtgctgtattatactgaattcctgcttgatggatacttaggttatttcaaaagtgtgaccaatttgattgacaagcctcaagtcattgaggtaaaaccagaaaaatgtattcttttccaatagctgctgttaactctgccctttcaaatttttcctatcctgttacctagcaggcttcctcaaggaaatcactagtgtggttcagacagatacatcctagtattaaaagtctctgtttgagcttggttctgaagattcagtcttgatcattggacaatgtcaatttcacacgctatttagagtgccctttcccctcatccatcttccattccacttgcaaagctgggacttgaaagaaagtggtccttgtctcctatcagccttgtggtcagtctgcaccattattgtgtcccaatgccttcttaattagctcaggaagcactaaactggtcagcaagcagagagagagagtctggcagccccttcttataaatgcctcccaacttagtgagctatttgctttgtgcatccctcattttgcaacgaggagtagaacctctggggaagtaagcggaagtagggagaatctctctgcaccaacgctgcgcctctccaaaggataacttcactctccctccctgacttatatgtgctgtggagcatgcattgcaaggaatcagcattgcttcagcwgaagtggctcctctatcccatcgtatgctgaaggtgctcatattggctcgtgagggccaattgttagtatctcttcaaaactctgcattcagcaagcacgcattggaagcgcagaatcagccctggtgggagtatttacaccatggaaatttgtatcatctgacaaccccccatctccacctccactccatagctgtttgttaaacatttaccagcacaccactacctgaaacctaaactttcagggagaaagctggccaaatattggtggttactatacttaaaatgtggaatgtttatgaccttttgttctcagcctttagaggccaattatgggaaagatcacaccatcataacaagagttgcatcttcatgatgctttgatgagcaactttttacacttaatctgccccatttgagtgattattttctttggctaaattcctagaagcagaaatgctgaatccaaaggtatgtctagtttaaagtttcagatactatggttcaaatatccttcagaaaatatgaaccgatctacactcctatcacaaacgtacctggtatactgtacccttactgcaagcaaatattattattttaaattctatttttttctcttttatgcaaagaatatgatttgttttcgtctgcatttctttgactatcaatatgttagcatagttttctggaacattaatgaacagcatttcctaaatatgctttttttttttttttttttttttttttatacagagtctgtatctgtcgcccaggctggagtgcaatggtgtgatcttggctcactgcaacctccacctcccaggttcaagcagttctcctgcctcagcctcctgagtagctgggattacaggcacccgccaccacactcagttaatttttgtatttttagtagagacgaggtttcaccatgttggccaggctggtcttgaactcctgacctcaagtgatccacccccctcgacctcccaaagtgctaggattacaggcatgagccatcgtgcatggccgtttttttttttttttaatgaatttataacaaggcaggtgaaaatggcagccacagaggaggacaaggaatgggagggctgcctgttggataatacccagcttgctccccacctgccctgagctctgtctgagcagaacagtgaaatctgtgagtcttggagcaaccttcttagaggccacactttaattaaaacttttctcacataatacatta

SEQ ID NO: 688826 - DNA, 595 bp, Homo sapiens
aaacggggtttcaccgtgttagtcaggatggtctcgatctcttgacgtcatgatccgcccgcctcggcctcccaaagtgctgggattacaggcgtgagccactgcgcctggccttttttttttttttttttttttgatacagagtctcacttgttgcccaggctggagtgtagtggcacgatcttggctcactgcagcctccacytcccgggttcaagaaattcttgtgcctcagcctctcgagtagctggagttacaggcatgtgccaccacgcccagctaatttttgtatttttagtagagatggggtttcaccatgctgaccaggctggtctcaaactcctggcctcaagggatcctcctgcctcagcctcccaaagtgttgggataacaggcatgagccaccatgcccggcctcacaaatgttcttaaggtgaacacgaagatttgaacctcttgatctgcatgattctgtggtgttttctggataaagtgaatagtgaaccattttcacagattgcctcaagccccttaggggaacaaatttttaagggatttaaaaaaatggctcattaaccttcatacctggaaggta

SEQ ID NO: 688827 - DNA, 871 bp, Homo sapiens
attttttttatttttagtagaatcgaggtttcaccatgttggtcaggctggtctcgaactcctgacctcaagtgatctgcccgcctgggtctcctgcaatgctgggattacaggcgtgagccaccacacccggctgtttctgctgattttaaaactaacacatccccatggggggcatatagattaagaaaaacatgaaaaagaaaaatggaagcagttacacacattccactggttagaggttttgtatttttttcaagtctttttgctctgtgtataaactttttaaatagggttatcttgttccacgtatatatacaggaaacatcgtgctacatgacctcttgtaatcgttcccatacataccactaacattctgtgtaaacatattttaaaatagtacaaaacatttttgaaaattactaagtaatacatgcccattgtaacaaaattgaaaagtacaagaatatggatatcttcttataatatatgtgtgtatgcgtgtgtgtgtgtgtgtgtgtgtgtgtgcatgtatataaagtaaataaagctgggcacggtgagtaatcccaacacttttggaggcctagaccagtggatcacctgaggtcaggagttcgagaccagcctggccaacatggtgaaaccccatctctactaaaaatacaaaaatcagccgagtgtggtgrtgcatggctgtaatcccagctactcgggaagctgaggccggagaatgtcttgaacccgggacgtggaggttgcagtgagctgagattgcgccactgcactctagcctgggtaacagagcgagactccgtctcagaaaatatatctaaataaagtaaataaaatagtccctcttcatcctgca

SEQ ID NO: 688828 - DNA, 632 bp, Homo sapiens
tcatgcctgtaatcccagcactttgggagaccaaggcaggcggatcacatcaggagatcgagaccgtcctggctaacatgctgaaaccccgtctctactaaaaaatacaaaaaattagccaggcgtcgtggtgggcacctgtcgtcccagctactcgagaggctgaggcaggagaatggtgtgaacctgcgaggcyggaagttgcactcaagcctgggcaacagagcgagactccttctcaaaaagcaaaaaaaagagacttgaatctctaattgaaaaggtattgtgcccttgcctatagaggaagagaacagaacttaccattatctgctatgtgccatgacacgctgcaacatccagtcaccatgaaaacagtgtgatcaaattgtaattttacaggtttttaagaatgcaataaaataaaaacagtttctacttgctgagggtccttttgtgttaaaagctggtcttttcatgttatacctttttcatcttaatgttgtggcataggaaatacttatattcttttattaaagatgaagtcctcagggctgaaagagctcaagtgacatgtcaaagagctcaagtgtcaagagactcaaattggagtctgcctaactccaaagactgca

SEQ ID NO: 688829 - DNA, 632 bp, Homo sapiens
tcatgcctgtaatcccagcactttgggagaccaaggcaggcggatcacatcaggagatcgagaccgtcctggctaacatgctgaaaccccgtctctactaaaaaatacaaaaaattagccaggcgtcgtggtgggcacctgtcgtcccagctactcgagaggctgaggcaggagaatggtgtgaacctgcgaggctggaagttgcactcaagcctgggcaacagagcgagactccttctcaaaaagmaaaaaaaagagacttgaatctctaattgaaaaggtattgtgcccttgcctatagaggaagagaacagaacttaccattatctgctatgtgccatgacacgctgcaacatccagtcaccatgaaaacagtgtgatcaaattgtaattttacaggtttttaagaatgcaataaaataaaaacagtttctacttgctgagggtccttttgtgttaaaagctggtcttttcatgttatacctttttcatcttaatgttgtggcataggaaatacttatattcttttattaaagatgaagtcctcagggctgaaagagctcaagtgacatgtcaaagagctcaagtgtcaagagactcaaattggagtctgcctaactccaaagactgca

SEQ ID NO: 688830 - DNA, 1325 bp, Homo sapiens
ctcagaaataaccagagtgaacatgatgtggtatatcttccttctgtaaacactgttttacatagttgagaatgcattgtgtatacttttgtgttctaccttgactagtactatatatggaatatgttgcagatgttaagattccctgaacaattatcattaatggctgggacataatccattaaaggagtgtaacgtaatgcacttagcaaaaatttggatgtccctttgtcatggggctactaagctatgataagcagtagcaacatctgcaccatataatggggaaaggaaatggggactcatgttccatagggtccccaatccttcaatcctccaccaacaccgtaagggggttattactcatccactttaatagataaggaaactggggctcactgataggtgagatcactrgctgaggtcacagagcaaggaggcagagccaggatgatgacctaagtctgtcagattcttttttcatctgtattcctcatccatgtgtagacacagaacagtgaagtcaaaagagcatggttttggagtccaggtatgatttgtcttataccttgcaaatgttaggtgcccgataaatacctgttgcctaaatgctttttattctaattaaaattttatgcatgctatcactcacagacctggtgattccacctgctaaatgttacatttggaaggccttatcttttcacaagcactacaatttagaattcagctttacatatgaagggtatcttaactttcattgataatgtagaaccaggaaaatagaagcaagacaaggcatgactatatctcagaaagttccatagtaggggagagagaccctagttcggtttagaaatgaagagtagtgataacgattaaacatactctcattcattgattgcttccctggaatggggccaaattttacattaccatttaaggaaaataagcatcaaattagttttctaatctggaaaatgaaagcaagactgtctaatgtgcaaagaagtaattaccagctgacataatttggataagaggcaatggtagaatatgaaactagatctgagtctgttgtattctagaaacacatgctaggttcatctccccgttctttattgggtagcctgaggcattggaccagtgggtgtgaaccacccccagtcatgccagcagtcatttcaggtttctaggtgctctaatgtaggaagagaagccccttgtactccaggaaactgccaacagatgtctgtatagccatccctgaaggcttgaccagaaaacacctcagtggaaatgggtttggaagtcatccctaatag

SEQ ID NO: 688831 - DNA, 745 bp, Homo sapiens
taagggaagcaggattgagaaggagagagaaagctgagaaaagacatggtttctggtaaagtttagccttggcctgatccacaggggaagttaggaggcaaagtgtacccacagaattgtccttgccttaagtcaaaggagctggcttttatcggttagtcattggatctagcccataggtgggagaggaggaaaaggtggctaacctcctgagctaggcagcacccactaatgaagggcaattatccaaggaaagggacagctatgtgttttgtggccaatgctcctagcagctatgggatggtcctatagcaatctggatccaatccggataaagatgtcacatggtaaattaaacagacaacatttaatatagagaattattaactctgataaaagtgtaactatatattatcctagggcttagggaaaaaatccaaggaagggcaaacttagagaaagtgcagttcagctcccaacgtcgtagagaattacataggtatggccaggccagaggtggtctggagttgctgggccagcaataggccatcaccctctagagtgctgagtgccagcccagagcagatgatcagcaactaatcccacgggcaggcgrgggtggtagaagcccaggtgctgtcagcaataggagcacttcagtgggtgctagccatgcctacctctggtttctgtgtcaagaaggctgaggagagactatggccatgctgaagctgcaggcttgcag

SEQ ID NO: 688832 - DNA, 1298 bp, Homo sapiens
tgagatgcagttgcactctgttgcctacgctggagtccagtggcacaatctcagctcactgtaacctccacatactgggttcaagcgatcttcctgcctcagcctctcaagtggctgggattataggcatacaccactacatctgactaatttttgtatttttaatagagacaggatttcaccatgttgaccaggctggtcttgaactcctgacctcaagtgatcgggcccgccttggcctcccaaagtgctgggattrcaggcatgagccactgtgcccggccaagcttattgcttaagccattctttccttgctattaactagaacactatctctgtaattaattttttttgagacagggtcttgctctgttgcccaggctggagtgcagtgacatgatcatggctaactgcagcctcaacctcccaggctcaagcaatcctcccacctcagtctcctgagcagctggaacacaggtgtgcatcaccattcctggcttttttttttttttttccctgtagagacagggtcttgctatgttgcccaagctggtctcaaactcctgggctcaaatgatcctcccagctcagtctcccaaagtgctggaattacaggcaagagccactgtgcctggcctctgtaatctattatataaaacagaagtctcatgaagtactaagaatagtggcttttgtcaccaactgcgtgactgacctcaggcaaatactgtactaactttctctgtgctttaactttacagatataagtggagcttatctccaaattatataaatctcactgaaggttattactatgcagttttaaggacattaccaagtatcagctgctgccttgtctttgagaatattgttcactgctttaattgaaatatgtcagaacatttaagacaagtaccctagactcctcatttgccaagcaagatgggagaagcccaggatctttttctgtttttgtttttttaaacataaagcctagcaaatgttagccttctcaaaattcagaataacctgagaagatgcttttgatatgtaaaatgacttcaagttcccctgtgggcataaagacaaggcaaacacaggtttcaacttaaaaaatatatacacttaaaaaaagaaaaaatattttttttcttttttttttttttttgagacggagtctcactctgttacctaagttggagtgcagtggtgcaatctcggctcactgcaacctcccacctcgcagggtcagcgattctcctgcctcaacctcccaagtagctgggaccacaggcacg

SEQ ID NO: 688833 - DNA, 1298 bp, Homo sapiens
tgagatgcagttgcactctgttgcctacgctggagtccagtggcacaatctcagctcactgtaacctccacatactgggttcaagcgatcttcctgcctcagcctctcaagtggctgggattataggcatacaccactacatctgactaatttttgtatttttaatagagacaggatttcaccatgttgaccaggctggtcttgaactcctgacctcaagtgatcgggcccgccttggcctcccaaagtgctgggattgcaggcatgagccactgtgcccggccaagcttattgcttaagccattctttccttgctattaactagaacactatctctgtaattaattttttttgagacagggtcttgctctgttgcccaggctggagtgcagtgacatgatcatggctaactgcagcctcaacctcccaggctcaagcaatcctcccacctcagtctcctgagcagctggaacacaggtgtgcatcaccattcctggcttttttttttttttttccctgtagagacagggtcttgctatgttgcccaagctggtctcaaactcctgggctcaaatgatcctcccagctcagtctcccaaagtgctggaattacaggcaagagccactgtgcctggcctctgtaatctattatataaaacagaagtctcatgaagtactaagaatagtggcttttgtcaccaactgcgtgactgacctcaggcaaatactgtactaactttctctgtgctttaactttacagatataagtggagcttatctccaaattatataaatctcactgaaggttattactatgcagttttaaggacattaccaagtatcagctgctgccttgtctttgagaatattgttcactgctttaattgaaatatgtcagaacatttaagacaagtaccctagactcctcatttgccaagcaagatgggagaagcccaggatctttttctgtttttgtttttttaaacataaagcctagcaaatgttagccttctcaaaattcagaataacctgagaagatgcttttgatatgtaaaatgacttcaagttcccctgtgggcataaagacaaggcaaacacaggtttcaacttaaaaaatatatacacttaaaaaaagaaaaaatattttttttcttttttttttttttttgagacggagtctcactctgtyacctaagttggagtgcagtggtgcaatctcggctcactgcaacctcccacctcgcagggtcagcgattctcctgcctcaacctcccaagtagctgggaccacaggcacg

SEQ ID NO: 688834 - DNA, 2934 bp, Homo sapiens
atcctcccttgactcagcagcagtcccaggtgggtggcttcctgtcttgctcttctctgttccccatggaccttattgcttccttgatgaatcccagtgtgtcctcctgaaccatctagttgaagagctagtgtctactggctgctctatctcctctctgtgagagtggtgctcactagctgcttctagtcagccacattggtactcactctcctcttttacttaaagtcaactgattctacatattaatcacatctacaaaatattttcaccacaacatctagaccagtgactgatcaggcaactgggctccatagacaagttaacacataaaatttaaccattacagcaaacaaaataaacccatggagggtagagttgccaagctaacacctacccatgaaacccttaaatttctaacaagtcattgtgcaaatgctatagtaaccttatcatcagtgtctattattctatgaatatacagtgcaggtagatgaggctttacagaaaagtctgccattataaatacactggtattctgaaacaccaccatcttcgaatggaccaagactataagtgataaaagcatagtagttcttcagattaatggatatgaaataatttcccttgcagtttacttaaaatattttattgttaattaggatacagagtgaaactgcctgctaaactctgctaagaaatttatgaacctttaaaaagcatgtatgcatttttcactaggttaagtcaaacattggtagcattacagcttacataaaatacaatctgacacagctctatgtccttatatctacaggtctaaaaaccatatcctttgcctatcagtttatataccttatatgataatatctgtctcctaatcaattactttaaaaggaggaatagtccaacctgataatttcaagggtttaaatatactgattccactcctgattagcatgctgcatgatcatttgaatttctctgtaacccagtttattgccctaggcttattgttttatctttatctgcaacaggttgaatttttggccaagtgcagtggctcacgcctgtaatcccaccagtttgggaggccgaggcgggtggatcacctgaggtggggagttcgagaccagcctgaccaacatggagaaaccctgtctctactaaaaatgtaaaattagccaggtgtggtggtgcatgctggtaatcccagctacttgggagggtaatcccagctactctcctgaggcaggagaatcgctcgaagccaggaggcagaggttgtggtgagcagagattgtgccattgcactccagcctgggcagcaagagtgaaactccgtctcaaaaaaaaaggatattttcagttgccatctgaaaacaatgaagaaagtatgacttttgtgatcagtttgccctgttttcccaaatttggtctacagattttccattgttctgaaatgatttaggaccttatccttagttctccatttaaaaaaacgtaagcaatgatcawcttcagtttattactgatccattgataacaccttgtcaactgaggagattgtcatcttatcacttcattctattatatgtctataatgagttgttttgtcttccaaaaagatatgtttaagtcctaaattttggtacctgtgaatgtaaccttatttggaaagagagtctttgcaaatgtaatgaacacgaggacatattggattagattggaacttaagtctaataactgatataagaaaaatgagatttggcaacacacagacacacacacagggaagaaaggaagacagtgacagagatgatgctgctacaagccaaggaacaccaaagattgccaggagccattataagctaagaagaaacaaggcaggattcttcatcggagccttcagagagagcatggccctgctcaacccttgactttggacatctagcctgtagaactgtgctgggataaatttctgttagtttaagccaccaagattgggttgatttgttacagcagccctaggaaacaaacatgtcataaaatattattccacattcctatggatatacagctgttcaagtggtcagtttgcctccattttgttcaacctacaactgtgtgatgcccatcatttcttcataagtcaatagtaacatgctaacactaacaaagctcttttctctttcaaaatattttatctttagagaaacaccatgtagtggtttattatgttgtgctgttgttgctgttatcattgttgttattgttactattaatattagtgttgttattttcattttacaggttgagacacaggaacacacaactaattaggggagaggagaggtcacccataccaccccaagagagaaatgtacttaagacagaattctgtgtgctgtgactgaaattaagttttgagactagccagtatatagaatatgctcagaaagtatgtttaaataaattatactagcaccttccaatctcacattctgcctacaggctgacagtgctggacaagatagaggccactgcagggctcataacattttatgaattgccttcatatcatttgtggtcagatagttagttctatgtctatatgcataacctaataactttatattttaaataaattgattttaggccagacacagttgttcacacctgtaatcccagcactttgggaggcaaagagggaggatagcttgaggccaggagttcaaaaccagcctgggcaacatagtaagactctgtctctgtgaaaaaaattgaaaattagctgggcatgggtgcatgcacctgtatttccagctactcgggaggctgaggcggaaatatcacgtaagtccaggaggttgaggctgcagtgaactatgatcatgtcactgtactccagcctgggcgacagagcaggatccc

SEQ ID NO: 688835 - DNA, 641 bp, Homo sapiens
atcatgtactattcttttaacttttgtatatttggaaagttttgtagtaaaaaatggagggtaaaagaaacagaatattcttcacctaaagattctgcctatctatctatctataaaaaacttcagcaaacataatcctaaatcagaaaaattttaagctttcctaataaagttagggactaggcaatgttacccattttatcacttcaagtcaacactgtattagaaattcctgacagtgcaaaaaaaaaaaaaagaaatcaagacataagtattggaaaaagaaattagactatcattatattatwaataataggtttaattacatagaaaacatatagaatttaaaaataggataatttagcacagtgccttgttatcgaagcaatttataatagttaatttcatattcatataccagcagcaagtaactagaaaacacaatttaaaagaacacaaaatttgaaatagcatgaagtaatacggagtacaaaggaacaaacacagccatgtgttgcttaatgatgagaatactttctgagaaatgggttgttaggcgattctgtcattatatcaacatcgtagagtgtacttaaacaaacctagatggtatagcttactacacacctaggatagatact

SEQ ID NO: 688836 - DNA, 649 bp, Homo sapiens
gataatattcagataatatataaaaaacatagaagttattagtggcaatgattacttgctagttttccagtcttttctgagctcttctgggaggctataagatccaacacttagagaacaatgaaagtatggccctaaaattcactctcaaagggaaaacaggagagaaccttgagtaagtttcccttactgtgcaggcctgcaggaagggaacagcagcttcaggagtgagggtgtggaactctgcccaaactcttctcctctctcccctttggataaaaaatctcaatctgcgagggtaaggaaggacaatatcaaaccagtaaaactgatattgtgtccggaattggtgggttcttggtctcactgatttcaacaatgaagcygcagaccctcgcggtgagtgttacagctcttaaggtggcgcgtctggagtctgtcccttctgatgttcagatgtgttcagagtgtcttccttctggtgggttcgtggtctcgctgggctcaagagtgaagctgcagatcttcgtggtgagtgttacagctcataaaagcagcgtggacccaaagagtgagcagtagcaagatttattgcaaagagcaaaagaacaaagcttccacaatgtggaaggggacccgagcgggttgc

SEQ ID NO: 688837 - DNA, 1178 bp, Homo sapiens
gggtggtgctcgttggggaggctcggccgcataggagcccatggagtgggtgggaggctcaggcatggcgggctgcaggtcccgagccctgccccgcgggaaggcagctaaggcccggcgagaaatcaagctcagagccagtgggctggcactgctgagggacccagcacaccctccgcagccactggcccgggtgctaagcccctcattgcccggggccagcagggctggctggctgctccgagtgcggggcccaccaagcccaygcccacccggaaatccagctggcctgcaagcaccgcacgcagccccagttcccgcttgcgcctctccctccacacctccctgcaagctgagggagtgggctccagccttggccagcccagaaaggggctcccacagtgcagtgggggggctgaagggctcctcaaatgccaccaaagtgggagcccaggcaggggaggtgccaagagcaagcgagggctctgaggactgccagcacgctgtcacctctcaatataagtgcccctttaatactgcagatttgttataaagtttaaatataaaaataggaagatatgcaagaataagcttcaagttatatgaaatgctatagaaatttaatataatgctatcaaaatatttcatgaataaaagaatttatgaattcaggagacaatgtagcagtaaatcaaagaagttacctattttgaaaaactgcatttccaaaggagggagaaaaactgaaaaatacctattctaatcctgctttatgcagtcacttaaagtaaaactggaagggaagacattactcttcaggacttcacccccttttctttagagtagtttacaacagttttcatagctagcattaattagataattttaagtaaaaattttatgtaattttacttaattaagagaaagacaaaattcttaatgtttcagctagataaattgtcataaagtaaaagcaaacaagaaaacaaacaaacaaaaaccatgtagccaactccaagattaagaaacataaaactactgccagcagtttctctgtcaggaaagagaaactacatcacactgtgaagttttggggtggcttgttgcacagcagtggaaaactgaaacagactgtactcttttgagccatggacacttttggcagtctagtgaaattt

SEQ ID NO: 688838 - DNA, 1178 bp, Homo sapiens
gggtggtgctcgttggggaggctcggccgcataggagcccatggagtgggtgggaggctcaggcatggcgggctgcaggtcccgagccctgccccgcgggaaggcagctaaggcccggcgagaaatcaagctcagagccagtgggctggcactgctgagggacccagcacaccctccgcagccactggcccgggtgctaagcccctcattgcccggggccagcagggctggctggctgctccgagtgcggggcccaccaagcccacgcccacccggaaatccagctggcctgcaagcaccgcacgcagccccagttcccgcttgcgcctctccctccacacctccctgcaagctgagggagtgggctccagccttggccagcccagaaaggggctcccacagtgcagtgggggggctgaagggctcctcaaatgccaccaaagtgggagcccaggcaggggaggtgccaagagcaagcgagggctctgaggactgccagcaygctgtcacctctcaatataagtgcccctttaatactgcagatttgttataaagtttaaatataaaaataggaagatatgcaagaataagcttcaagttatatgaaatgctatagaaatttaatataatgctatcaaaatatttcatgaataaaagaatttatgaattcaggagacaatgtagcagtaaatcaaagaagttacctattttgaaaaactgcatttccaaaggagggagaaaaactgaaaaatacctattctaatcctgctttatgcagtcacttaaagtaaaactggaagggaagacattactcttcaggacttcacccccttttctttagagtagtttacaacagttttcatagctagcattaattagataattttaagtaaaaattttatgtaattttacttaattaagagaaagacaaaattcttaatgtttcagctagataaattgtcataaagtaaaagcaaacaagaaaacaaacaaacaaaaaccatgtagccaactccaagattaagaaacataaaactactgccagcagtttctctgtcaggaaagagaaactacatcacactgtgaagttttggggtggcttgttgcacagcagtggaaaactgaaacagactgtactcttttgagccatggacacttttggcagtctagtgaaattt

SEQ ID NO: 688839 - DNA, 562 bp, Homo sapiens
gcaacagtaggctatatggtgccaattctccttggagaaaatataaaagttctaaaaaaatgttgataaagaatccatattctaagtgcgtcagcagtagctcagtgggcggtggagattggtctcatatagaggaattgaggaatgcagttctgggagagaaggatgccccgagtactttcaagtaaaagtggtactagaggaaaacaggagccaggctcctcactacccaagaagggagttactcacacaaacacggggaaaacaggagtggccctgtggtgttgaagggaattagaggtgtggcatgaatgcctggtttttaatatgtacgtatagagatrggtctagaacatgtaacatgtagagttacatacatgtgctaagtctctgtaaatgtcccaatttgactgtgcaggctgtccttcttgagagtggacacagttgaagcccagggagacagcatgacagagctcggctcaggtgggtacagacaaaaccagaccccatttttaccattcttgcagcctctctataagctagaaattagttgtttaattca

SEQ ID NO: 688840 - DNA, 638 bp, Homo sapiens
tgcctggaaatgttttatcaggctattgtactcatttaagagaaaaaaatggtttgaaggaggccggtttatgattcagacttttgtttgttcaaattgatctttgtaactggcattagccaacctttgtctagatagtcaacccccgaccatcctaaatgaagctttaggcccatgttcagaacatctgaagagtgtaaaaagcaaaaagacatacatagaatgtttttgttaaaaaaaggttggcatttaattcagttgttccaataacacacaaactttgtttttgttgggcacagaacacttaccatgaaatctattcccaaacayattttaagtgtacagtgcagtattgtgaactttgagtataatgttgtgcagcagatgtctagaatgtattcagcgtgtaaaactgaaacttcatgtctgttgctcagcgatttcccagttcccctcatctcctggtaaccaccattcttctcgtcgattctataactctggccaatctagatgcctcatctcagtggaatggtacagagcttgcccttgtgcagcttgctcgttctgcttagcacactgtcttcaaggttcatccctgtcagagcatattacaaactctggctctgtaggggtggata

SEQ ID NO: 688841 - DNA, 651 bp, Homo sapiens
tatgggtggcgtgggggctgacctttrtatctgtttcccggacgaccgaggaggacaccaggagggccgtccactctctcaccatttcctgcatggctatggttgattcggtgagaaacaaagggaaagaaacttgggccagggtgggtcctgcatctcacctgtctttggacactggagtttgcccagtccagatgcccctgaaggagggccggggtggttggctcattcctgttcctgcaggagcctgcactcccatagccagcggatctggagaacaggcaaggccagagagcttgctagaatggtgtcaacaatctgttctcatcacaagttagcacgattttttaataaataaccactaatagataggaaagaatgctttctagttatgtataaatactaaatataacacaaaataatatagtatatattattaaatgaaactaaaaataatatttaaactcttgataacaagaaagtggaatttgttatcagtctttttgacagggttagaaaggttacctgcagcaaataattgattatagctaaattaattttgtttgatttcaagtcttctggaaagttctgagttggtgcaatagctcttggtaatagtaatgataataattttttcaataacatactgca

SEQ ID NO: 688842 - DNA, 612 bp, Homo sapiens
tgattgatgttagtcaaaatttatagattatttactctatgacaggtattctactagagagcttgcctattatatcagytggggtcccatcattctgattgaaattagggaactcatctcaatggcagcaactctcatcattatcctcagcctacagagacagccacccagagcttttcaaggatgctcatacccccttatttcccgctgctttactgaaagaagaccttctggtctttctcagggtatataatagggaattaatatgcagaatgcagatgataaaatctacctctgcattttcatttatttaagcctttggatttttttctctgtattatcccagggaagttttagcaccttactcttattaacattaggctaccactgaccaagggtttcagccaaacattcaagcaaactccttaaactaatacattaaatccaaaatatctgttcatgtgctactatacctataaattggaccagtcaaaggtatgctcgttcctgcttgaactaacacatgttgcattggtaggggttctccagagaaacagaaccaacaggagacagataaatagatgatagaatgaaagacagatggacagatag

SEQ ID NO: 688843 - DNA, 656 bp, Homo sapiens
aactcgatttcaaggaacagtgcattatttatgtggctatgaaaaaacaaaggcacatgattaccaaaaaactaagaccacaattttaaacttcacaattcttgtcattttttttccctgatgaaaataagtatgattattgacttttgttttagaaaattttttgttgttgttgagacagggctttgctctgttgcacaggctggagaatagtggtaccatcacagctcactgcacctcaaactcctgggctcaggtgatcctcccacatcagccttctgagtagctgggactacaggcacgagccactttgcttggctaatttttttttatctttattttttgtagagatgaggtctcactgtgttgcccaggctggtcttgaactcctggcctcaagcagtcctcccaccttggcctcctaaagctctgggattacaggtgtgagccactgtgcgtggccattattgacctttgaatgaagatcagaatggctacccttttaataccagtgatagaattctaaagaaattaataaaattaaaacattcttgtactgtaagaactttatattttctctgtttttatgatagatattaaagtgtgaccgatgttcttcakagcaagtttttatcaaccacctttcatttaattaa

SEQ ID NO: 688844 - DNA, 2078 bp, Homo sapiens
tacaaggtagctactcttattattaccatttttcagatgaaaatatcaaggaacttacccatggatacataccttgtgagtggcagaactgagactcaaacccagcagtctggcttagtactcttaaccactattttctttcattagtgacagtgaattctagaaagcagtaaagaaatgccttcaaagttctgaagaaacataattttaaatggaaaattacccaaaatattaatcaagtattagagggatataatacattttcacacatgtaaaaacttagatatacaaaaacctatcttcaaacatgcatgtgtgtgcaagcatgtttgttatataagttatgcatgtttataggttatatataacatgcatatacaggttatataacatgttataacatgcatatataggttatatatgcatgtttgcatataggttatatatagatacacacatatatataggtaagtatatacrctttctgaaaaagtaaattaaggatttactgcagcaaaaggaaaaataacttgaagacaaacaatggcatgacctccaagaacagtgaaccaattaaagagtgcaacaaaaagtaatcccagataacttctatgcaaatgggcataagcactggccatcttgcccctatttttacacttctttggtaagaaactcaattccgggagacagatttttcagtttggagtctatctgtatgcttcctcttgtactgagacagatatgatatctgttcatttgccagcctataggtatggtctggacacaggctgcaggtagaatctgatgtcgtttcccagggaactcaggcagacacagcagggagcaagtggggctgcttcagcataaaatgctgctgaaaagctattgccctctgctatgtgcaacattccatggcttcaattcaaggataaagccctgttctggcctctcaagtttctgcagctttgggatcctgggagacagtgccttaggagtagacaccagggctgtcagggcaggaatggcaccaacaggagtaaagcccctacccaaacagtgtcttgagctttgagcatgaacaaaggggatcctgagctgaagaccctgagaggacaactcttgccaaagtgaagtgagagacccccagggactcctagaaataattgggtgaggcttaaagagagggagctagtgtttctgtgatatgcaaatagactaatgagcaggataaatctgagtacttactgtaaacatattgtgaacataagaccttatttgtacgcaggttggtgaggtctggggaaacctgaattatatttatccagcctagcattgtcattatcatcatcattaacatcctattctgcacaaactcagtataatagcaattgtgctttatctgaacttctttttggatgcaaaatgatttcagtctatgtgtccttttctacctttcccattccagccttgctattcattctgtggtccacagaccagcaacataagcatcacctgagaacttttttgaaatgaaaaagtttgagaatgtcaggcctcaccccaggcccactgaaccagaatctgtaacaaaatcccccagtgacttacatgcacatcaaagtttgagaagttaataaccactcttaaggagtggttattgacctggcctggaactgctaaattcctggaactactaaactccaatgataaatgtctggctcctgtaactctcagaatcacctggagagctgggtttacagttctggagtctgggagcatggcactggcatctggcaagggccttcatgctgtgtcatcccatggtggaaggtggaggggcaaaagaggaaagagatgagaatgagtgggagccaaactcgcttttgtgacaacccactcaagaactagcccattcccacaataacaacattaatctacttacgagaccagagccctcatgacctcatcacctttcattaggccccacctcccaacatggttgcattagggattaagtttccagcacatgaactttaggggacacactcatgccatggcagcctcattacagattcaaa

SEQ ID NO: 688845 - DNA, 491 bp, Homo sapiens
attacatttcaagaaatacagccagaagaaacatagaggaaaagaaaagaatcacagaaactgtacacattgttcactgaaagttcttgtataacaatatagaagattgttattatactcacgactttttgtcttttcgcattagaactaaataaaaagtcaagagtgatatagaaattccctgcattaggcggggcrcagtggctcatgcctgtaatcccagcactttgggaggctgaggtgagtggatcacctgaggtcaggagttcaagaccagcctggccaacatgatgaaaccccgtctcaactaaaaatacgaaaaaattagctgggcatggtggcgggcacctgtaatcctacctacttcggaaggctgaggcaggagaatcacttgaacccaggagggggaggttgcagtgggccaagatcgcaccattgcactccagcctgggcgacaagagcgaaactctgtctggaaaaagaaaaaaatt

SEQ ID NO: 688846 - DNA, 491 bp, Homo sapiens
attacatttcaagaaatacagccagaagaaacatagaggaaaagaaaagaatcacagaaactgtacacattgttcactgaaagttcttgtataacaatatagaagattgttattatactcacgactttttgtcttttcgcattagaactaaataaaaagtcaagagtgatatagaaattccctgcattaggcggggcacagtggctcatgcctgtaatcccagcactttgggaggctgaggtgagtggatcacctgaggtcaggagttcaagaccagcctggccaacatgatgaaaccccgtctcaactaaaaatacgaaaaaattagctgggcatggtggcgggcacctgtartcctacctacttcggaaggctgaggcaggagaatcacttgaacccaggagggggaggttgcagtgggccaagatcgcaccattgcactccagcctgggcgacaagagcgaaactctgtctggaaaaagaaaaaaatt

SEQ ID NO: 688847 - DNA, 645 bp, Homo sapiens
aagaatcttctcttagctgtagattagattgaaatgcaygaaacagccagagaagaacccaagacttacttccttataacaatacagtctttttcctctgtaacttcagaataaattaaattttgtgcctatgcctaactttcactctttgaaagtgctttaatagattctttttggaggaaggagatcagacaatataagttttaaccactgagaaattcagtatcaacaaatatgaaactgcttttagcaaaatagtaatgtttatactttttattaatataattttaaaaacaaaagtctagttagtttttgctattactttcactaggcaatacttgtttttgaattttatgcatacatgcaaattgcaccatctcatattttccaacagactcatattctcaagaaaaaaacttgttctcagcaaagcccaagcccagataaatgcccctcatgacaaaacttataaccagtatattaactaataaacttcctaataagtatttctgttttataaataaccagagctcctggttgttgaacatgtgtttgtaatgtgaatatacctacgacactaacagtgcagactaagagcaaaaatgttccatttctcatccagtagaacatgcttggagcagaaat

SEQ ID NO: 688848 - DNA, 1287 bp, Homo sapiens
gttattggataaagtaattaggaggtcactggagagcttagtaaaagcagttttgtagagtgagaaggaagaaaaatactataatgagttgaaaaaatacagactacacttgggaaagtttgattgtagagagtagaagagacagaacagaagcttgagaaggcagagcactatgggaaaggtgacttgggataaaaaacttgtgcacatttgtaagctaaagggaaaagatgtaagagaggaagacatgggagataccggaaaagttaaaataattgatggagtaaggctcccattggaattgtaatggaatagtatccagggcacaggtcaactagtcagtccwgggcaaaagaatcagctcttctgagataggggtgaaagaagttaaaaatagacattgttagagatacgaacagaggtgaagggaaaggaaagagcacgctgggagagacatgcctaaagactctattttctctgtaagcctgccctacaacaaacattaaaggaatttctccaggcagaaggaaaataataccagataaaaacctggatctacacaaaggaaagagtgctggaaatataactttatatgataaaatctaaaagatatatttttcatttttagtctctttttaaaaataactgaagcaaaaaataataacaatatattacaggatttactatttcaaaaaagtaaaacgtatttcaaaaaagagtacataagtaaaacgtatttcaaaaaagagtacataagaaagaggagtggtatttcaagtatagtgacataagcttcttatcctatatgtaaagtggtttactattgtttgaaagtagactgtgataaaaaagatataagctctaaatcaatggttctcaaagtgtggtctagggggtctgaggaaggttagatctagaaatcccaacacctagctaacagaagtaccagaaagagagactcacgtttatgttagcatgataaaggctttaagaaatcccgtagtaggatgtggagaaataggaacatgtttacactgctggtgggactgtaaactagttcaaccattgtggaagacagtgtggcaattcctcaaggatctagaactagaaataccatttgacccagccatcccattactgggtatacacccaaaggattataaatcatgctgctataaagacacatgcacatgtatgtttattgaggcactattcacaatagcaaagacttggaaccaacccaaatttgtccatcaatgatagactgaattaagaaaatgtggcaca

SEQ ID NO: 688849 - DNA, 1405 bp, Homo sapiens
gcaaactactttttaaccacttttctttttatttatgctggttgttacttctgtatctctgaaaaattatgcgtatgcctctatttttaaagtatgctaatctcgttggagctttaaatttttaaaaattattatgaaaacttaaacctagaaacacccatcagctagatttcacagttaacattttgctatatatatttcatctacttgttttttgccaaaatatctttaagtaaattaaaaactcatgaaatcctcaagcctaaatactttataacatatctttaaaagtaataataatgacatttttctgcataaccacaacactattattacacctaataaaatctttgtcatatcttagaaaataatttttacyatctggttttttttttttttttttggagaatagtgaatatatttacataaatcaaaatccaaaaggaacgaaagtgcacccggttaaggggaagtcttcctgccattcctgagcctggtcccaggccctgccctagtttcccgtgtagctttctagaatagtccatgcacagaatcatttatatataaagaaaatataagcccagtgaagtcagagacttgttcaccactgaacccttagacctaaaataatgcccagcactcacatatttttttgaataaataatttttttttttttttttgagacagagtctcacactgtcgcccaggctggagtgcagtggcgccatcttggctcactgcaacctccacctcctgggttcaagcgattctcctgcctcagccttccgagtagctgggattacaggtgtgcaccaccatgcctggctaatttttgtatttctagtagagacagtgtttcaacatgttggccaggctggtctcgaactcctgacctccagtcatccacccgcgtcaacctcccaaagtgctggaattacaggcatgagccactgggcctggccagaataaatgaatttttaatcagtggttatatgctataatactgtttgtacttcactattttttttacttgtttccaaatcagttcttgtgagctgcctcattctttttagtagctgcaaaatactcttatgtgagactgaactatgatttatgtaacaagtctcctacggatacacatttgtgtttttccaacattctgctattaacaacgctgtaataaatatccttgtacaaggccaggcatggtggctcacacctgtaatcccagcactctgggaggcagaggcgggaggattgcttgaggccagaagtttgagaccgtagcagcacagcaagaccctgtctctatgccccccaccaaaaaaaaaaacctacaaaagaaaaaaagagaaattcgtatacaggcataagcacgtcttcacactgctatttctcgttcct

SEQ ID NO: 688850 - DNA, 549 bp, Homo sapiens
tccagcctgggtcacggagtgagagtccgtctcaaaaaaaaaaaaaaaaaaggtatcttgctatctcatgaccatgaggagaaggtcatgctttctacacttttctctagctccccctcagtcatacattaacgatctacacggaatggttcattttctcagctttgtctatttttgtacygatactgtcaccaaaacatcacaggttccgtctaggtccggccgcccaccatacagaaagccaatgacagaggagacaagtattgtcaaggaggaacgttttaatcaggtgctgtggctgacaaatccatctccctgaccaactaaaaccagggctttacatagcaaggaagaaatgaaacaatgtgtaacaaaacaaaaactaaggaggggcaaggaagcagtcatgatgaatgaacggtccagcatcattgtctggatgtggagatctggcgattctcagttctttgatactttatttttttatttttttagaggactgaaggttgtttcctgaggaaggaactcagctaaaacaaacttaaggtt

SEQ ID NO: 688851 - DNA, 640 bp, Homo sapiens
agtgcagtggtgagatcttggctcactgcaatctctgcctcttaggttcaagtgattctcctgcctcagtctcccgagtagctgggactacaagtgtgcgccaccacacccagctaatttttgtatttttggagatggggtttcaccatgttggccagtatggtctccatctcttgaccgcrtgatccgcccacctcggcctcccaaagtgctgagattacaggcatgagccaccatgcccggcccattacctctatttaaagaataatttaaattctgtttaatcctatgtaaatgccaagtttagaatcataaagtaactcctagtgttccccatttttcatattctctgatttatctaaaattttacaatgaaatcttactttggtcatcagctaaaactggattatcattctttgttttaagaaaataataggataatttttaggtctctgtgtttatgatttctaaaattcaactttataaaaatatgttagtgtagcaagagctaagttaaagctacgaagtttctctacttttatgaagttacagtttaaaagttaaaaaatgttttttttaaagaaattttatgagaagctcaagatttagataattacaaatttctaggtgtttgggaaaa

SEQ ID NO: 688852 - DNA, 640 bp, Homo sapiens
agtgcagtggtgagatcttggctcactgcaatctctgcctcttaggttcaagtgattctcctgcctcagtctcccgagtagctgggactacaagtgtgcgccaccacacccagctaatttttgtatttttggagatggggtttcaccatgttggccagtatggtctccatctcttgaccgcgtgatccgcccacctcggcctcccaaagtgctgagattacaggcatgagccaccatgcccggcccattacctctatttaaagaataatttaaattctgtttaatcctatgtaaatgccaagtttagaatcataaagtaactcctagtgttccccatttttcatattctctgatttatctaaaattttacaatgaaatcttactttggtcatcagctaaaactggattatcattctttgttttaaraaaataataggataatttttaggtctctgtgtttatgatttctaaaattcaactttataaaaatatgttagtgtagcaagagctaagttaaagctacgaagtttctctacttttatgaagttacagtttaaaagttaaaaaatgttttttttaaagaaattttatgagaagctcaagatttagataattacaaatttctaggtgtttgggaaaa

SEQ ID NO: 688853 - DNA, 640 bp, Homo sapiens
agtgcagtggtgagatcttggctcactgcaatctctgcctcttaggttcaagtgattctcctgcctcagtctcccgagtagctgggactacaagtgtgcgccaccacacccagctaatttttgtatttttggagatggggtttcaccatgttggccagtatggtctccatctcttgaccgcgtgatccgcccacctcggcctcccaaagtgctgagattacaggcatgagccaccatgcccggcccattacctctatttaaagaataatttaaattctgtttaatcctatgtaaatgccaagtttagaatcataaagtaactcctagtgttccccatttttcatattctctgatttatctaaaattttacaatgaaatcttactttggtcatcagctaaaactggattatcattctttgttttaagaaaataataggataatttttaggtctctgtgtttatgatttctaaaattcaactttataaaaatmtgttagtgtagcaagagctaagttaaagctacgaagtttctctacttttatgaagttacagtttaaaagttaaaaaatgttttttttaaagaaattttatgagaagctcaagatttagataattacaaatttctaggtgtttgggaaaa

SEQ ID NO: 688854 - DNA, 2084 bp, Homo sapiens
actgaccatatgtatgcttctatgaccaaatgaagaaaaaaaaaaacctggaattacattaaacataaatatcaacaagcaatctgttttgaagttcaggtaataatctttactgcgtattatgaataatgatgtgaatggtatgaataaagtgtaatactaggggagaaaaagcagctcaggaaagaatgctgtgtaattttaaattcactattctgtcagtgggacagcaaggaaactgtacagttatatgatttagtctctacatgtctatagtgatatgtgattgagtaaaagtcttgacactaggatttattgctttgatgcactgtatacagctatctgtctctttctcaaaagcagcttatgaagagtgggcatgaagatggtgatattcagattatacgagtaactgatctggagagtcagtcattctctctagmcaagtctttgagcaacagttctgttctcctaaaaaactgtcaggtaggcaaggattcagagaaatgtgattttcagtgattacacatattcattttcttcaaataatctctggttatatctacctactttagacatttcaaatagtataaatgctaatcccagaaaataggtgctattattagaatgaagatgtttattattacatacatgctaaaagtgatttatttacatactttagttattgcttaatcatattcaatgaaccagaaataccttaggtggtattttaagattacagatcatcccaagaggtaactattaccaaaagtattttataaaagtcagtcctaaaaccttatagtggggaattcttagctgcctaagaacagaatgaaatgcccctaaagtcataaggttgtatatataatgagagagttaagcataacagtagttagtatactagacatctttctattagagttaggaacaagataaggatgcctatctttactattactattttacctgcactctggtaatcaattgtatatttaaattactttttaaaagcaatgttttcctattcatctatatatacacatgaatacaagtatatgcatatacatgaacgtacacgaacacatccacctatacaccagtattagtgttaaatgagaccataacatgaatttttctattaatttcttcagatttttcagctagcaaaaagagattaaagctacaaggaattccatagtactgttctatcatgacacaagtggagatttagactggatccaatgttctgttggtacatgcatttctgactttgagcacgaaagcctgtttttcaaaagcaaatttctagaaatgcacttgcttcctcaaagttataaatattttatatttgcgccaagcacggttgctcacgcctgtaatcccagcactttgggagaccaaagtaagaaaatcacttgagcccaagaattcaaaatcagcctggtcaacatagcaagatctgctctctaccaaacatttaaaaaatagcctgtagtcccagctactcatgaggctaaggtgggaggatggcttgaacctgggaggtcgaggttatagtgagacatgataataccactgcactccagtctgggcaagaatgagaccctgtctcaaaattttttttttttagtatttgataaatactaatgaactgctttcaagttgcttaacaatttaaccccccacaaaaatagtatatgaatatccactccctcacaccctcttcaacgccagattttcttttgctcatgtttggctaaaaatgaaatctcattattttaatttgtacttctcatgaccactatgggaaaaaatatttttatatttacaggatatctgtaatcttctatgctttctctatctatattccttcatgtttttatactcaattgtttgccttcatactgatttactgatgctctttatagattagtggttttcaatttttatgttataagtaatttctcctagtctatttttaacttaatgtatctcatcatatagatgtgttatcacttatgtggttaaatctgttaatcttttcctttattattttggtaatacatttttaaaaagacatt

SEQ ID NO: 688855 - DNA, 985 bp, Homo sapiens
tacaaaaaatagccggatgtggtggtgcgtgcctgtaatcccagctacaggggaagctaaggcaggaaaatcgcttgaacccgggaggtagaggctgaagtaagscgagatcgcgccagcccactccagcctaggcaacagagcaagactttgtctcaaaaaaaaaaaaaaaaagacgacgacaatgaaaaatagacccagagagattaaatgacttacccaaaatcatagagctgggattagaacttatatatcccaaaacctagtccaaatcagtggactaatgtcacattccattgtgctaatatggtaaagtaacatcacagtcactgattatcttggtaaacatagttagtatactggtagagaacatgggttttgctgtcagacagccttaggtttgtgccacagctttgttactcacaagccatgtgaccttgagaaaattaagtcctgggttcaataacagcatctatctcaaagggctgtcatgaagattaaatgagaacgtcagtagatttaacacagcccagagcacagtataatccctcatgcatcaacaaaggaaagtgcccaatgatagaatctcttgaacgctcatcgacagtcatcaaataaatgtcagaaagaaatatagctttttcaagcttagcaaatatacagatatgagctaaaacaaaggcaccttaagaataacactatgataaatgcacctcagtataacgtagctttcttttagaaaacattattcccctacatctcttgtatactacttttccagagccatttaaatcattttcaccctgagaactctgtccttggctcttgtcactctctactgggtctctatgtattttcattcattgtcatggttacatctattatccgtacatgcagggttctaaaacttaagagggattccagaggttcctaaaacaataaacaaaactttccaagtatactgtgtgtgcacttcttttctgga

SEQ ID NO: 688856 - DNA, 605 bp, Homo sapiens
tgaaagaaaaaaattcatctgcatgtaactttagaaatgaaactagggcgtaaattaaaggcwgccatgcatatgcacgtaaattaaaaggttaaaggtgtgcatatgtgtgactgattacagcaaattgctgtctcttcatgaactcttagctgaattaatcaaaccaattatatatgtaggaagcaacctacctcctccgataacaagaaaatcattttcgcatgcagctttaagcacgtggaaggcccccaaaagatgaatgtgctgatgacatgcagagcaaaaatcatacgaagaggaaaaacttgaagagcaaaacctagggtccttgatccttccaagtggacccaccaattgtgtcttctccactcattgctcccagtgtgtggtagagttgatctcctttgacatcttgctttactaacagatgctttaaatataaaacaagttcaaagacaggtaaacagaagctgaggctttcatgcagtagagtgtactgtggctaagttatctgtcaagtacaatgtttactcagttgagatacctctcaattgaagatgcgggccattatttcctaaaggggagttctaccctgaagtata

SEQ ID NO: 688857 - DNA, 615 bp, Homo sapiens
tgcttcaatattaagatgacataagaagacgattttgtgacatagtgagttgtatccttgagcatgtggaccttgttaagtgggcctttagaaaataaatttaaaacagggatattggaaactatattttctgtttatttactaggtaagagaaggctatgctcttgtttgttctttctgggaatacagctagactaaatttctcagactctcttgcagttaattttgggccatacaacagagttctggccaatagcttgttggtagaagcgtcaaatgccaccctaggcatggaccatgttaaatctccttgtataatcctatgtgatatctatttctattctgtggggacttgggaggccatatatggaagatgattggagtctccggtggccgagatggaaaaagattggtctytgaataattgcatggaagagggtcccacattcttctccccgccaaccagaacacattgggctagtctatcctcagaaataaacctttctgccctttgatcagcatctcctcattctcctcacccctggtaactgccattccattctctgcttctatgagttcaactttttagagtccacatataagtgagatcacgca

SEQ ID NO: 688858 - DNA, 628 bp, Homo sapiens
atttttttttattttattattattactattttaagttccggggtacatgtgcaggatgtgcaggtttgttacataggtcaagtgtgccatggtggtttcctgcacctatcaacccatcacctaggttttttgtttgtgtgttttgaggcagagtcttgttctgtcgcccaggctggagtgcagtggcacaatctcggctcactgcaacctccacctcccgggttcaagtgattctcctgccttagcctcctgagtaggtgggattacaggcgcccgccaccttgcctgggtaatttttgtatttttggtagagacggggtttcaccatgttggccaggctggtcttgaactcctgatctcaagcgatccgcccgccttggcctcccaaagtgctgggattacaggcgtgagccatcacacccagccccctattacctagttattacgtccaggatgcattaggtcttttccctaatgttctccctgctcccaatgttaccaatattttcatctgaatctttacctgctcactcctctgcaccctcagctgaatccatgtatgggtttttgttgttgttgttttgtttttgtgggtttttctgttttttttttktttttttttttgttt

SEQ ID NO: 688859 - DNA, 671 bp, Homo sapiens
agaggagggcgcccttcagcctgaaggagcaggggagggcgtgatgatgaggtggggggccaaccctcccctgcctgcctccccccagctgcccagcagagtgggggacactcacaggtgtgcgatgtagtacatgacggcaaggccttcgatggggtggccctggctgttgatgaagtagtagttgatctgggggtggatggacagacggacagtgaggcgcacagaggggtgggaggctgayggtggtggtgggggattaggaacacggaccgtcaccatcagatgggtggtcagaaagttgaataatgaggacggtgggtgggactcaaaactggtaatcggggctgaaaaaatggagggaacagtcacagctgaaggggtgaatagttggacaatcagagacggacagtcacagctgaaccaagggacagtggtggacagagctgccccgcaggactggtggacagaggggatgggtgactggccacactggtaaaatgggtggacacgtggatagctggcggatggccctcccacaggcccagggtctgcagagatttgggggatggcccgggtgggcctttcagcccaccccccgctgctccccggtccaaggctctcacgctgtggaagaggagagagatgctcttggtgaaggccaaggccgc

SEQ ID NO: 688860 - DNA, 671 bp, Homo sapiens
agaggagggcgcccttcagcctgaaggagcaggggagggcgtgatgatgaggtggggggccaaccctcccctgcctgcctccccccagctgcccagcagagtgggggacactcacaggtgtgcgatgtagtacatgacggcaaggccttcgatggggtggccctggctgttgatgaagtagtagttgatctgggggtggatggacagacggacagtgaggcgcacagaggggtgggaggctgatggtggtggtgggggattaggaacacggaccgtcaccatcagatgggtggtcagaaagttgaataatgaggacggtgggtgggactcaaaactggtaatcggggctgaaaaaatggagggaacagtcacagctgraggggtgaatagttggacaatcagagacggacagtcacagctgaaccaagggacagtggtggacagagctgccccgcaggactggtggacagaggggatgggtgactggccacactggtaaaatgggtggacacgtggatagctggcggatggccctcccacaggcccagggtctgcagagatttgggggatggcccgggtgggcctttcagcccaccccccgctgctccccggtccaaggctctcacgctgtggaagaggagagagatgctcttggtgaaggccaaggccgc

SEQ ID NO: 688861 - DNA, 671 bp, Homo sapiens
agaggagggcgcccttcagcctgaaggagcaggggagggcgtgatgatgaggtggggggccaaccctcccctgcctgcctccccccagctgcccagcagagtgggggacactcacaggtgtgcgatgtagtacatgacggcaaggccttcgatggggtggccctggctgttgatgaagtagtagttgatctgggggtggatggacagacggacagtgaggcgcacagaggggtgggaggctgatggtggtggtgggggattaggaacacggaccgtcaccatcagatgggtggtcagaaagttgaataatgaggacggtgggtgggactcaaaactggtaatcggggctgaaaaaatggagggaacagtcacagctgaaggggtgaatrgttggacaatcagagacggacagtcacagctgaaccaagggacagtggtggacagagctgccccgcaggactggtggacagaggggatgggtgactggccacactggtaaaatgggtggacacgtggatagctggcggatggccctcccacaggcccagggtctgcagagatttgggggatggcccgggtgggcctttcagcccaccccccgctgctccccggtccaaggctctcacgctgtggaagaggagagagatgctcttggtgaaggccaaggccgc

SEQ ID NO: 688862 - DNA, 1428 bp, Homo sapiens
tgtgtgcttagcagaaaattacaacctatactggagaaggaaacaatctaaatctttatatctttcaaaaatttaccccacataatattattcatgatcatgatgaaattttcaaatggttttgttttacttcaaaaaggaaactcaagaaaagaagcaaactcttaattaattgctgtaattcccatatttgcctacrtgtatatgttcctgttatccttttaaattaaacacatgaatatgtgaattacactcaaagtattcttctctgtaaaaattacagtagtcataactatttataaatgataacctgaagcccagttacttcatagtcctttaaattccatttgataagcatgttgtgtattgtttagtccttgctcgcttcatttgttcatcagccattcatccaaaaaaattttgaggatctgccatacgttatgttctgtttgggctgggctaagacaatgaataaaatgagattcctgaagtggaattcacagtccaattagagaaactggtgtgcagatgaaccgataagttatactgtagtgtggtaagtattacagttgaggtgcaagaaaactgccctgggaatcttaaatttgcctgttaagatcaacatttgagaatgttttacattggaagcaattttgtttttcaagaatgaagagggatttgtggcctgttgcagtggcacatgcctgtaatcccaacactttgagattccaaggcgggtggatcacttgaggtcaggagtttgagaccagcatggccaacatggtggtgaaaccccatctctactaaacacaaaaaaaattagccgggtgtgctggcacatgcctgtgataccagctacttgggaggctgaggcacgagaatcgctggaccctgggagtggaggttgcagtgagccgagatcgcatcactgcactccagcctggttgacagagcaagacactgtctcaaaaaaaaaaaaaaaaaaaaaaaaaaaaaaaaaggagggatttgctagttaaagaaaatagtaaagggtttttccagcagagggatttatatatgcatgtaaggcactgttagaaaatgatgttacaaagttgagtaaaatggttcctgtttggaaggaaccctttttgccacttgggagatggacatgaaaacaattagccaccactcattttggatagtgatattgtaggttaaaattctacaggaacatagggagatagtatttctcaatttgtctcaactggaaaagctttataggacatacaatcgtagtgctgaacaaaatagttcctgaggtgaatgacctcaatgatcacaagataatagccactaacatttattggaaggttactctgtgctagccactgttctaaacacattacatgcattctctgatttaatgttcacaaccatctgaag

SEQ ID NO: 688863 - DNA, 662 bp, Homo sapiens
ttcaagatttgccccatgcagaatcacatgattgaaagttactcgtttgcctgtgctgctaatcccatgtagaagaccaccttcgagtgcctgcacctgtttgctcccaagctccgtgtctgccatgtgagacatctgtcactgtcacaccaggctccaagtggactcagcatttccattccagctcctgggtcccagacagcgttttctaaacagaagagcctgtcttcctctcatacccactgaagggagaatggagaagagggyggggttctgcttgcagggccctttgcacttcaaatattttacaggaaggggattgcagatgcaccctctgccaaggaagctttgagggccagcatcacatagccctgtggtgaatgagagctggcagggtgacagtctgcgaggaaggaaggatggagctccgacccctttgctttctgaaactcctgctgagagagttggctccacagccctggtagggctcgggtagctgctgtggctgaatcagtcctctgttatcacccgctcggtgccatgaagtggaaaagcagtctctgccctcctcgttcctccaataagcccatcctaatcacccttatcatgctccttccacaccctgagaaaaaatggcctcgcagcagacgtttgaaggcacc

SEQ ID NO: 688864 - DNA, 662 bp, Homo sapiens
ttcaagatttgccccatgcagaatcacatgattgaaagttactcgtttgcctgtgctgctaatcccatgtagaagaccaccttcgagtgcctgcacctgtttgctcccaagctccgtgtctgccatgtgagacatctgtcactgtcacaccaggctccaagtggactcagcatttccattccagctcctgggtcccagacagcgttttctaaacagaagagcctgtcttcctctcatacccactgaagggagaatggagaagagggcggggttctgcttgcagggccctttgcacttcaaatattttacaggaaggggatkgcagatgcaccctctgccaaggaagctttgagggccagcatcacatagccctgtggtgaatgagagctggcagggtgacagtctgcgaggaaggaaggatggagctccgacccctttgctttctgaaactcctgctgagagagttggctccacagccctggtagggctcgggtagctgctgtggctgaatcagtcctctgttatcacccgctcggtgccatgaagtggaaaagcagtctctgccctcctcgttcctccaataagcccatcctaatcacccttatcatgctccttccacaccctgagaaaaaatggcctcgcagcagacgtttgaaggcacc

SEQ ID NO: 688865 - DNA, 592 bp, Homo sapiens
gtcttcactaactttcagctactgcagcaagtttggaagaaactcaaaagagaaaagatggattcagccttacaggttccgttgggaaaacggtccccgtggatgctcggctgtggctattaaccatacacactcattaagcagttttactaaagagaacacaaaggaaaggggaggctggttaatgcaatttgaggagagaaatgtackatggagaggtaattgagtgcattcagtctactctacatttttattttagtttttaattgacaacaaatgtacatgtttatggggtacagagtgatgattggatacatttaatgtatagtgatcacagattcactagtgatcactagtgattgcccactaagccctagatacatgagctataccgttctgtccttggggaagtcacctccccaatgcaagtgacttatccacttagcccacttgtggcagccctggaacgcacgtcccctggctcctaaaactctgctgtttccattgtaccaccttattatctggtgatatttccttcctaccacacacatgacctcaccattagattagaaagactttagtataaaacata

SEQ ID NO: 688866 - DNA, 592 bp, Homo sapiens
gtcttcactaactttcagctactgcagcaagtttggaagaaactcaaaagagaaaagatggattcagccttacaggttccgttgggaaaacggtccccgtggatgctcggctgtggctattaaccatacacactcattaagcagttttactaaagagaacacaaaggaaaggggaggctggttaatgcaatttgaggagagaaatgtacgatggagaggtaattgagtgcattcagtctactctacatttttattttagtttttaattgacaacaaatgtacatgtttatggggtacagagtgatgattggatacatttaatgtatagtgatcacwgattcactagtgatcactagtgattgcccactaagccctagatacatgagctataccgttctgtccttggggaagtcacctccccaatgcaagtgacttatccacttagcccacttgtggcagccctggaacgcacgtcccctggctcctaaaactctgctgtttccattgtaccaccttattatctggtgatatttccttcctaccacacacatgacctcaccattagattagaaagactttagtataaaacata

SEQ ID NO: 688867 - DNA, 592 bp, Homo sapiens
gtcttcactaactttcagctactgcagcaagtttggaagaaactcaaaagagaaaagatggattcagccttacaggttccgttgggaaaacggtccccgtggatgctcggctgtggctattaaccatacacactcattaagcagttttactaaagagaacacaaaggaaaggggaggctggttaatgcaatttgaggagagaaatgtacgatggagaggtaattgagtgcattcagtctactctacatttttattttagtttttaattgacaacaaatgtacatgtttatggggtacagagtgatgattggatacatttaatgtatagtgatcacagattcactagtgatcactagtgattgcccactaagccctagatacatgagctataccgttctgtccttggggaagtcacctccccaatgcaagtgacttatccacttagcccacttgtggcagccctggaacgcacgtcccctgkctcctaaaactctgctgtttccattgtaccaccttattatctggtgatatttccttcctaccacacacatgacctcaccattagattagaaagactttagtataaaacata

SEQ ID NO: 688868 - DNA, 1336 bp, Homo sapiens
tatattcgattctctgaggctccctgacttcaaaatagcaacctgcaaattgactgcatatcccagatgcttaaaaaagagccataggtcaggggaacaattctcagcattccagaaaataattacacactagcgaaaagtggacgtctgtatttccaactaaggaggcggagttgttggtcaagcgatgcctgattacaaatattcattatttttaattctatgaagatctggactcagagactctccccaaccctggaccctgcactatactacgcatataaggaaaagaacagatctctggtgattaattgcagcacattcatcattgcatgaatttccttcagcttttagccacggggcccctttgtcattcagaaggcatcccacccactggctcaccagaatttaatatgtcccaacggagttttgaaatctaccagcatttcaacagtggactggagctgccgaaccacagcaaaattaggaaggggtcaaggagcatgagatagcaataccgtggaggttaatagtcagcaaaccaccagtttagagtcctgtgcctagtcaaatctagcaccgctgaaacgtgtgcyggtggcagagacgcatctgacacttcgtcccttcactctgccctttgtgccggtgtccagtgtggactctcttcacgttaagacacttcctgtgcagcttctcggacacccggcagtgaacatacagcacccattcattctccgcttctctgggaaatggagtctgggatgtctgaaacaagactcatgaaaagtggttgcctattaagggccattatgttagagacataaatagcggattgatttttagtttttactaatccagcatttaccaattcaaattacgttctagggggccgggcatggtggctcacgcctgtaatcccagcactttgggaggctgaggcgggcagatcacctgaggtcaggagttggagaacagctggccaacatggtgaaaccctgtctctactaaaaatacaaaaattagccaggggtagcacgtgcctgtagtcccagctacttgggaggctgaggcagaagaatcgcttgaactcaggagaccgaggttgcagtgagccggatcgcgccactgcactccagcctgggcgacagagcaagactttgtctccaaacaaaacaaaaccgaaaatagtccctacggaattctctataatagagtggggaaggaaaataaaaccttgggatccccaaactcactatgccaaagggaaagtgaagcttaggaactgagtcacataaaactgccttccttttgctcccaaaaagatagctgtgac

SEQ ID NO: 688869 - DNA, 2093 bp, Homo sapiens
gagaaaagcttttgaaactgtgggtctggcctttcttgtgctaatagcaactcctgaaagtgaaggcaaaggtgccccttctcccccaaatcaccttcctttccagggcacatctcaataatagaagaggggactgccaaatcccacaggaaacaggagagtgagctccaactcaagatgctgcaggattaaatttcttgcattcaattaaatacatgagggcaccatttatttctcaacccgcactcctcaggccaaagattcctacgtttgcagagggcttccactcccttttacacagctttggtgttgtctctttcctcaagccccacgttagctaacatttcagtgacacctaaagttacaaagctgcctaatagtaaggggcagatgtctctgcaaggttttttatccttggtgtgtctccctggctccagccctcctcccttgctcttgactggttactcttcagaatttcaagagaagtgacttggtcactcaagattttcaatattacccttaaggttttgcagatgaacagaagcattcctagtgagcagggaggttattgctgctggaaaaattgcctgtgaaggacaagatcgataaaaagaaatgaaaagcaaaatgaatgctgaataaaccttcagcaaaatgtgaaaattttcagcaaaacgtgaaaatactctgatttgatatatttgccactgtcttgtaaaaataaagaggacatttccatagcttccctttgataaagttagcatattattttgcagtaccttattgatttcagaaaacaaatgccatgctttttccagcttaacacatttttctaaaagttcagcaccgtaaggactgcaaaagtcatctgattcagccctctggctaggtcatggaatgtagaaatcatttagtgactgcccttagagaccaccaagctgggtgaatagaacaagggcttaggagaaggccaaggttgaatctatgttctgctccttactaggtgtgtgattttagaaaaattacttaaacttcataaggctcagattccccactgtaaagtgagactgataatacttgtctcatagggttgttaagattatatgagatatgtctgcaaagcttttattactgagtctgttggctgggggcaattcatacatagttgctcttattattattcaaaaaagtaaatgcctttttggttactgaaaagttgaagactactgtaggacttaatatcttccaatactctttgctatttgattatttcatgaattttatcatatgtcaaaatacacatttcactgttcctgaaaatcagtgaaataggttttcagtttcatgcattttttattctcattttccccatatcacctaaccaaaacctctgctctgatggtgatcgtatttccacttctaaacctttgcctttttttgggttttatatttctgataacttataaaaatagactttatttttatgccactttaaggttcacagaaaaattaagcagaagatacagatatttcaaatatgcctccagacctgcctaagcatatccgccctcattatcaacatccccatcagagagactctttgcttttccctctgcaccccccatcttctcctaagcataagtccccctcacatcagacagcttgaaacccaagctcctgttctgagctcctgtcccgacacactgctctcaacagctacagcacttcagttctttatcctatagcttgattcttcaccctataggtcattktctactgtgtatccatttcttactttcccaaatagactataaactcttcaagggtggatcattgtttcagattcctatcctatcctttattttgtgtaaaaccccactaattttaattaaatatgtcaagctatcaaccacacacatatatacacacaccttacttcttcaaattacatacttggagaaaattgtggctcattaagatgaagagtttttaaaaatatatttgtagaagttgtttaagtgactcgatccataagggagaaaatatttaaaaaagaaaatgaagttaggttaaaatgccaagctgaattgtaa

SEQ ID NO: 688870 - DNA, 2093 bp, Homo sapiens
gagaaaagcttttgaaactgtgggtctggcctttcttgtgctaatagcaactcctgaaagtgaaggcaaaggtgccccttctcccccaaatcaccttcctttccagggcacatctcaataatagaagaggggactgccaaatcccacaggaaacaggagagtgagctccaactcaagatgctgcaggattaaatttcttgcattcaattaaatacatgagggcaccatttatttctcaacccgcactcctcaggccaaagattcctacgtttgcagagggcttccactcccttttacacagctttggtgttgtctctttcctcaagccccacgttagctaacatttcagtgacacctaaagttacaaagctgcctaatagtaaggggcagatgtctctgcaaggttttttatccttggtgtgtctccctggctccagccctcctcccttgctcttgactggttactcttcagaatttcaagagaagtgacttggtcactcaagattttcaatattacccttaaggttttgcagatgaacagaagcattcctagtgagcagggaggttattgctgctggaaaaattgcctgtgaaggacaagatcgataaaaagaaatgaaaagcaaaatgaatgctgaataaaccttcagcaaaatgtgaaaattttcagcaaaacgtgaaaatactctgatttgatatatttgccactgtcttgtaaaaataaagaggacatttccatagcttccctttgataaagttagcatattattttgcagtaccttattgatttcagaaaacaaatgccatgctttttccagcttaacacatttttctaaaagttcagcaccgtaaggactgcaaaagtcatctgattcagccctctggctaggtcatggaatgtagaaatcatttagtgactgcccttagagaccaccaagctgggtgaatagaacaagggcttaggagaaggccaaggttgaatctatgttctgctccttactaggtgtgtgattttagaaaaattacttaaacttcataaggctcagattccccactgtaaagtgagactgataatacttgtctcatagggttgttaagattatatgagatatgtctgcaaagcttttattactgagtctgttggctgggggcaattcatacatagttgctcttattattattcaaaaaagtaaatgcctttttggttactgaaaagttgaagactactgtaggacttaatatcttccaatactctttgctatttgattatttcatgaattttatcatatgtcaaaatacacatttcactgttcctgaaaatcagtgaaataggttttcagtttcatgcattttttattctcattttccccatatcacctaaccaaaacctctgctctgatggtgatcgtatttccacttctaaacctttgcctttttttgggttttatatttctgataacttataaaaatagactttatttttatgccactttaaggttcacagaaaaattaagcagaagatacagatatttcaaatatgcctccagacctgcctaagcatatccgccctcattatcaacatccccatcagagagactctttgcttttccctctgcaccccccatcttctcctaagcataagtccccctcacatcagacagcttgaaacccaagctcctgttctgagctcctgtcccgacacactgctctcaacagctacagcacttcagttctttatcctatagcttgattcttcaccctataggtcattttctactktgtatccatttcttactttcccaaatagactataaactcttcaagggtggatcattgtttcagattcctatcctatcctttattttgtgtaaaaccccactaattttaattaaatatgtcaagctatcaaccacacacatatatacacacaccttacttcttcaaattacatacttggagaaaattgtggctcattaagatgaagagtttttaaaaatatatttgtagaagttgtttaagtgactcgatccataagggagaaaatatttaaaaaagaaaatgaagttaggttaaaatgccaagctgaattgtaa

SEQ ID NO: 688871 - DNA, 2093 bp, Homo sapiens
gagaaaagcttttgaaactgtgggtctggcctttcttgtgctaatagcaactcctgaaagtgaaggcaaaggtgccccttctcccccaaatcaccttcctttccagggcacatctcaataatagaagaggggactgccaaatcccacaggaaacaggagagtgagctccaactcaagatgctgcaggattaaatttcttgcattcaattaaatacatgagggcaccatttatttctcaacccgcactcctcaggccaaagattcctacgtttgcagagggcttccactcccttttacacagctttggtgttgtctctttcctcaagccccacgttagctaacatttcagtgacacctaaagttacaaagctgcctaatagtaaggggcagatgtctctgcaaggttttttatccttggtgtgtctccctggctccagccctcctcccttgctcttgactggttactcttcagaatttcaagagaagtgacttggtcactcaagattttcaatattacccttaaggttttgcagatgaacagaagcattcctagtgagcagggaggttattgctgctggaaaaattgcctgtgaaggacaagatcgataaaaagaaatgaaaagcaaaatgaatgctgaataaaccttcagcaaaatgtgaaaattttcagcaaaacgtgaaaatactctgatttgatatatttgccactgtcttgtaaaaataaagaggacatttccatagcttccctttgataaagttagcatattattttgcagtaccttattgatttcagaaaacaaatgccatgctttttccagcttaacacatttttctaaaagttcagcaccgtaaggactgcaaaagtcatctgattcagccctctggctaggtcatggaatgtagaaatcatttagtgactgcccttagagaccaccaagctgggtgaatagaacaagggcttaggagaaggccaaggttgaatctatgttctgctccttactaggtgtgtgattttagaaaaattacttaaacttcataaggctcagattccccactgtaaagtgagactgataatacttgtctcatagggttgttaagattatatgagatatgtctgcaaagcttttattactgagtctgttggctgggggcaattcatacatagttgctcttattattattcaaaaaagtaaatgcctttttggttactgaaaagttgaagactactgtaggacttaatatcttccaatactctttgctatttgattatttcatgaattttatcatatgtcaaaatacacatttcactgttcctgaaaatcagtgaaataggttttcagtttcatgcattttttattctcattttccccatatcacctaaccaaaacctctgctctgatggtgatcgtatttccacttctaaacctttgcctttttttgggttttatatttctgataacttataaaaatagactttatttttatgccactttaaggttcacagaaaaattaagcagaagatacagatatttcaaatatgcctccagacctgcctaagcatatccgccctcattatcaacatccccatcagagagactctttgcttttccctctgcaccccccatcttctcctaagcataagtccccctcacatcagacagcttgaaacccaagctcctgttctgagctcctgtcccgacacactgctctcaacagctacagcacttcagttctttatcctatagcttgattcttcaccctataggtcattttctactgtgtatccatttcttactttcccaaatagactataaactcttcragggtggatcattgtttcagattcctatcctatcctttattttgtgtaaaaccccactaattttaattaaatatgtcaagctatcaaccacacacatatatacacacaccttacttcttcaaattacatacttggagaaaattgtggctcattaagatgaagagtttttaaaaatatatttgtagaagttgtttaagtgactcgatccataagggagaaaatatttaaaaaagaaaatgaagttaggttaaaatgccaagctgaattgtaa

SEQ ID NO: 688872 - DNA, 1914 bp, Homo sapiens
caggaggtcagatttggttatgctagaataggagtcactccatcatggacataggatttcaactgggccttgggagaatggtggtatctcataggccaaaatttgggtgacctgtcctggtgaataaaataagacatataatggtgtaaaggcagggaagtgtaaggtaagattcaggaaatggtcagtgatatctgtttggagcatactttaacaagtaaggaggaaggagacataaggttggggacttgggttgtgccagtgtggtagaagtcttataccagatggaggagtctctaagtacatgataatggctccctgaaggttattttcttaaaaactagatggaattttagaaatagaaacagaaaaatgctcagacatctcctcttctctgtctgaccttactctctgggtgatttcatctgctcctattgctttaaaggtgtccagatgctaaagaccccatgttcccatatccaactcagactctgcaactgaactctgggcttatctatccaaatgcccactctccctgatatggatgtagataggcacttcatactcaatatgtccaaaatggagctcttgtttctccctctaccttatagacctactcaccactgtcttcccgtcttagtaagttgtaaattcaaacttccagctctctggctaaaaatcgcagtgttatccctgactgtgtctctctctcacactgcctattgactatcagcaaatcctgtcaagctttcgaaagacgttcagagcctgacaccatctcatcacctcttccaacaccaccccattctaagccactatcatcccttgcctagattacacagtggttcctaactaacttgccagcttccaaacattccccacacagcaaccagagtgtttttttcaacaagttgagtcagatcacgccactcttcagctaaaaatcccctagtggcttctcatttcattaaactaaaaaccaacatccttacaaagatttatttggccctacccaacttggccccagctactcctctgatctttctccctacaagtcactgtcttcctcactgtgctccagcctcaggcatccttgctattctccaaatgctccaaacacatccctgactcagacattcatactgttgtttcctctgctttaaatattcttctaccaaaaagccctgtgactctcacctttcttcagaaatctgctccgataccacattatcagagaagacttccacaattcgctgtgtgaaatagcactgaataccctctatcttccttagctgcatttctcaccatgtgccacataatatgtatgcagtgcaatatattatggatatgtttctaattattgacatttcccatgaattaggacagtgcctggcatacagcaagtgttcaatatatatttgataaataatgaaattaatagaggacagattcacaaygaggacatattgttaaataaataattatccactaaagtggtagatgactttcacttccacatctcccgtcccccaccctatcatttgatccacgattcatgcataaactatttgctagggaaatcttgaaaaatgaaacaatttggtcacaagcactaaatacagactagcatagttggaaaaccaaacaggtggccagttacaactccatacactttgatgacccttgacagcttataacgcactgttgcattcttctaactgtattctcataacaacactaagaatcagtgggtggattgcttctgttttacaaatgataaaaataaggtttagagagaacaagttacttcccttgattacatggcaagaagatggcaaatgaggactccaaatacatctactcccaagttcctggtctttacccatcacatcaggcatgtggaccctaattaaa

SEQ ID NO: 688873 - DNA, 1914 bp, Homo sapiens
caggaggtcagatttggttatgctagaataggagtcactccatcatggacataggatttcaactgggccttgggagaatggtggtatctcataggccaaaatttgggtgacctgtcctggtgaataaaataagacatataatggtgtaaaggcagggaagtgtaaggtaagattcaggaaatggtcagtgatatctgtttggagcatactttaacaagtaaggaggaaggagacataaggttggggacttgggttgtgccagtgtggtagaagtcttataccagatggaggagtctctaagtacatgataatggctccctgaaggttattttcttaaaaactagatggaattttagaaatagaaacagaaaaatgctcagacatctcctcttctctgtctgaccttactctctgggtgatttcatctgctcctattgctttaaaggtgtccagatgctaaagaccccatgttcccatatccaactcagactctgcaactgaactctgggcttatctatccaaatgcccactctccctgatatggatgtagataggcacttcatactcaatatgtccaaaatggagctcttgtttctccctctaccttatagacctactcaccactgtcttcccgtcttagtaagttgtaaattcaaacttccagctctctggctaaaaatcgcagtgttatccctgactgtgtctctctctcacactgcctattgactatcagcaaatcctgtcaagctttcgaaagacgttcagagcctgacaccatctcatcacctcttccaacaccaccccattctaagccactatcatcccttgcctagattacacagtggttcctaactaacttgccagcttccaaacattccccacacagcaaccagagtgtttttttcaacaagttgagtcagatcacgccactcttcagctaaaaatcccctagtggcttctcatttcattaaactaaaaaccaacatccttacaaagatttatttggccctacccaacttggccccagctactcctctgatctttctccctacaagtcactgtcttcctcactgtgctccagcctcaggcatccttgctattctccaaatgctccaaacacatccctgactcagacattcatactgttgtttcctctgctttaaatattcttctaccaaaaagccctgtgactctcacctttcttcagaaatctgctccgataccacattatcagagaagacttccacaattcgctgtgtgaaatagcactgaataccctctatcttccttagctgcatttctcaccatgtgccacataatatgtatgcagtgcaatatattatggatatgtttctaattattgacatttcccatgaattaggacagtgcctggcatacagcaagtgttcaatatatatttgataaataatgaaattaatagaggacagattcacaacgaggacatattgttaaataaataattatccactaaagtggtagatgactttcacttccacatctcccgtcccccaccctatcatttgatccacgattcatgcataaactatttgctagggaaatcttgaaaaatgaaacaatttggtcacaagcactaaatayagactagcatagttggaaaaccaaacaggtggccagttacaactccatacactttgatgacccttgacagcttataacgcactgttgcattcttctaactgtattctcataacaacactaagaatcagtgggtggattgcttctgttttacaaatgataaaaataaggtttagagagaacaagttacttcccttgattacatggcaagaagatggcaaatgaggactccaaatacatctactcccaagttcctggtctttacccatcacatcaggcatgtggaccctaattaaa

SEQ ID NO: 688874 - DNA, 686 bp, Homo sapiens
gttaactccatggtttctcacagctcctccagccctaactctacctcatgactctgcttaatttcccaatttgctaacaagcaaattccttccacgatttgttcaggtctctgaggcaaagaatctgattggcctcattcattgtcttgtgccaggccccacgccaagagccgtaggtcatagctattctttggattttatctgctcttgcaaaaaaaatggcttggacccaacccaataaaattccaaattaacatataattaaaagatttctagatcaatacaatccaactattaatatataatgaaaaaaaatgaggaacaacctaaatctactgtagccggayttagtttctaaaatatatcattggtattaaatagatctacagtatttatatctcaatcatgcttcacttcatgaaaaaaactggtaaaaatgcaggtattatatattaaacatgattaattatttgttaaattttaaacaacacagctagacacaaaaagcaaaggtagagaggaaagtcaaatgatcactggttaactgaaacaaaaagtcaacactcttttccctatgagtatttgaaattataaaggtacttgttatattaaaatgataaagcagaaaacaaaccatctaatcacttggttagattctcgtataaactccaggcattcaggagcct

SEQ ID NO: 688875 - DNA, 539 bp, Homo sapiens
ggccaggcacagtggctcatgcccataatcccagcactttgggaggccgaggggggtggatcacctgaggtcaggagttcgagaccagcctgggtcaacatggtgaaacctcatctctactaaaaatccaaaaattggccaggtgtggtggcgtgtgcctgtagtcccagctacttgggagactgaggcaggaaaactgcttgaacctggaaggcagaggttgcagtgagctgagattgcgccactgcactccagcctgggcaacagagtgagactccatctcaaaaaacaaacaacaaaaaagcctcrgatattcatgaaaaaggaagcttttctattttaccaaaattattattatggcatttaatgattctgaaaaaaaaataaaccagatcaactcattgtcctccttaaaatcctccagagacatccttgcacattcacaataaaatctggcttatagagcttcacttgctttggctacaatctttttctcaaccagatctcttatcactctccatatcaatcttgctcactac

SEQ ID NO: 688876 - DNA, 1760 bp, Homo sapiens
accagtgaattctacactttaagtgggtgaattatgtggaatataaattatatttcaataaagctgttaaaaaactatttagaaaaacttcagtttctgtaaaataacaaaaccgaaaaactagactaaaaatatttagagagcagagactgtattattcatctttgtatttcttaaaaatgtatagcctgggcacagtggctcaggcctgtaaccccagcactttgggaggccaaggcggggcagatcacgaagtcaggagattgagatcgtcctggctaacacggtgaaaccctgtctctactaaaaatacaaaaaattagctgggcatggtggcacacgcttgtagtcccagccactcggcaggctaaggcaggagaatcgcttgaacccgggaggtggaggttgcagagagctgagattgcgccactgcattccagcctgggcgacagagcaagactccatctcaaaaacaaaaacaaacaaacaaaaacttataacagaagtttacacacagtaggtgctcaataaatatttacataaatttaatacaaataactgaaaaatattggacttcagggtattactaagaccaaatattatgtactcgactcattatttgtaactatatattatatacacaataaatattatccttgctaatctaaaataggctgggcatggtggctcatatctgtaatcccagcactttgggaaggtgaggcaggaggatcggttgagctctggagttcgagacaagcctaggcaacacagcaaggtgccatctctccaaaaatattaaaatattagccaaacatggaggcacatgcctgtagtcctagttactcaggaggctgaggtagaaggatcacttgggtccagaaatagcagattacagtgatctatgatcatgtaactgtacttcaacctgggcaacagaatgagaccctgtctctaaaatttttttttcattcagaaatcctttggaatgcataacaagtttcctcagcaccagatttcttttttcttaaatatgttttgctaaattaaactcagtttcaattcccagaatactgtgcaaatcctaaagagagagggggcaggaaacaggtcagaagtaaaccagatggaaactagcactttactgtgaataatacaaatgtacagctcacaaggaaggaaagaaccaactatacagatgctcctcaacttacaatagggttacatcctgataaaaccatcatacgttgaaaatatatgttgaaaatgcatttgatacacctaacctcctgaacattacagcttaatctaccccaccttaaacatcctcaaaacacgttagcctacaactgggtgagataatctaacacaaagcctattttataacaaagtgttgactatcttatgtaatttattgaatactgtattgaaagtgaaaaaagaatggttatatgggtacttgaagtatgatttctacygaataggtattgctttcaaaccattgtaaaattgaaaacccataggtcaaaccatcataagttgaggatagtctgtatatcatttcacctttttatacacttggtcttatattcaatcactatagggacttaggggactttttcattctatgtggtgttctgagttactggaagctggcactcagctactgaatttagccatgtagaaggggaatcttcaaaaatgtcaaatgtggagaataatcatattcatatactagaaatgttgtggaagtgtatttc

SEQ ID NO: 688877 - DNA, 3165 bp, Homo sapiens
cgtgatctgttttctatattactttgctaagtctgtaatgttaagctttaacctactgctacagcttgggttatgtgtaatcaattatatcaaacatgacarctacgtactcatactacctctcatctgcttaagtggccttttcttgctattttattttgtgttgctgagttccaccactagaggtagcatcattgtcactatctttttgaactctgcagtccagttaccacagcttaaacaaaaaatacagttcttagaaggtgggcacgctatgcacggagcaatttttggatacattttctggagggaatgcattataataagccagtaaaaatctggtctcttccccatttatgagcctatatatataaaaccacaaacaagacttaaaacatgaactggttatggctgggcacggtggctcatgcctgtaatcccagcaccttgggaggccgaggcgggaggatcatgaggtcaagagatcaagaccatcctggccgggggggggaaacccctcctctactaaaaatacaaaaattagctgggcatagtggtgtgtgcctgtagtcccagctactcaggaggctgaggcaggagaattgcttgaacccaggaggcagaggttgcagtgagctgagattgcaccactgcactccagcctgggcgacagagcaagacttcatttcaaaacaaacaaacaaaaaagcaaaaacaaaacttgaactggttatatgaatgggctacatacaaagcatacatgtaaaatcaagcaagctaacttataatatcaagaaagctaacttataggtggaagacaagatacatatgaaacgggagtggaaatttgggcaaggagaatcattcactgtgagaagagcaggtttcaggagtcgcttaaatgatggggaagtgagtgatggcattatcactggggaggaaatgggggagatcaaaggatgttttattctgtggcatggaggactgggaaggattccaaaaataataatggatttgcttttacttgtagaaatagatgatgaattcatcaaaaacttgaaaatactgattccttggctacttagtcccgagagcctagatattaaagagatcaatgggaataaaatcacctgccggggtctggtggagtacttcaaggtatcactctcatttctagagcattcgtgggatagatttgacatatattggatcgtaattcctataaacaaaaattatagacccgataatatgggagcaaaggtacgaggaatctataaaaaggattttaaaaatcctttctaaaaagctttttcaaaacctttcagaaagcttactttctgaaattattcttttgaggaaactacatataggtaacattattgtccccttttatcttgagggaactgtattttgaaatatgaatgtaagagttggaaaatcttttggggggatggggtgtttcccagggtccatggtctattctgaattttaccttcataattctgaagattttccccaaggggataccttcctactgaagaaaatacttccccatttcttactctctgcaccaagagccaatatgaagtggaattattttaaatttgcatttacctgtttaccttccttagatagcactgaatactttttaccagcactgaatactttttaccaacccgtatatatcctggagaatttcagttaccaacccaattgtggactgatgctccaaggactaaaatatcaatttttaaaattcatgttttgtcatttaatatgctatcatataggttctgtgtgatctgtttaccttcatgattgtcagcaataaatgccatgttattaatctaaaatatgaatttttactgcgtgtaacactgtggaggtgcttacaatttggtaggagattcaggaccttcacaagggtctgttccataaagcttatgacatcagcagggtacagattcctgcgggtaactgaaaagggcgttactcccggcagaggggtctaagaacattttaaagggagtggcattgagttgagcctttaagaagggccagattggcagacagagatgtttgaaaaaggcatttcaggaaagggaaacaacatgaactaagaaaaaagggaatttaagtatgagaaagataaaatagttataagttcctgaaaatattttttgaaatgtcaagaacttagaatgcaatttcatagaattagaggaaatattgaatggaattgcttgaacatgaatctttttctttttttttaggcttatataaagatctatcaaggtgaagaattaccacatcccaaatccatgttacaggtatttattaatgaggaggcatgttttaagacacgtgactaaggctaagatttctggctgtcagaaataaccaaataacaatattagacagaataatttattggaagattatttgcctaataactttacctatttatgtgttcatctaaacatgtttcacataaacatattgcagcctcacttgtgttgagacacaaacactttataccaaagggttttcattctctttgcactaaatttgtttagaacagtcttctattatgatttagattcacacatgtaacacacagtagaaaagcaggtgcaagttttaaaaaactagtctccacaaacatttttttaaaatgagccaggcacggtggcatgtgcctgtaggaccagctactcaggaggctgaggcaggaggatcacttgagcccaggagtttgagtccagcctgggcaacatagtgagacctcatatctaaaaaataagtcaataaattttggccgggcgtggtggctcatgcctgtaatcccagcactttgggaggccgaggcgggcagaccacgaggtcaagagatcgagaccagcctagccagcatggtgaaaccctgtctctactaaaaatacaaaaattagctgggcgtggtggcgcaagcctgtagtcccagctacttgggaggctgaggcaggagaattgcttgaacccaggagatggaggttgcagtgagccgagatcgcgccactgcactccagcctgggcaacagagcaagactcagtctcaaaaaaaaataagaataaaaaataaataaataaataaattttaaaaagggagaaactagttcccttata

SEQ ID NO: 688878 - DNA, 3165 bp, Homo sapiens
cgtgatctgttttctatattactttgctaagtctgtaatgttaagctttaacctactgctacagcttgggttatgtgtaatcaattatatcaaacatgacagctacrtactcatactacctctcatctgcttaagtggccttttcttgctattttattttgtgttgctgagttccaccactagaggtagcatcattgtcactatctttttgaactctgcagtccagttaccacagcttaaacaaaaaatacagttcttagaaggtgggcacgctatgcacggagcaatttttggatacattttctggagggaatgcattataataagccagtaaaaatctggtctcttccccatttatgagcctatatatataaaaccacaaacaagacttaaaacatgaactggttatggctgggcacggtggctcatgcctgtaatcccagcaccttgggaggccgaggcgggaggatcatgaggtcaagagatcaagaccatcctggccgggggggggaaacccctcctctactaaaaatacaaaaattagctgggcatagtggtgtgtgcctgtagtcccagctactcaggaggctgaggcaggagaattgcttgaacccaggaggcagaggttgcagtgagctgagattgcaccactgcactccagcctgggcgacagagcaagacttcatttcaaaacaaacaaacaaaaaagcaaaaacaaaacttgaactggttatatgaatgggctacatacaaagcatacatgtaaaatcaagcaagctaacttataatatcaagaaagctaacttataggtggaagacaagatacatatgaaacgggagtggaaatttgggcaaggagaatcattcactgtgagaagagcaggtttcaggagtcgcttaaatgatggggaagtgagtgatggcattatcactggggaggaaatgggggagatcaaaggatgttttattctgtggcatggaggactgggaaggattccaaaaataataatggatttgcttttacttgtagaaatagatgatgaattcatcaaaaacttgaaaatactgattccttggctacttagtcccgagagcctagatattaaagagatcaatgggaataaaatcacctgccggggtctggtggagtacttcaaggtatcactctcatttctagagcattcgtgggatagatttgacatatattggatcgtaattcctataaacaaaaattatagacccgataatatgggagcaaaggtacgaggaatctataaaaaggattttaaaaatcctttctaaaaagctttttcaaaacctttcagaaagcttactttctgaaattattcttttgaggaaactacatataggtaacattattgtccccttttatcttgagggaactgtattttgaaatatgaatgtaagagttggaaaatcttttggggggatggggtgtttcccagggtccatggtctattctgaattttaccttcataattctgaagattttccccaaggggataccttcctactgaagaaaatacttccccatttcttactctctgcaccaagagccaatatgaagtggaattattttaaatttgcatttacctgtttaccttccttagatagcactgaatactttttaccagcactgaatactttttaccaacccgtatatatcctggagaatttcagttaccaacccaattgtggactgatgctccaaggactaaaatatcaatttttaaaattcatgttttgtcatttaatatgctatcatataggttctgtgtgatctgtttaccttcatgattgtcagcaataaatgccatgttattaatctaaaatatgaatttttactgcgtgtaacactgtggaggtgcttacaatttggtaggagattcaggaccttcacaagggtctgttccataaagcttatgacatcagcagggtacagattcctgcgggtaactgaaaagggcgttactcccggcagaggggtctaagaacattttaaagggagtggcattgagttgagcctttaagaagggccagattggcagacagagatgtttgaaaaaggcatttcaggaaagggaaacaacatgaactaagaaaaaagggaatttaagtatgagaaagataaaatagttataagttcctgaaaatattttttgaaatgtcaagaacttagaatgcaatttcatagaattagaggaaatattgaatggaattgcttgaacatgaatctttttctttttttttaggcttatataaagatctatcaaggtgaagaattaccacatcccaaatccatgttacaggtatttattaatgaggaggcatgttttaagacacgtgactaaggctaagatttctggctgtcagaaataaccaaataacaatattagacagaataatttattggaagattatttgcctaataactttacctatttatgtgttcatctaaacatgtttcacataaacatattgcagcctcacttgtgttgagacacaaacactttataccaaagggttttcattctctttgcactaaatttgtttagaacagtcttctattatgatttagattcacacatgtaacacacagtagaaaagcaggtgcaagttttaaaaaactagtctccacaaacatttttttaaaatgagccaggcacggtggcatgtgcctgtaggaccagctactcaggaggctgaggcaggaggatcacttgagcccaggagtttgagtccagcctgggcaacatagtgagacctcatatctaaaaaataagtcaataaattttggccgggcgtggtggctcatgcctgtaatcccagcactttgggaggccgaggcgggcagaccacgaggtcaagagatcgagaccagcctagccagcatggtgaaaccctgtctctactaaaaatacaaaaattagctgggcgtggtggcgcaagcctgtagtcccagctacttgggaggctgaggcaggagaattgcttgaacccaggagatggaggttgcagtgagccgagatcgcgccactgcactccagcctgggcaacagagcaagactcagtctcaaaaaaaaataagaataaaaaataaataaataaataaattttaaaaagggagaaactagttcccttata

SEQ ID NO: 688879 - DNA, 658 bp, Homo sapiens
atggttttctgtgttgctaagctttgttacctttctcttttcatttgtgtatctggtgtaatttttttctttgtggttaccattgggctaacagagttttataggtatattttaagctgatagtaacttagctttattcatatagaaatactctaggcttccccctcaccctcacaatttatatttttgtcaccttaagttacttatttatttgttatatgttccttagccactaattatggccaaggtttttttttttttttgccattttgactttaaacttgtatactaaagggttgaaatattcacatggcaccattacatcaggggagcattctgaatttgatttataaaatttacctctattagtatgtttaatactttcttgtcttttcatgatagaaattattattctttcatttccagctgtagcactcttttaagcaactcytgtaaggccagtttagtggtgataaattccctcagcttttgcttatctcagaagttctttattttctgcttcatttctgaaggatacatttgctaattataatattcttggttgacagttttttgtttccttttaccacttcaagtatatcatccccttctctcctggtctgcaatgtttctgctgagaaatctggcaatagtctca

SEQ ID NO: 688880 - DNA, 906 bp, Homo sapiens
atttgcagatgatgtttattagcctttgctggttatgttttatttgtatataatgtgactcccctgagagaagcagcaacagaaaaaccctggttctgagatggcaggtgagtcagggagatccttcaggctggtactttcgagcacctgaccctcaatatgtcttccgagcctgagcttgccatagaatgcagaatccttgcacttcctgaccattcaggtcagatcgtggtcattcggattgataaccatgcagcacctctttgctcagctttggctgggcttggagctgcaagagacacaaaaccagtaaaaagcagtagctcccctgtccttcaggtgttgtgcctgttatgcaaaactggcacgtatgagtcaggtgttcacaaattgccatgctaaaatgagtgtggtgtaacmaataattgggacaagaccagtgtgggtgttattagggaaagctttcttacatggatctgaaacaaagactaggagggagccactctggggctttctctaacaaggcatttgtgttgatccgggagttatgctggtcacatgagtgtcacacattgcttcagagtgctttggttccttcccctggaacataatctgagcctttgccctaactcctttgctaaccttccattctgtcagcttcaacaccagattccatcctaatcccagcactgagatctaagaagtcccttttaagaatcaagacgaatggggagattactagatatatttatttcctagggctgctgggacaaaataccacaagctgggtgatttacaacagaaatgtattctctcacagtactggaggctggaagtctgaaatcaaggtgttagcagggccatgctccttgtgagactctgcatagaatccttccttgcgtgttt

SEQ ID NO: 688881 - DNA, 906 bp, Homo sapiens
atttgcagatgatgtttattagcctttgctggttatgttttatttgtatataatgtgactcccctgagagaagcagcaacagaaaaaccctggttctgagatggcaggtgagtcagggagatccttcaggctggtactttcgagcacctgaccctcaatatgtcttccgagcctgagcttgccatagaatgcagaatccttgcacttcctgaccattcaggtcagatcgtggtcattcggattgataaccatgcagcacctctttgctcagctttggctgggcttggagctgcaagagacacaaaaccagtaaaaagcagtagctcccctgtccttcaggtgttgtgcctgttatgcaaaactggcacgtatgagtcaggtgttcacaaattgccatgctaaaatgagtgtggtgtaacaaataattgggacaagaccagtgtgggtgttattagggaaagctttcttacatggatctgaaacaaagactaggagggagccactctggggctttctctaacaaggcatttgtgttgatccrggagttatgctggtcacatgagtgtcacacattgcttcagagtgctttggttccttcccctggaacataatctgagcctttgccctaactcctttgctaaccttccattctgtcagcttcaacaccagattccatcctaatcccagcactgagatctaagaagtcccttttaagaatcaagacgaatggggagattactagatatatttatttcctagggctgctgggacaaaataccacaagctgggtgatttacaacagaaatgtattctctcacagtactggaggctggaagtctgaaatcaaggtgttagcagggccatgctccttgtgagactctgcatagaatccttccttgcgtgttt

SEQ ID NO: 688882 - DNA, 1652 bp, Homo sapiens
ctcactctgttgccctggagtgctagagggacacagtcttggttcactgcaacttctgcctcccgggttcaggcgattctcctgcttcaccctcccgagtagctgggattacaggccaccaagcctgactaatttttgtagtcgttttttgtttttttggtttttgtttttttttttttttgcgttgaacacaaattcaggtttattttctcattatcaaatgctgtggcctgcatgcagtgacccaaagcactcaaaggctgacagggtttcactatgttggccaggttggtctcgagctcctaacctcaagtgatctgcccatcttggcctcccaaagtactgggattacaggcatgagccaccatgcctggacagctttaatttattttcttagagaattactatgacaaaaagaaatcacatttcagtatatgcagatagtacatgtactatgtatacatttttagagatattatttgtaataaatgatttatattaattmtaagaaatacttttggaaactttcccctttttgagttggatgtaggaatactttgaataagaaagaaaaacacatttctttcatatgtttttgtgtaaacattgaaccaattttgaaattgctgagatttctttggataaggagcgtctgagaaaaacttgtgtgatgtttttgactatgctgcttttaattttgccaacagtaacagtactttgttctatgattcaacatctattttatcaatgaataaaagcccttcatgtaaaatgtctgtaaacatctgcaagtactgggtaaacacccaatgtgacggacatttcatattattgctaaatatggcaaatattcttgggacttaatgtcaaatgagaagccaaactgtgattaaattagtctttattatcatcactgttatgtaaaatttatttacataacacacaaaataaagaaatagctgtctgttgtttgttttcttcctctcagcttaaacaaaagtgtctgctactcattttatattcagtgtgtgaatttttctacctaaaaagcatccattagagtgccatatttaattttttgagaacagcactatacacctgagattagaattttgatcaggaatgcttttatggtgtcagacaaattattttcttccatatgatactcttctatattataccttccattcttggcatgtgaataagtgtatacccatggaacacttagccttttttctatatcttataggaagggtttgtcccagtgcctggaacaatttatgtacaggctttgcatgtacagaagttattcatttctctagcaggtgattatttaaataatatttttaacaaatgtaaactacccctatagtcaagaaatgagcaaaatggaaatcattatttcaaacttgttttactgaaagaaaataatggaattatataggaaggatagtctttcctcttgaatttttaaaattaatagactttaccttctcgggcagttttaactgcagaagaataagcagaaagtaccgagtccctgtataccccagtttactcctcacattttcccctaccaacatattgctttatttactgtggtgtatctgttagagttgatgaaaaaatatattattattagctaacattca

SEQ ID NO: 688883 - DNA, 1652 bp, Homo sapiens
ctcactctgttgccctggagtgctagagggacacagtcttggttcactgcaacttctgcctcccgggttcaggcgattctcctgcttcaccctcccgagtagctgggattacaggccaccaagcctgactaatttttgtagtcgttttttgtttttttggtttttgtttttttttttttttgcgttgaacacaaattcaggtttattttctcattatcaaatgctgtggcctgcatgcagtgacccaaagcactcaaaggctgacagggtttcactatgttggccaggttggtctcgagctcctaacctcaagtgatctgcccatcttggcctcccaaagtactgggattacaggcatgagccaccatgcctggacagctttaatttattttcttagagaattactatgacaaaaagaaatcacatttcagtatatgcagatagtacatgtactatgtatacatttttagagatattatttgtaataaatgatttatattaattctaagaaatacttttggaaactttcccctttttgagttggatgtaggaatactttgaataagaaagaaaaacacatttctttcatatgtttttgtgtaaacattgaaccaattttgaaattgctgagatttctttggataaggagcgtctgagaaaaacttgtgtgatgtttttgactatgctgcttttaattttgccaacagtaacagtactttgttctatgattcaacatctattttatcaatgaataaaagcccttcatgtaaaatgtctgtaaacatctgcaagtactgggtaaacacccaatgtgacggacatttcatattattgctaaatatggcraatattcttgggacttaatgtcaaatgagaagccaaactgtgattaaattagtctttattatcatcactgttatgtaaaatttatttacataacacacaaaataaagaaatagctgtctgttgtttgttttcttcctctcagcttaaacaaaagtgtctgctactcattttatattcagtgtgtgaatttttctacctaaaaagcatccattagagtgccatatttaattttttgagaacagcactatacacctgagattagaattttgatcaggaatgcttttatggtgtcagacaaattattttcttccatatgatactcttctatattataccttccattcttggcatgtgaataagtgtatacccatggaacacttagccttttttctatatcttataggaagggtttgtcccagtgcctggaacaatttatgtacaggctttgcatgtacagaagttattcatttctctagcaggtgattatttaaataatatttttaacaaatgtaaactacccctatagtcaagaaatgagcaaaatggaaatcattatttcaaacttgttttactgaaagaaaataatggaattatataggaaggatagtctttcctcttgaatttttaaaattaatagactttaccttctcgggcagttttaactgcagaagaataagcagaaagtaccgagtccctgtataccccagtttactcctcacattttcccctaccaacatattgctttatttactgtggtgtatctgttagagttgatgaaaaaatatattattattagctaacattca

SEQ ID NO: 688884 - DNA, 1652 bp, Homo sapiens
ctcactctgttgccctggagtgctagagggacacagtcttggttcactgcaacttctgcctcccgggttcaggcgattctcctgcttcaccctcccgagtagctgggattacaggccaccaagcctgactaatttttgtagtcgttttttgtttttttggtttttgtttttttttttttttgcgttgaacacaaattcaggtttattttctcattatcaaatgctgtggcctgcatgcagtgacccaaagcactcaaaggctgacagggtttcactatgttggccaggttggtctcgagctcctaacctcaagtgatctgcccatcttggcctcccaaagtactgggattacaggcatgagccaccatgcctggacagctttaatttattttcttagagaattactatgacaaaaagaaatcacatttcagtatatgcagatagtacatgtactatgtatacatttttagagatattatttgtaataaatgatttatattaattctaagaaatacttttggaaactttcccctttttgagttggatgtaggaatactttgaataagaaagaaaaacacatttctttcatatgtttttgtgtaaacattgaaccaattttgaaattgctgagatttctttggataaggagcgtctgagaaaaacttgtgtgatgtttttgactatgctgcttttaattttgccaacagtaacagtactttgttctatgattcaacatctattttatcaatgaataaaagcccttcatgtaaaatgtctgtaaacatctgcaagtactgggtaaacacccaatgtgacggacatttcatattattgctaaatatggcaaatattcttgggacttaatgtcaaatgagaagccaaactgtgattaaattagtctttattatcatcactgttatgtaaaatttatttacataacacacaaaataaagaaatagctgtctgttgtttgttttcttcctctcagcttaaasaaaagtgtctgctactcattttatattcagtgtgtgaatttttctacctaaaaagcatccattagagtgccatatttaattttttgagaacagcactatacacctgagattagaattttgatcaggaatgcttttatggtgtcagacaaattattttcttccatatgatactcttctatattataccttccattcttggcatgtgaataagtgtatacccatggaacacttagccttttttctatatcttataggaagggtttgtcccagtgcctggaacaatttatgtacaggctttgcatgtacagaagttattcatttctctagcaggtgattatttaaataatatttttaacaaatgtaaactacccctatagtcaagaaatgagcaaaatggaaatcattatttcaaacttgttttactgaaagaaaataatggaattatataggaaggatagtctttcctcttgaatttttaaaattaatagactttaccttctcgggcagttttaactgcagaagaataagcagaaagtaccgagtccctgtataccccagtttactcctcacattttcccctaccaacatattgctttatttactgtggtgtatctgttagagttgatgaaaaaatatattattattagctaacattca

SEQ ID NO: 688885 - DNA, 1652 bp, Homo sapiens
ctcactctgttgccctggagtgctagagggacacagtcttggttcactgcaacttctgcctcccgggttcaggcgattctcctgcttcaccctcccgagtagctgggattacaggccaccaagcctgactaatttttgtagtcgttttttgtttttttggtttttgtttttttttttttttgcgttgaacacaaattcaggtttattttctcattatcaaatgctgtggcctgcatgcagtgacccaaagcactcaaaggctgacagggtttcactatgttggccaggttggtctcgagctcctaacctcaagtgatctgcccatcttggcctcccaaagtactgggattacaggcatgagccaccatgcctggacagctttaatttattttcttagagaattactatgacaaaaagaaatcacatttcagtatatgcagatagtacatgtactatgtatacatttttagagatattatttgtaataaatgatttatattaattctaagaaatacttttggaaactttcccctttttgagttggatgtaggaatactttgaataagaaagaaaaacacatttctttcatatgtttttgtgtaaacattgaaccaattttgaaattgctgagatttctttggataaggagcgtctgagaaaaacttgtgtgatgtttttgactatgctgcttttaattttgccaacagtaacagtactttgttctatgattcaacatctattttatcaatgaataaaagcccttcatgtaaaatgtctgtaaacatctgcaagtactgggtaaacacccaatgtgacggacatttcatattattgctaaatatggcaaatattcttgggacttaatgtcaaatgagaagccaaactgtgattaaattagtctttattatcatcactgttatgtaaaatttatttacataacacacaaaataaagaaatagctgtctgttgtttgttttcttcctctcagcttaaacaaaagtgtctgctactcattttatattcagtgtgtgaatttttstacctaaaaagcatccattagagtgccatatttaattttttgagaacagcactatacacctgagattagaattttgatcaggaatgcttttatggtgtcagacaaattattttcttccatatgatactcttctatattataccttccattcttggcatgtgaataagtgtatacccatggaacacttagccttttttctatatcttataggaagggtttgtcccagtgcctggaacaatttatgtacaggctttgcatgtacagaagttattcatttctctagcaggtgattatttaaataatatttttaacaaatgtaaactacccctatagtcaagaaatgagcaaaatggaaatcattatttcaaacttgttttactgaaagaaaataatggaattatataggaaggatagtctttcctcttgaatttttaaaattaatagactttaccttctcgggcagttttaactgcagaagaataagcagaaagtaccgagtccctgtataccccagtttactcctcacattttcccctaccaacatattgctttatttactgtggtgtatctgttagagttgatgaaaaaatatattattattagctaacattca

SEQ ID NO: 688886 - DNA, 1652 bp, Homo sapiens
ctcactctgttgccctggagtgctagagggacacagtcttggttcactgcaacttctgcctcccgggttcaggcgattctcctgcttcaccctcccgagtagctgggattacaggccaccaagcctgactaatttttgtagtcgttttttgtttttttggtttttgtttttttttttttttgcgttgaacacaaattcaggtttattttctcattatcaaatgctgtggcctgcatgcagtgacccaaagcactcaaaggctgacagggtttcactatgttggccaggttggtctcgagctcctaacctcaagtgatctgcccatcttggcctcccaaagtactgggattacaggcatgagccaccatgcctggacagctttaatttattttcttagagaattactatgacaaaaagaaatcacatttcagtatatgcagatagtacatgtactatgtatacatttttagagatattatttgtaataaatgatttatattaattctaagaaatacttttggaaactttcccctttttgagttggatgtaggaatactttgaataagaaagaaaaacacatttctttcatatgtttttgtgtaaacattgaaccaattttgaaattgctgagatttctttggataaggagcgtctgagaaaaacttgtgtgatgtttttgactatgctgcttttaattttgccaacagtaacagtactttgttctatgattcaacatctattttatcaatgaataaaagcccttcatgtaaaatgtctgtaaacatctgcaagtactgggtaaacacccaatgtgacggacatttcatattattgctaaatatggcaaatattcttgggacttaatgtcaaatgagaagccaaactgtgattaaattagtctttattatcatcactgttatgtaaaatttatttacataacacacaaaataaagaaatagctgtctgttgtttgttttcttcctctcagcttaaacaaaagtgtctgctactcattttatattcagtgtgtgaatttttctacctaaaaagcatccattagagtgccatatttaattttttgagaacagcactatacacctgagattagaattttgatcaggaatgcttttatggtgtcagacaaattattttcttccatatgatactcttctatattataccttccattcttggcatgtgaataagtgtatayccatggaacacttagccttttttctatatcttataggaagggtttgtcccagtgcctggaacaatttatgtacaggctttgcatgtacagaagttattcatttctctagcaggtgattatttaaataatatttttaacaaatgtaaactacccctatagtcaagaaatgagcaaaatggaaatcattatttcaaacttgttttactgaaagaaaataatggaattatataggaaggatagtctttcctcttgaatttttaaaattaatagactttaccttctcgggcagttttaactgcagaagaataagcagaaagtaccgagtccctgtataccccagtttactcctcacattttcccctaccaacatattgctttatttactgtggtgtatctgttagagttgatgaaaaaatatattattattagctaacattca

SEQ ID NO: 688887 - DNA, 1652 bp, Homo sapiens
ctcactctgttgccctggagtgctagagggacacagtcttggttcactgcaacttctgcctcccgggttcaggcgattctcctgcttcaccctcccgagtagctgggattacaggccaccaagcctgactaatttttgtagtcgttttttgtttttttggtttttgtttttttttttttttgcgttgaacacaaattcaggtttattttctcattatcaaatgctgtggcctgcatgcagtgacccaaagcactcaaaggctgacagggtttcactatgttggccaggttggtctcgagctcctaacctcaagtgatctgcccatcttggcctcccaaagtactgggattacaggcatgagccaccatgcctggacagctttaatttattttcttagagaattactatgacaaaaagaaatcacatttcagtatatgcagatagtacatgtactatgtatacatttttagagatattatttgtaataaatgatttatattaattctaagaaatacttttggaaactttcccctttttgagttggatgtaggaatactttgaataagaaagaaaaacacatttctttcatatgtttttgtgtaaacattgaaccaattttgaaattgctgagatttctttggataaggagcgtctgagaaaaacttgtgtgatgtttttgactatgctgcttttaattttgccaacagtaacagtactttgttctatgattcaacatctattttatcaatgaataaaagcccttcatgtaaaatgtctgtaaacatctgcaagtactgggtaaacacccaatgtgacggacatttcatattattgctaaatatggcaaatattcttgggacttaatgtcaaatgagaagccaaactgtgattaaattagtctttattatcatcactgttatgtaaaatttatttacataacacacaaaataaagaaatagctgtctgttgtttgttttcttcctctcagcttaaacaaaagtgtctgctactcattttatattcagtgtgtgaatttttctacctaaaaagcatccattagagtgccatatttaattttttgagaacagcactatacacctgagattagaattttgatcaggaatgcttttatggtgtcagacaaattattttcttccatatgatactcttctatattataccttccattcttggcatgtgaataagtgtatacccatggaacacttagccttttttctatatcttataggaagggtttgtcccagtgcctggaacaatttatgtacaggctttgcatgtacagaagttattcatttctctagcaggtgattatttaaataatatttttaacaaatgtaaactacccctatagtcaagaaatgagcaaaatggaaatcattatttcaaacttgttttactgaaagaaaataatggaattatataggaaggatagtctttcctcttgaatttttaaaattaatagactttaccttctcgggcagttttaactgcagaagaataagcagaaagtaccgagtccctgtataccccagtttactcctcacattttcccctaccaacatattgctttatttastgtggtgtatctgttagagttgatgaaaaaatatattattattagctaacattca

SEQ ID NO: 688888 - DNA, 685 bp, Homo sapiens
ggaaaaaaaactgttttagaaaataagtggatattcaacgatctaagtacatttatcaagaaatttgaaaataagcaagtttaacccaaagcaaatggcagagagaaaataataaaagaacaaaataactaaattaaaaacaaatgtacaagggccaagataattgaactgaactgtcttccaagttagtggcagatgttgctaggataactgtattcatgaaaaagaataaatttggatctctacttcacaccatgcacaacaattaattcaaagtgtatcayagacctaaatgtgagagctgacactacaaaactcttataggaaaacacaggagtaaatctttgtgatctttggttaggttattatttcttagatacaacactaacagcaccggtgataaaagaaaagactggtaagttggatttcatcaaagtgaaaaacttttatgctttaaaggacaccattaacaaagtgaaaagacaacccataaactaaaagaaaatatttgtaaatcttatatctaataggggacttgtatgcagaatacaaaaataactctgacaacataataatagaaagttgaatagacatttcttgaaagaagatatatggatagctaataaacacaggaaaagatcaccatcattatttagcagagaaatcaaaatcaaaatcttgataa

SEQ ID NO: 688889 - DNA, 608 bp, Homo sapiens
ttcctagggagcagaataggctgagaccattcattcacaaaaatgaggagtgatggacaagaagaagtaaatagagaaagaggaagagatctttttttttttcaagacagtctcactctgtcacccaggctggagtgcaatggcacgatctcagctcactgcaacctttgcctcccacgttcaagtaattcttctgcctcagcctcctgattagctgggactacaggcatgcaccaccatgcccggctaatttttttgtattttttttttaacaaagatagggtttcacaatgtcagtctggctggtctcaaactcctcacttcaaatgatctgcctgcctcggcctcccgaagtggggatcacaggtgtgagtcaccrcacctggcctaatatttgaacatcttactgagatagccactgttaagtgcttctgcttggctgattccacaaaataggctcttagaagctgtctaaccacatcatattatcaactcaatagattcagaaaatgtgtttaataaaatttgatagctatttatgacaaaaattatcagcaaactaggaatagaaaagagatattcccccaatttgataaagaccatctaca

SEQ ID NO: 688890 - DNA, 866 bp, Homo sapiens
gtatacatatgtaactaacctgcacattgtgcacatgtaccctaaaacttaaagtataataataataaattttaaaaaagatccaatatgtgaaaaacagctttattttcttataatgctttatagagattgagaaaatataataaattatgtatgtccttttgtaattataaatatcaccaaattatttggaaggacaaagagcattctacacaatttctcagttagtaatgttttttttttttggcaggtttttrtcaggcacccaattcctgctgctagtctcctaaagttacaacttcaaagtaccacaaaacaagatgatttttcatatgcttttatttctgtgtcaaacatgaaattagctcaggtgctgatttacaagtacaattttttgtcttgttttatttttgttagagaacatattgtctctttctccttgcaacaaaaccatgttgcaactgcatttgttttttaaatataacaagacaacacataaaatggcttttatccattgcctttttgcttgtcagaatggctgaaaaataaagacaggattctccattggcactgctgctcatttgtagacatggactgatgatgaaatcgtagttcactctgttctcctttcttctaattgcctcagaaaagctttgattgatgttacacaagggtgtgcacaataaactgaaactcattattccacagtaattgtccccatttccattgtgatctctgaattacatccactttcttcagttgtctttctaaataaaatgacatgccccacaccacgttattcattttttcacacaaaagcatcccagagcacctactctggggcaaaaacaataaataatattttg

SEQ ID NO: 688891 - DNA, 1316 bp, Homo sapiens
taaaaaactcaatttataaagaattcaatatataagcaattcaacccactgaaattattttatgatgaatggaaaagaaggtatgtgtttgttcaactgctttaaatgtttacttcttatatttgttttcccttagaaatatgtatattcttaaattttgaaggtagctatttcattttaatcatcctagaggatggaatgcagagatgttgatgaaaataacttacgtattattttgtaataaatatagaattcatatatgttgattactaagtgttttatgcacattctgatagaagcttcacaacaatcccttgtagatatattattaggcctattttgtggatgagaaaacttgtccaaggtcccactactagttagtaagtggaataatgagcattcgaacccagtttgactctgtgtctcacactattaaccattagctaatattgtcctaaccattcttttaatttctgggctatactaacaagtctccagttcaggttatattaacatatctcagaaacttttactgtaaaaattcagtggtggtttgttttgttgttttacagtttcctgaactcttatttgaagaagagacagagcagtgtgctgatttatgcctcaggcttctccgacactgtagcagtagcatcggtacaatacggtcacacgccagtgcctccctttacctactaatgaggcaaaactttgagattgggaatgtaagtattttatcatgaaaattctctgtattcataatgaaatataacttctgctgatagttattaaatcagtttttgggagagcatggagttttttgtatatttttagtctaatcrtaggctatcttgatatttctcattctgtgtatatcttacaaaaatccaaatctccaattgtgtgcatatcatgtgtacgtatgtatgtatgtatgtatattaatacagacttagaatataaatgtacattgagcagttttaaattttaattgtccctaagtaaaaagaaatacaagtttaagtatcttggcttgatattttacaattacatgtcacagcctttgaagaattccattttttcatttgtcttttattatatgttatattcatgtgttatatttttcctttttgagtcaaatatttagttcatttatttttgcttatgtaagtatttaaggccttgaattttcctttaagtgctatttttggcgtctccttggttctgatatttagtaatgttgtcatttcagtttgtgttttctttttaacccaaagagttgactagccttattttttttttttttttgagacgga

SEQ ID NO: 688892 - DNA, 640 bp, Homo sapiens
tgtgtcactccacaggacataaatggatctggcccttggtgagktttcatctttctcctaacacctagcacagcctcatttattcatgcttgccaagcagaaaggtggtgtagccctctgtgccttttagtgctagggatataaccacatggagataaattctgcttgacatcacttaaatttctcaaaggcaccaaaaatcaatatatcaaaaataaactcttgatcctcccctaaattctagctttctcccagtgttttctatcccagaatatgtgaccccccatctatcaccttgagagaaagccacaatcatatagatctcctttccttcaaaacccatacttcatcaccagatcctgttggctttgccccatatataattctaaaatagtctttccccaaacattttcagggtccagagcaagggaacacataccataagtagaaataatttaaaggtataaataaagtgaacaagttgttaggaaagatagttctatttttccaccttgacaaacccatcttcataatgacgaggaaagcagggttcaaataaaaattctccatctacttggagttctgtgcccttaattagtgactggggattgctggaccacatgtcatagatggcagatga

SEQ ID NO: 688893 - DNA, 666 bp, Homo sapiens
attagctgggcgtggtcgtgggcgcctgtagtcccatctactcgggaggctgaggcaggagaatggcgtgaacctgggagatggagcttgcagtgagccaagattatgccactgcactccagcctgggcaacagagcgagactccgtctcaaataaaaaaaaaaaaaatgagaaccactcagactgtattctctctctctttctctctcagagtaagagaagaatgatcatccgtggcaatggcagtttcagtgaggtagcaccaagagccggcctcacacgcaggagagaatgctacaccctcttttcatggtttctggtgctctacaggttcagagaaactctagaagtttatctgaaataatccctgaaagtatagtcttagcatagttttattgattccacaaagacagataamttatatttgatctggttgataattaagatgtaactaaaatgtaggtaggtcctaggtatatcaggatggttgttttaagattaatttaaatatatatcatttaaatgctattttaatgtgattaaaaataaactagctactgggccggacacagtggctcacacctgtaatcccagcactttgggaggccgaggtgggcggatcacaaggtcaggagtttgagaccagcctgaccaacatggtgaaac

SEQ ID NO: 688894 - DNA, 592 bp, Homo sapiens
aaaagtttacaagtttgttctatggattatttttgtatttatagtttatatagtccccatttccctaaagctgcttcctcccacccctgcctcatatttttagcattgtactaactggctttcatttttagtagtattctttgactcacctatgacgtaccccacaattaatatctttytattttcacttatctctcttctcttttcattttacacttgaatactttattttgccagaatgtataaaacttacatattgttcacccactcatatcctcaccccttttaagtcatatttcaagaaataaatatattaatgctaatcatcaattcccttactgaagtttcaccaggacattttatttagatgaaactcattatatgatagattattcataaacaatttgtgtatataatgttccttggttcttgcatattctttttctgtacacttgattcttgaagaaaattttttgcctagacctaaaatgcttggcttacccttttttgtgtttcctgaaattccactccattaactccttgctttgtgagttattcctgagaagtctacagccagtctaattttctcact

SEQ ID NO: 688895 - DNA, 319 bp, Homo sapiens
caatctctgtgtttacaagtttagaatttgttaggaaaggcagctaagtaaaaatgtgccttrccatacaatatgagaagtagaggtaacacataaaaaaaaaaaaagaaactcaatctacatgggaagccaagagagagagagcaagagcgagcgagcgagcgagagaactcacaagaaagcgagagagagcacgtgcaagcgcaagcacacgtgaatgatatttaaaatgagagctaaagaaaccatttaaaaagttagaactagcctggggagtgtcaaacagtggtccagaataagggaaacaacagtatcgata

SEQ ID NO: 688896 - DNA, 595 bp, Homo sapiens
tctttttaaaaacttttgatctggaggattctaagtctttcatgaaacaacaacgtaggagcctgagctctccaaagctgcctttacaaaattgaaaggttctctagtttctcaaaacacaggcattatcatttattaatctttttaacttcactttatgcattcaatgactcattccctttttcatataacatttcatatgattccctctttcaactatttattattctttatttgaaaggcactctgccagattcagaatgcactaagacaaaattctggccttggagatgtcaacactgttgtgaagtgaagttgacacaccagtagacagatgagtggtataaagaggagcgggcaaggaactgagagcactggacccagaaacaagaactgaggttagaaagccaatgcaagtgtggagcccagggaattggcaggtttcagagtcacttacactccaggaagtttggaagccaaatggcaaagtagagctagatttctggctcaaggtcttyagtccacaaccacgatgctcacaggcaccatccatcattaaagaaaaaaagccaaaggaggatgatatggttaggct

SEQ ID NO: 688897 - DNA, 1673 bp, Homo sapiens
tatagagataacctagacttctaatttcataaggagggatcagataccaagaaggcaatcattattcaaaaatcattgacatactttacaattatttctcaactgaacggctttgcgccaaggagaacatagctgacacgtgaaaattctggaggtacttgtggattacagaaacttccaatatatatttgtcaagttcttgcagaaagtttagtgtcagaattttctattcttttcatgtttattgtatcattcagggaaaaaaaggaaccaaatatattaatgtgctatactggttattgttataaaaatggcattagacaaaaacattaaatattcatgaaaatcctttttcccttacgttccagccagcaaaagatactgaaagaaataattcaccaaaggagagaactataacacagtacagataatcataggagttataaacaaaggaagttgacattaataattaaatgagaaaaattccctgtggtggttttgatgagctacaggcacaatgtgtaaaatcacttggccaaccgatcattagttatgctctagaccaaaggagtatatattaatgtaactggtttctctaccctatttttctagtccaataatttgtctaaggtaataaatatagctattacacattccctgtgaggaaaaattatccccattagaacctgatgtttttactatctgtatgggagtattcaatgtagataaatgtgaaaaggagagttgatcacatttcctaagtacttgtattgtgtattacatgaattctaacagaaactgtattattgctgtctagtgcatattaatctgacctttgcactaatggttatttatcatgttattaggagatttttgcattggtttgtatttgttggcttttctgtttgtttatttcctctgtttaagaaaattgttatctatctcaaacagggcactctttaatgaagaaacaccagagctgttaaacacattgagacacagaagattctagtgactgaggatggcttcctcttggaaactaatgctgtttctgtcagtcaccatgtgtctttcaggtaaaagtcctgattaattaattatttgattttctaagtatcaaaataaccaaaatatatcaaggtctccattacaaaatatcctcaggtrttaatttaaatttatatcagtatttatactttccaacaagagaaaggcagcaacccttaagccgctgttaacattgcaaaatgccatatacaatttaatataataaggtacactataaatgttaataaaatgagtatttacctccttgacattcatttgcaatctaaaccatctagctttcagaaggcttggaaatatatatatatatatatatatatatatatatatatatatatatatctcccacacatatatacatacatatgtgcatatatttatgcatataatgtatatgtatataaataattatgtattttatagcagctaattataaaagtgtctcatcacaatgctaaatttcaccatataaaacagaatcaggttagctttattatatataacacagtatctaaaggcatctctaacacaatgtattttttcagattgtctcaccttctctgactttgttgtaattaaacttatttttctatatcttgactctaaaa

SEQ ID NO: 688898 - DNA, 1119 bp, Homo sapiens
tttgtatccccagcatttatcatactcttggcagtcaaatgctggctgcactgaattcttatgatcatcttatagaagatcagacaggatgaagtggcctatgccagacataaaactatccagtaaaaagtaaaaggaaaatttctataacattatgaatatctgaaaatacttatctaacattgattgactgcttattctatgccagggttgtccaatctttggcttccccgggctacattggaagaattgtcttgggccacacataaaatacactcacactaaaaaaaaaaacaaaaaaacaacaaaaaaaaaatttcttgtaatgttttaagaaagtttaccaatttgtgttgggccacattcaaagctgtcgtgggccacatgtggtacgtgggtcatgggttggacaagcttgctctatgccaatgtcatttaatccttacaacattcctataacgtagttatcatcacctctaatttaaaaatgagaaaactgaggacagggaggttaagtttcttgttcagtgtgttgcagctagatagtggtagaaccaggattataaactaggcctatgtggtgcccaaattctcactttccaccactatgcagcctgcctgtcttgatcaatagcacagtcacaaagaacaccctcagctacatgaagaaccatcatttcacctgtttccaaatttaaactctaacaatggcaagcaatcattgtaaatatagctgtactagatcttcacagccaaaatacagtacacctaagggaaaaaaacacatgtacgttctccagtattccttttgttatcattatccagtgttaatgatgaaaacatggttacatctataaaattagcttagaaattaaccatgaaaataagagctcttacattaaacacaggttaatgtaaggttccaatattccacagttataggatgaactctacaaatctacacaggttgtgctatatttggtgggaaacycaaaatatttaaaacaattggcaaattaaaacaagcttccaaagctcggttaaaaaaaatttttttttaatgtgtaaaacatgaaactgtatagacaatattcttaatgtaaaattacatgaaatagc

SEQ ID NO: 688899 - DNA, 444 bp, Homo sapiens
ccctgtgggtagtgctcagctgcctcaaggcaacattcccagaacagaactgaactcttccccgggtccccgctccaccaacccagtcagttccacagtgtctgtgagtgataacgcaacatcacaccatcctccccaagcaccctgtcagaggcccggaagtcattccatgtgcctcgtccattaaggctgagctgtttaggctgctgtagcagaagggcatagactaggtggcttataaacaacagaaattaacttcccccagttccagaggctgtgaagcccaagatcaaggtgccagcagattcagtgtctggggagggccccctttctkgttcatagaaggggtgagggcccccttcccattgtgtcctcacatggcgggatggggggggaaagaactccccgggtttgttttataagggcactaatctcatttactct

SEQ ID NO: 688900 - DNA, 1093 bp, Homo sapiens
tccctggcacgttagtaaaaagaaaataatgtgacctagcacaagaaaggcatgaatgcaagtggaaacgaccagatagagcccctcttccaggttttggatgagagcgtcctgctgtcagttacagggagggctccccgcctggccttgcacctgtccagttcttcccgaggctctctgaggacgaccaggaactccagctgcaatatccatttctacacttgggccctggaaacactagtcaagcacaagagattctggcatctacttaacaaatttctttgcactcttcgggacagcagctatgcagagtgcagggctccagcagggaaggcgattcgtcatcatggccagcacaggaatccaacacaacaggctcttaaatttactgcccgtgcattccgaggcctgtgtgctctaacctccgaaattaagtgatcttattctgattttctcatctgctctaagagaaaaatacagttgttgtctagaaactaaatttataaaaggaaactatcacagatgttttaagtatcaaactaaattcatttatgggaaagactcccgtgtatacaaattctataaattctcaaggaactcgctcacttctgacttcatttttgctagatcttgaatcactgacttgcttgtctttattttctgtatctggcctgcccagtgtatttacttctaaacctcagctgcttctacaaaatactaggaaacagagaggcacgtyattttatgatctctgagcattagggatgaatggcaggttcattttatatcatcactgtccttttactcagatttttaactcaatatctaataatctctcaatgtgtggtaatttgtatggaattttttaagttttctaataaaatcatctttttctttccatacataatttcagaaggctatccacattctgaaatataattttgccttagaattacttttcttctcaaagaaacaatttttacatttcttgaggaaaatgcagatgacaaaagcattcagtacacagaaatgtgtctgactgttgctttgagtggggcaagatgaggatctaggcattcttgttcaaacaaat

SEQ ID NO: 688901 - DNA, 608 bp, Homo sapiens
tgatacaaaatgtaagtgcttacttgatgattcagtcataacagtgctctgtttagaacattaacaattccttttatatttctttcaggtgttatttatattccttttatgtgtttagaatgaatgtgctccaaccagagccaagtactaaaaccttatttttatccagtaaatttactaaattgatgacatttatttacaaaagattcttcatgtctaagaataacaacaataacaaaacacagttcctattcgtgtattatttgctcgccttttttctcttttaaaaagtacsagagtggccaggtgccatggctcatgtctgtaatcccagcactatgttaagtcaaggcaggagtaatcgtttgagcctatgggtttgagaccagcctaagcaacataatcagactctgtctctacaaaaaatttaataattaaccaggcatggtggtgcacaccggtggtcctagctacttaagaagttgaggtgggagaatcccctgagccttggagccaggaggtagagggtgcaatgagctgtgatcatgctattgcacttcagcctgggtaacagaatgagactctttctcaaaaaaaaaaaaaaaaaa

SEQ ID NO: 688902 - DNA, 1501 bp, Homo sapiens
tgccggttacccagaggcacagagtgacacagcacagtggaagggaaggcagtgagggcagatggcacctgagaccccagggagaggagtgatgccaaacacacccactccacccccgcctgctctgcccagtctcccctcatcggccccccaagcacctgctcccctcccacccaagctttctccaggaaagggtgggcaggtgcagtgggcctaattctccagatcacactgccccgcatagaggaggagaggaggatctcctacctgtcattgcagtttgaggcctgggatcacgggaaggtcagcatgtcccagcagaacacgtgcatggcagcagtagccccagtgcccagccaaaacggagacaaggcaaaggccattgtgctgttaggacttgggggttcccggggagaggatatactcctgtcaatcaatagggcccagaaatgtcatctgagcatcgttgtctaactctgcttcccagggaagaggtgtgagcagccagagtgggcgccacgggcccacctcagtccatcactggggagctgcccgcaaaccccacccatttctttaacagtccccaagggtccctgacactctttccagcctcagaagtccccagggacccaagtagccaattctcatcttccttgagctgtttctcctggaagaacatccacttccgcaaccactactgctggttgtggttattaactactactgcgttaaaaactcaaacccccaaatctgaaggtgtggcctcagggctcgttgcccttgaccctcacccgtcaacagtcgacccctctgccttcacagccttttcctcctctgacattcctgacctccccgtggcctgccttcccctgtctccttggccgagccatcctctgtcaccttcactgtttccactaggttattgaggccttttggtcatgagctcctgccaccaaatcagtgcctgaggctgctgcataacaatctccttccttgattagagcatcttaattatgctccaggaatttgcttaaacagattaatcattctggaggacagatttagaagctgtgctagctgagggatctgctctgagtgtccccggggagattctggtgacaaccgcctgttgggcctttgccaaggccttgggtgcctcggagactcggacactggctggaagctctacgcacccccgaaggcttctctttgctcctctgggcctgtagagcaggctctgaaactcttggatgtgaaacgtggcaggagtttgagagtaaggaggccctggtgtcccctttcccttccagcggactcgctgcactctaaggagtggatttgtgggcccctcctcaataaagtaaagccttagtccacttacttgtggcaactgggcaccacagatattggagcctcacctccaaccaacttaatcaggatttctggggttgagcatctctaattttgcaggagcaactgaagagcccaccagttsgttcta

SEQ ID NO: 688903 - DNA, 656 bp, Homo sapiens
tatgttcagacttccaaaaaactaaaaatgtttactactaaggccttcatggaaagaaataccaaaggatatattttagcaggaacaaaatttaacccagaaaaaaagaatgaagtgcaagaagcattgatgaraaaagaaacatatggagaaatttaggtaagcattgttggtggaaatgcaatgccctatcagcaataatacagatgagggagagtcaatttggtcttaagaagtcctgaggtacttgtctaattcagaggaaaaagagacattgacaaacttcacactgaaaattatgtcataaatgtaacagggtaaaatatgctaattgaaaacaatagtattttctagtctgttaaccaatcatttctgaatcctttgagatatttttaaaaaatatggatttccatccccctagatggttctcattaagtgtattttgagtaagcctctgcttctgttattttttactccacaacccacacccactaattttgctgagcagtcatagttgtgacaaactcggtcagtggggcacacatctgggttcttcctccttgggtctccaagatgcagggacaagctgtaagccagaacactctgtagaaaccagtgcgccataaggagaagctccctgggcaagtgtcctgagt

SEQ ID NO: 688904 - DNA, 656 bp, Homo sapiens
tatgttcagacttccaaaaaactaaaaatgtttactactaaggccttcatggaaagaaataccaaaggatatattttagcaggaacaaaatttaacccagaaaaaaagaatgaagtgcaagaagcattgatgaaaaaagaaacatatggagaaatttaggtaagcattgttggtggaaatgcaatgccctatcagcaataatacagatgagggagagtcaatttggtcttaagaagtcctgaggtacttgtctaattcagaggaaaaagagacattgamaaacttcacactgaaaattatgtcataaatgtaacagggtaaaatatgctaattgaaaacaatagtattttctagtctgttaaccaatcatttctgaatcctttgagatatttttaaaaaatatggatttccatccccctagatggttctcattaagtgtattttgagtaagcctctgcttctgttattttttactccacaacccacacccactaattttgctgagcagtcatagttgtgacaaactcggtcagtggggcacacatctgggttcttcctccttgggtctccaagatgcagggacaagctgtaagccagaacactctgtagaaaccagtgcgccataaggagaagctccctgggcaagtgtcctgagt

SEQ ID NO: 688905 - DNA, 629 bp, Homo sapiens
tagcattataaacattattaacaatatgataaagctacagctaccataaatacttataatcatttcaaataataaaattataatccaaaatgctgtaaaaatgagcataaakgtaccatatactgtgatggtagttgaggctctaatatagtatcaagtatatacataacacttaaaaatataattctcttctatcataaatttgactgaaaactaatatgacagctttgattaacattaaatatttaattagcaataattttctatgccttctaggagtgtagaagggctctgctggaataattgggatgacccatgttcttaaaagccctgtccaaggaagttcttctaatgccatcttttttccttcctgaattttggtgtagcaagcagagacattggaaataattctactcccttatattggcctcaaagtactgcagtagttactgaaatgttgttgaagattttaaggtaataaggctgcagtttgtcccactgcaaagcatttaagaaatagttacaattaaccctcacattctccgcttccccgctttcactgcttctaccttttcaaagtaataagtgtatttgctttgattcagacccacttaaagcaacagtgagag

SEQ ID NO: 688906 - DNA, 627 bp, Homo sapiens
aagtttgcttagaaaacagaatttatgaccaggcccagtgactcatgcctgtaatcccagcaccttgggaggccgaggcgggaggatcacctgaggtcaggaatttgagaccagcctggccaacatggtgaaacrttgtctctactaaaaatacaaaaaattaaccagacatggtggtgtgcacctgtggttcccgctactagagaggctgagaccggagaatagcgtgaacccaggaggcagaggttgcagtgggccaagatcatgccactgcactccagcctgggtgacaagagtgaaactctatctcaaaataaaagaaaataaacagaatttattatacacgtgttatttatttatttatttatattacatgtattaacgtgggcagtcttacccagaagggaaagtaatattcctaagtaactaaatacatgtttagtttttgtaaaaacttaaatatatgtgctatgcctatgtaaatatatgcatatcacatattttctttgttgtaattgtggattatattctgcttgttttttcatttcatgttatttccttagatatttccatgaattgacaaagtcggtagatgtgaattcgttgctgtttagtattctatcctct

SEQ ID NO: 688907 - DNA, 2143 bp, Homo sapiens
tgtctctactaaaaatgcaaaaaattagccaggtgtggtggcgcatacctgtaatctcagctagtcgggaggctgaggcaggagaattgcttgaacccaggaggtggaggctgcagtgagccaagatcgtgccactgctctccagcctaggcgacacagtgagactccatctaaaaaaacaaaacaaaacacaattttaaattccttaataatatcttgcctcttttccaacttagcagggataaactctccttttatttttaggttctacaaaataccatttaccactgttacctacccagccattcttgccaggcagttgaagatgttcacctctgtttctcaccttgcttcctcagaatattttgagaccatgacaactgaaatattttctgtttaccaggactctataaaactgagcgatcaaagagtccccagccatcccagtaaggaaactttgcacaggaatgtgggtattaccctgtaaaacacaacttataactttagggactttctcatttacatacatattccaataagtactacctgctgacttgttaaaacacttctggatttgcaatagtatgggtggcatgctctaatcagtgctgagcttcctgttctggcttaagccctccccaaactctataggaactggatctacccttcatggtacactccgcctgcccttgccaggcatgctgcccaacctgtcctgctgagagaggatacttcttgcagctgcagctaagatgcaagcacctgcccctagcaaaggaataagtttttgaacccgattttggggtgggtgcaagtttagcccatctgtgactttttgagcatcacgggcggcttctttaaaaaagactacgttgcaaggagtctgaccaaagttagttttaataaaacaactgttcgttatagacagcagctcagactgcgtttcccttttgctatcttgtctattgatcgaggtcccttgatcaaggtccctcagaatgcttttttttttttttttttttttccgatggaatttcgctcttgtctcccaggctggagtgcaatggcatgatctcggctcactgcaacctccgcctacaaggttcaagcaattctcctgcctccgcctcctgagtagttgggactacaggcatgcaccactatgccccagctaatttttttttgaatttttttttttttttagaaaagatggggggtttcaccattttggccaagctggtctcgaacccctgacctcaggtgatccgcccgcctcagcctcccaaagtgctgggattacaggtgtgagccaccgcgcctgactcagaatgcatttgtaacaagagacatatggcattcattgtctttagtagtttttttattgctggcatttcagaggttccagctatctactcagaaattagtcctcagaactgaaactcccaaagataagcaagagtcctttccgtcccctacccccgaatttgtttattctttccatgcactttcctaaatttctggcatcttgttgtctggtgtatcgttcaaatcagggctcgctagtgcgctctgattctttgagaaatgctgagggctgagactaggcagcggggaaaagtcccagtgtattttggggtgggaatctgaagcacttttacccccttatgtgacccagctcgtggcaatgtctgggggctctatggggctagtaagaaatttattattctgaatttgagaccttatctattctgtcctccccatgccgctaggagctgaagaaagtgatggcttaacattggagcagagaagtccttctgaatacaggatataacaaccccctttttcctcccatagatcttttgaaattgaaagcatttttaagaagcaacagagctaacattttagggcagtgattcttaaccttttttggtgtattccttgctattctgttataaatttgacctgacttcagggtctgtggattacctaggagtttatggaccttaggtggagaatcccagcagggaacacatacacactgagtggcagggtggacagaattggccacactatttttaaaatgggaccccacccccactgtgcrtgtgtgtgtgtttgtgtgtgtgtttccacacttaatact

SEQ ID NO: 688908 - DNA, 613 bp, Homo sapiens
cttgagtgcaagctgcagcatggaagggacttgagagagcatctcaggcccagcccccttgctgtataaatgaggaaactgaagctttgcgaggccaaggaaacagaacccattctctttttcctgactccccttacccatcacaccccacccctcaccttcccactcccagtgagagcctggatctgagttgactggtgatactgtcattctcttgtccattcctcatcaaggtttgttctgatggggccatgaaaggctgtgttgtcaatagcctgtgtgaccttcttcagcacttagggatgtgtcttacatctctgaataacctcgacaattctaattttggttatgccttgcatgaatttagtgaaactttatgggaagcttatttttattctcacccctaattgtgtcctaygggttaatgaggttcctcattttactacttattttgtagcagtagaactttacttatcttcaattaacttcttgtaaaatctaaggcaggaaccaccacaagcaacttgcgagtcttatttggctcaactgtctcagggcaagtgtcctctgttgaactcccacaactaatttgaactaattggtaacactaaca

SEQ ID NO: 688909 - DNA, 626 bp, Homo sapiens
ttatgactatttaaaaatactgaccaattactttctgaaagaatataccagtgcccattgcatcagtgggcaaatgtttgtcttactgcattttgacaggaaaggtagacaacttcaaataatgggaggaattattttgaagttaatactaagctctgccatttgctagtagaattactttaggcaagtttcttaatttctttgagcacgatttctctaagacggggaaaatgctgcctaccttacaggttcttttcaggtctaaacatatggtataaaacggccttattacgttgccctccataaagtcactatttaaacagtctgataggttgaggaaaaacagctcacttaaatcctattgtttttttctgcaagkgtatgaccatggtttcaccacatttatttgatagatttaaccacattttatttggtagagtcgaagttgggttttttaccattcgtaaaatcatattgcatcttaaaatcaagaaaatattgtttttcttgaaaagtggttattaattgtgctatcttccagtgctctagaatggaaacaatgtacattttcacttgtgtgcattatgtgcttatctcctttgttcatatatgtattgatatcttga

SEQ ID NO: 688910 - DNA, 714 bp, Homo sapiens
ttctcctgcctcagcctcccgagtagctgggactacaggcgcccgccacgacgcccggctaattttttgtatttttagtacagacggggtttcaccgtgttagccaggatggtctcaatctcctgacctcgtgatccacccgcctcggcctcccaaagtgctgggattactggcgtgagccacagcgccgggccagagaagccttcttgaagggacatatctcagcaaaatcttagaaagtgagcaggggaaagccaggcaaagaaaggtgaggggtattttccaggtaggaaaatagtatcaaatgcaattgatctatgtctctgatttggaaatgttattatcttcattattgctattttgtaatttttagacagtctgttagatttttgtaattctaatgatttttcttagacaatatgtttaccttttttttttctcttttattttgcctggtaaattttagaattattttgtttacttctcagaaaatttctgttgagatttaaaagtattggcattttgttaagtgtgaarattaacttaaaggaaaacaagacagtctttatcaattttagcctatacagttgagagttggtctctgtatttaatatttatctctctcaaaattttaaaatttttatctggcctaggttacagcagatcaattatggcaatttttttcacatgttaatttacgaatgtatataggta

SEQ ID NO: 688911 - DNA, 1318 bp, Homo sapiens
tgaagaacccctcatgaatctaaatgcataaagcatttgtttggatggtaaggaggtaaaagagatcactaatgggtatttccaatgttaacatcttctgacttcacaattttccaaacataatgttgcatgtattctgatgcaggcaaagagataattacggagtaactgcttgcactcagtgtaaattaatcaaatgtaaatttaataaactgtaaatagaagatactcctaagctgatacggcaagcgaatcacctccattatagactcatttttgcaaaattacatctaatcatagtattttaagatagtgtttggcaaaacatctctaaatctgtcaacaaaagcagctattacttctttgcggctgaatacctttgccaacaaacacccatctgtctggaaagatttatgtgtggttctgcctgaagccaggggtaaaaatctcaatgacctctggggatttctttcacctttgtgttcagagagtcaataaaaattcgytttaaagtaacctcaactgcacaatccggaaaaaaactacaaagctgagacgtaatcaagtttgtcccaagaatcccccaaatagaaattcttctagtaattatacaggtgattttgcttgatcaacaatttaatcttgcttgtcaattgctgctttaagagcctccaagctccttaatacagctcagaagaaagacccacaagtcccaattagcaccaccatacttaatcctctaccagactgattattttagttcttcaagcacagaccttggcccacacagttccttctgcatgggccactctttctccctccccacagctcattcgccccttgctgtggctgatgtgttctctaccttcaggccttggttcacactgggggatcaaggaaaccttctccctctccctctaccgtccatgaattagatggccccttttaggtgatagcacccttttcttactgcttatagtgaaagtacttttccgtgtaagcattattcccttcagcgttgaggacagaaactgggtcttcattattacagcaaaaagcagaggaggccaagttagaaagtgatttatatgcctgctaaaaagtttgggctttatcctgaaaggtatagaaagaagctattggagacatttgtcatgctcatatatacctcaccagaaagttcatatcagcaacatcagaaatggacctccagaggatgaggatagacggtgaggggtccacactagcagcactgagaccacttagggaatgattcctgtgagccaggtcagagaggatggaggcctgatctacaacc

SEQ ID NO: 688912 - DNA, 639 bp, Homo sapiens
tctttgaaatctaatttctccaggagccacaaccttttgggtctccatagctttacattaagagcaatgatgcaaatttatttggctcatgtacccaaacccacccattctctcaggaccaccagcctggaaaatgttgcctaactatttgggggattttttatggggtggggggagttgtactsattaatgttcacaaacatctggttggccatcaaataatctgccatttcttacttttcattggctttgctccctgctttcaggtacctgccactcctgccaggatttttttttttcttctacagagcagcttctttctcccagtgggcatctgtctccagctgcagctgggacactggagttctagcatgtgtgtagggtggaggggacaaagcttgcatgacattcttctggatgaagtgaaataacttagtctctcttctttaggggtatgaagggaccaggtcccaggatgctagtgaaacagcatttttggcatttacttaacagcttcctctctcctgaggccatgggcatagggggctttgctagaagacaaatccaagtatcagaaaacacactgtggccatggtcttgtcataaaatctagctgctgggctctgttttctttgatgt

SEQ ID NO: 688913 - DNA, 639 bp, Homo sapiens
tctttgaaatctaatttctccaggagccacaaccttttgggtctccatagctttacattaagagcaatgatgcaaatttatttggctcatgtacccaaacccacccattctctcaggaccaccagcctggaaaatgttgcctaactatttgggggattttttatggggtggggggagttgtactcattaatgttcacaaacatstggttggccatcaaataatctgccatttcttacttttcattggctttgctccctgctttcaggtacctgccactcctgccaggatttttttttttcttctacagagcagcttctttctcccagtgggcatctgtctccagctgcagctgggacactggagttctagcatgtgtgtagggtggaggggacaaagcttgcatgacattcttctggatgaagtgaaataacttagtctctcttctttaggggtatgaagggaccaggtcccaggatgctagtgaaacagcatttttggcatttacttaacagcttcctctctcctgaggccatgggcatagggggctttgctagaagacaaatccaagtatcagaaaacacactgtggccatggtcttgtcataaaatctagctgctgggctctgttttctttgatgt

SEQ ID NO: 688914 - DNA, 1265 bp, Homo sapiens
caaaatgaaggacttattataatttacaaatccggggaaaagcaaaattgtttaaatagtgaagaggacatgtatctcagaacatatttaaatctatctacaaaaaaggataatgaatttraatgttatgtgtcagaattcatttttaaattgtaagctgtatttcaagtatcatacatataatttgtggttattacttattttgtaagcttaccatttatttttagaatgctaaacatgtagtgttttgttacatacaaaagaatgttactcaataggactttgtgaaattcaatgtgagtttctatgctagctaaactctacctattatttttttctatcatggactgctgtccttaaaagttgtgtaatttttttatcatgactattatgccctgccttaatgtaattagtaatattgctgttagttttcaatttggcagtttatagggtacataatataagttataaaatttcaaaacttcaaataatgaccaaagcggagaaagcttttatttcaaaaaatgatgctattctagaacacttgctactcaggtataattttgaattactgcttaattctattacaataataaatgtaatttatctatgataattcatgaaaggaactagttaagcttgcattctttatttctactaataatacctgatatacagaaaattttcgggtactctaaaaatcactcatcatttgtaggagtagaaacccagagttcaaaattttaggtacttcattgacttgaaagttcaaaaggatgtccaagtaatagcctcttaaattttcctgaggcacatcagaaatttagcccttaattattttctattcaactactttgcaaaaagttgtttcaaagtgaaagttgttaatttcttctaatacagttctaaccaaattattatatgctatataagagaaatgtcacaaaatgcccagcttaatgaagatactcatatttctaaaagtgatcaatttaatcaattttatcttgtttaaatcatatgaatgtataggcaggagagagatagataactagagttatctaattctggttagctaataataatcatgtaaccaaatagtcaagaattctaaatgtattaattttatcattatgtaaatacattttctggttgtcacaatcattaaaagaataaatttttcttctttgaatgcaagataaagacttgcataaaaaaaatgtattgcatttttttccctgcccctcttctacttatgatgtttt

SEQ ID NO: 688915 - DNA, 1158 bp, Homo sapiens
tccactagaaacaggatgtccttcaacacttagcttagtacgtcatgtttctccagggtataaaacccaaggtggtctgcacttcgtggtcctttatctgcagggcaagtggggcatgtacagttgagactccattcatcccgggcagctttctgaaccttggaggaccagctcacaatgaattttaggttttggttgctgcccacgtgcaagtaataaatccacttcatggaatttgttgcgttatgtgggtgttctttcttagcagactcaggcaagttggtaaccagtgcacaccaaacctgcttcatgctaatctcttcagtgagctttctgtgtgactgaatactctgaccgtttaatcctgcagaggcaatagcaaaaggctgtccagccatacaattggctttctctacaagacaayaggatacactgctttcctgacattgaattccccaattttaaaatattttatcatcctaataggctgagaatttccaaaaccataaagtcctcgttttctgcctcatagttattttctcaatttatctttcctctcacattttactatagacagtaagaacacttgaacatctatatttctacaaaaagcctgtgtatgatgatttatagtctctaagacaatacagattttctctatcatgttctttccttccttctgagtcatcactagcagagttcttagaatctccagttctactcacagtctgttcaaagcaatttaggctttctctctcatgctcgtgaatatctcttgaatattcttctagccaatatgtataatccaattgtgattccagatattgattggttggagcagtagtacatgtgagtattagaaacctttgcttcttcagtgcctctgatgtcatttattaaagttgcaaataaataaacagtatgggaaagtgtttccaaataaggagttaataattggctcaaatgtttcaattcattaaattgggcatctgatcagaaataataacccaatcatgtgtttccttgtttgcagaccttcagccaagctctacggatgaaatgaaaaatgggaattctatttcaaagtttcagagacatccatgatgagggaattattaaaagaaactctagactcctaatcctatgaaaaaacagaaa

SEQ ID NO: 688916 - DNA, 1158 bp, Homo sapiens
tccactagaaacaggatgtccttcaacacttagcttagtacgtcatgtttctccagggtataaaacccaaggtggtctgcacttcgtggtcctttatctgcagggcaagtggggcatgtacagttgagactccattcatcccgggcagctttctgaaccttggaggaccagctcacaatgaattttaggttttggttgctgcccacgtgcaagtaataaatccacttcatggaatttgttgcgttatgtgggtgttctttcttagcagactcaggcaagttggtaaccagtgcacaccaaacctgcttcatgctaatctcttcagtgagctttctgtgtgactgaatactctgaccgtttaatcctgcagaggcaatagcaaaaggctgtccagccatacaattggctttctctacaagacaataggatacactgctttcctgacattgaattccccaattttaaaatattttatcatcctaataggctgagaatttccaaaaccataaagtcctcgttttctgcctcatagttattttctcaatttatctttcctctcacatttkactatagacagtaagaacacttgaacatctatatttctacaaaaagcctgtgtatgatgatttatagtctctaagacaatacagattttctctatcatgttctttccttccttctgagtcatcactagcagagttcttagaatctccagttctactcacagtctgttcaaagcaatttaggctttctctctcatgctcgtgaatatctcttgaatattcttctagccaatatgtataatccaattgtgattccagatattgattggttggagcagtagtacatgtgagtattagaaacctttgcttcttcagtgcctctgatgtcatttattaaagttgcaaataaataaacagtatgggaaagtgtttccaaataaggagttaataattggctcaaatgtttcaattcattaaattgggcatctgatcagaaataataacccaatcatgtgtttccttgtttgcagaccttcagccaagctctacggatgaaatgaaaaatgggaattctatttcaaagtttcagagacatccatgatgagggaattattaaaagaaactctagactcctaatcctatgaaaaaacagaaa

SEQ ID NO: 688917 - DNA, 1841 bp, Homo sapiens
acaagaaagttggctattaatacatcagtttctatcacttattggttgaaggatgctgagctatggatatttattttttagatcttcacacttggcatgtaagtgggcaagagtaggttctgaccaaaataggctgcaggcaaaaatatgagatgctaacatttggaaattagagagcctgtgcatggaagagacacctgaagaaacactctactccgtttctgttattttttcaattgatgaacttttgttttcttggctccccatgcagaggcatgctgaaaccacctcatacttgttcattacaagtgttaaatattcagaaatgttgtgagccagttttaaaattggccctgaaattagccatgatcggcgtctttacaccatagaaataggcgaatgctaccaatcagagccttttcttcagaaaccaatttatcagtacacattactgtccctatcccatctctttccataaatggaaaataggggttacaatcataggtttgagaatcatatagacctatttgaatttgatctctgataccttctagctgtgtagccttgggcaagttacttaacttctctcagatttaatatcctcatttataaaacggggatgttagtatgtaacttgcatggctgttgtgaagattaaatacagtaacatattatatgtatagaacattatagaatatggaatgtattataggaattagaccttacacacaattgtagcaggaactgaagaaaacattcataagggagaattggaaatcagagaaaagtcacggatcagcttcctgaggaactggcaagaatggccaagttggagcttgtaggaaaatctggtaatccaggcgtgtccaattgccaaactgtgatagtgaaatgggctggagaagctttttcttgtgtgtgaatgatatctctaggatcaataaccaagcatctagatgagaagagagtgaggataaactgcaatatgctggtatgtctgtatctaccyatcacggcatttgacttcagagaggctgggccactgcttcacttctgccagagtgtggagccaagggccacagagaatactggattaggaaaccacccgagagggcaaatcagatcctatttaatatgtgaagtatgtgcccagcgggatttcagaactgctgtaagacagtgattaccctctgcctcctattctttcgtgagagtgtctgcagaaattatcctggcctgcatgactattgtatgttgtgtgcgacatctgataacttgtgtttttagtttaggggtctctggaccaagaacataactgaacagtcttgtctgcctatagacaagacacagaccacgatattctggacttcaagcctaattctataatgagataagattttggaaggtcctcatatgggaatgaggatattttgtggatgagaggaatatgaattttgatcagagactggactatgatagattgcaaaattggtttcagaatcctttcttcctagtatgcttaccactttgcaatgatgtgacaactgccttctgtcatcaagaggtgagctttttttttttttttctctatatccttgagtctggctgcttttgctacttgctttgaccactagacagcagaagtgatatttatgacaaatcatctgagatctcaagaggtgctgtagcttttgccttcactgtcttcaaagctggtattactttatgaggaagacaagtcttatctctttgataataaaagcctacatagaaagacccagccatctcaatcttcctggctgagctgagctctgagccaatgcacaggttggatgcagttg

SEQ ID NO: 688918 - DNA, 638 bp, Homo sapiens
tcaagctctggccccagatttgcaaaccctactcagcaatgcatttttcttgcaggtaacagtgtcctccctccctagaaggcagtttggaccatctgttttaatttaaatgtaccccttggaaaggttttactgccattccaatgagcttctcaatatgtactttccaatcacatttagtaactctaaaggaatttggtaagtacagttttctgtatctgaaggtggccacatgtgaatgttacaacatgtgcattgagaagcaagagagctgagagtaagtgcctcctgttcacctagaaaatgattcaccaaagccctaaggaggcagaaccctgggcaaagataatccccatatcagagtaaatcaacagatgatgcaartgaggcacccatttatagcatttatttaaattttcatttaaattgctggttaaatggaattcatttaaagtcctgtagtcaacacttgagcaaattggttttaaaactatatattaattgtaacacattgcaatttaatacatacttctaagataatcgcttattgctttaggagtacaaaaatgtatccaaatagtttagtgtggttgataagacacagaaagcaatatgttcttccttgccttttttggaaa

SEQ ID NO: 688919 - DNA, 645 bp, Homo sapiens
gatgctttcatattgcctactgaaagtagtctaacatcccttagctttattgatagcactgcagaacttaggcacctgctccctgattccccttttttctcctccctatacccaatgattccccctcctcagagctgctcactgttgctgggactcactgctctactttcatttttgcctttccctctgttgcctgaaccacccttccctcaacttctgcatgctccaggctttcccacagcccacacccacaagctggctcctctagcagcctattttcatcctttccagctggccatcctctcttcatcccccacatgctcacatgtttatcccatgttgaaaacacagagcagcaagactagagctgtgcrtacacagatgtctcctttcaaccacataataagcgaactatttgttgagcttccattatatgccaggcattatggacacaagaatgagtaacacacaattcctgccttcaaggagcttacactctagtgagagcaatagacaagcaagtggatgacggaatacagtcatctaagtatatgctcaccttaaatagtctataaactcctgaagaaaagagccatatccttatatcccttttactcacatatgttttaataaagaaatattgtc

SEQ ID NO: 688920 - DNA, 2640 bp, Homo sapiens
gggtttcagcaaaagctataaaaagacaaaaaatcccattgaggacattaagcctaaactattgctcagtataaaaatattttttgtgatattccagaagattaagcatagaatttctctcgaagttttccaatgcctagagaactaatgacctcatgatgcatccagttccatagttggctaggactaattgctaaagaagaccaaagtgttaattcattttgattatgtaacctcctggtttattctttgggcttccattctttttaggtaagttctttctttgtctaggcctccaaaagttgctattcttcagtaacctagtgaggttctactcttatcactttactttctccctgtgtgagctcaggttcccactgcaatccacatgctcataatctcaaataaatgcaaccagttaagtggcctgtcctgagtttacattcgtctttccatttgtccactgcccatttccatgatcatgtgctatgggcacttcaatctcagtgtactaagcttaattcctctgctgctcctgaaaaacctctcctccttccgtgtttcctgtctcagtgaatggcttatagttctgtctcctaaatagttcataaattaaagcaatttaccctcacactagtggtgatattttaatataggtcagaactgtctcttggctagattattacaaattcttcaaaaacgttctccatttttccaatcttgcttttccaatctattgtctaggtagcaggcacaacgatatttctgacttgtgtttgattatgtcacttctctgcttgaaaaatcccttcagagcttcttagaataagagcctaaatctttaacaggatttatactccacaatcttcctcgtgtttacattgaggctcaacttttaaactgcttgcttatattctgtagtctgtctttggacttcttttgatttctcaaatattcaaatatattccttttttatgtcttcctagaatactttccctaccttgtcttaacttcatcattttacctcctatctatcttttacatcttggcttagatatgttctggaaagacttaactgactaccaaaaacaaaataaaacaaaacaaaagcctgaattactagtgtcctcacatgcccttgtagtttccatattataacaattgtataagtgtttttttaatcaaatgggatcatatatgtcataaaacaattaaatttctttcatttgacaatatatcacagacatattttcatgtcagtgtaaatacaatgtcatttttctaagtctcygtagctttccattttagtgatataacaacatttatttaacctttaccctattggttgatgttcagtaatcaatacttccaaattataggtttcaatcagtggaaaaataaatatacaaaaattttcttaccatgagatatatgtaggtatgtctttactaacattatgaattctcaaaatgatatataaatcttgaattcaacgtatcttctcatttctgggttttagccatctgtagtttcctaaactttttcatgaatctgcaattaacatcacttaatccaaacctagtgattttccactgtcctaccccgaatctctgagaaaaagttaaacaagctccaggtatggggttaatctgtgtgatgtagagtgatgacagtatacccagaaagttacctttggaaggcaaatagaatgtctttctctatctctacctaactccctgttcttctatataaggagcttataatctacctgggatggctataaattatatacttaaaatgataattcattctatagaaaatcaaatatgtgataaagaacgcaaaggcttaatgaaagaaagactgtattttaagccaaaatatttaggaaagttcccatagtataacagtttaaagaaagattgtgtctagcacaaaaaggaaagctttatttgggcttcagtaactgtcttcaaacacctgaaatgttctcagagtttgttagcttcaagcaatcagtttttctctgctgttacctgtttgcttaatctcagtgaaacttctaagaaatacatcaccaaatgataatgtcttagtctgtttgagctgctataacaaaatagactgtgaagcttataaaaataggaagttatctcctacagttctgtaagctgggaagtctgagatcaaatcaaggcactggcagatttggtgtctggtgagcacccatttcccagttcataaatggtgcctccttgccatatccttctgcagtggaaggggaaaaaggagctatctttgacttcttttataagggtactaatcccattcatgaggactccacccgcatgacctaatcatctcccaaaggtcccacctcctaataccatcgcttcagggattaggatgttaacatgtgaactgggttggcaagaagggtaggggggtgccacacattctgaccatggatgaattgtgtgtttgccaaatggtgattacagatcattacaatgcattaggttttagtatacttaatttatatattttctttgcaaaagtgctactttaatgtgtactagaactgtgtataaattaacatctaatgaaattgttccattacagtctatttgaatacataca

SEQ ID NO: 688921 - DNA, 2640 bp, Homo sapiens
gggtttcagcaaaagctataaaaagacaaaaaatcccattgaggacattaagcctaaactattgctcagtataaaaatattttttgtgatattccagaagattaagcatagaatttctctcgaagttttccaatgcctagagaactaatgacctcatgatgcatccagttccatagttggctaggactaattgctaaagaagaccaaagtgttaattcattttgattatgtaacctcctggtttattctttgggcttccattctttttaggtaagttctttctttgtctaggcctccaaaagttgctattcttcagtaacctagtgaggttctactcttatcactttactttctccctgtgtgagctcaggttcccactgcaatccacatgctcataatctcaaataaatgcaaccagttaagtggcctgtcctgagtttacattcgtctttccatttgtccactgcccatttccatgatcatgtgctatgggcacttcaatctcagtgtactaagcttaattcctctgctgctcctgaaaaacctctcctccttccgtgtttcctgtctcagtgaatggcttatagttctgtctcctaaatagttcataaattaaagcaatttaccctcacactagtggtgatattttaatataggtcagaactgtctcttggctagattattacaaattcttcaaaaacgttctccatttttccaatcttgcttttccaatctattgtctaggtagcaggcacaacgatatttctgacttgtgtttgattatgtcacttctctgcttgaaaaatcccttcagagcttcttagaataagagcctaaatctttaacaggatttatactccacaatcttcctcgtgtttacattgaggctcaacttttaaactgcttgcttatattctgtagtctgtctttggacttcttttgatttctcaaatattcaaatatattccttttttatgtcttcctagaatactttccctaccttgtcttaacttcatcattttacctcctatctatcttttacatcttggcttagatatgttctggaaagacttaactgactaccaaaaacaaaataaaacaaaacaaaagcctgaattactagtgtcctcacatgcccttgtagtttccatattataacaattgtataagtgtttttttaatcaaatgggatcatatatgtcataaaacaattaaatttctttcatttgacaatatatcacagacatattttcatgtcagtgtaaatacaatgtcatttttctaagtctccgtagctttccattttagtgatataacaacatttatttaacctttaccctattggttgatgttcagtaatcaatacttccaaattataggtttcaatcagtggaaaaataaatatacaaaaattttcttaccatgagatatatgtaggtatgtctttactaacattatgaattctcaaaatgatatataaatcttgaattcaacgtatcttctcatttctgggttttagccatctgtagtttcctaaactttttcatgaatctgcaattaacatcacttaatccaaacctagtgattttccactgtcctaccccgaatctctgagaaaaagttaaacaagctccaggtatggggttaatctgtgtgatgtagagtgatgacagtatacccagaaagttacctttggaaggcaaatagaatgtctttctctatctctacctaactccctgttcttctatataaggagcttataatctacctgggatggctataaattatatacttaaaatgataattcattctatagaaaatcaaatatgtgataaagaacgcaaaggcttaatgaaagaaagactgtattttaagccaaaatatttaggaaagttcccatagtataacagtttaaagaaagattgtgtctagcacaaaaaggaaagctttatttgggcttcagtaactgtcttcaaacacctgaaatgttctcagagtttgttagcttcaagcaatcagtttttctctgctgttacctgtttgcttaatctcagtgaaacttctaagaaatacatcaccaaatgataatgtcttagtctgtttgagctgctataacaaaatagactgtgaagcttataaaaataggaagttatctcctacagttctgtaagctgggaagtctgagatcaaatcaaggcactggcagatttggtgtctggtgagcacccatttcccagttcataaatggtgcctccttgccatatccttctgcagtggaaggggaaaaargagctatctttgacttcttttataagggtactaatcccattcatgaggactccacccgcatgacctaatcatctcccaaaggtcccacctcctaataccatcgcttcagggattaggatgttaacatgtgaactgggttggcaagaagggtaggggggtgccacacattctgaccatggatgaattgtgtgtttgccaaatggtgattacagatcattacaatgcattaggttttagtatacttaatttatatattttctttgcaaaagtgctactttaatgtgtactagaactgtgtataaattaacatctaatgaaattgttccattacagtctatttgaatacataca

SEQ ID NO: 688922 - DNA, 2640 bp, Homo sapiens
gggtttcagcaaaagctataaaaagacaaaaaatcccattgaggacattaagcctaaactattgctcagtataaaaatattttttgtgatattccagaagattaagcatagaatttctctcgaagttttccaatgcctagagaactaatgacctcatgatgcatccagttccatagttggctaggactaattgctaaagaagaccaaagtgttaattcattttgattatgtaacctcctggtttattctttgggcttccattctttttaggtaagttctttctttgtctaggcctccaaaagttgctattcttcagtaacctagtgaggttctactcttatcactttactttctccctgtgtgagctcaggttcccactgcaatccacatgctcataatctcaaataaatgcaaccagttaagtggcctgtcctgagtttacattcgtctttccatttgtccactgcccatttccatgatcatgtgctatgggcacttcaatctcagtgtactaagcttaattcctctgctgctcctgaaaaacctctcctccttccgtgtttcctgtctcagtgaatggcttatagttctgtctcctaaatagttcataaattaaagcaatttaccctcacactagtggtgatattttaatataggtcagaactgtctcttggctagattattacaaattcttcaaaaacgttctccatttttccaatcttgcttttccaatctattgtctaggtagcaggcacaacgatatttctgacttgtgtttgattatgtcacttctctgcttgaaaaatcccttcagagcttcttagaataagagcctaaatctttaacaggatttatactccacaatcttcctcgtgtttacattgaggctcaacttttaaactgcttgcttatattctgtagtctgtctttggacttcttttgatttctcaaatattcaaatatattccttttttatgtcttcctagaatactttccctaccttgtcttaacttcatcattttacctcctatctatcttttacatcttggcttagatatgttctggaaagacttaactgactaccaaaaacaaaataaaacaaaacaaaagcctgaattactagtgtcctcacatgcccttgtagtttccatattataacaattgtataagtgtttttttaatcaaatgggatcatatatgtcataaaacaattaaatttctttcatttgacaatatatcacagacatattttcatgtcagtgtaaatacaatgtcatttttctaagtctccgtagctttccattttagtgatataacaacatttatttaacctttaccctattggttgatgttcagtaatcaatacttccaaattataggtttcaatcagtggaaaaataaatatacaaaaattttcttaccatgagatatatgtaggtatgtctttactaacattatgaattctcaaaatgatatataaatcttgaattcaacgtatcttctcatttctgggttttagccatctgtagtttcctaaactttttcatgaatctgcaattaacatcacttaatccaaacctagtgattttccactgtcctaccccgaatctctgagaaaaagttaaacaagctccaggtatggggttaatctgtgtgatgtagagtgatgacagtatacccagaaagttacctttggaaggcaaatagaatgtctttctctatctctacctaactccctgttcttctatataaggagcttataatctacctgggatggctataaattatatacttaaaatgataattcattctatagaaaatcaaatatgtgataaagaacgcaaaggcttaatgaaagaaagactgtattttaagccaaaatatttaggaaagttcccatagtataacagtttaaagaaagattgtgtctagcacaaaaaggaaagctttatttgggcttcagtaactgtcttcaaacacctgaaatgttctcagagtttgttagcttcaagcaatcagtttttctctgctgttacctgtttgcttaatctcagtgaaacttctaagaaatacatcaccaaatgataatgtcttagtctgtttgagctgctataacaaaatagactgtgaagcttataaaaataggaagttatctcctacagttctgtaagctgggaagtctgagatcaaatcaaggcactggcagatttggtgtctggtgagcacccatttcccagttcataaatggtgcctccttgccatatccttctgcagtggaaggggaaaaaggagctatctttgacttcttttataagggtactaatcccattcatgaggactccacccgcatgacctaatcatctcccaaaggtcccacctcctaataccatcgcttcagggattaggatkttaacatgtgaactgggttggcaagaagggtaggggggtgccacacattctgaccatggatgaattgtgtgtttgccaaatggtgattacagatcattacaatgcattaggttttagtatacttaatttatatattttctttgcaaaagtgctactttaatgtgtactagaactgtgtataaattaacatctaatgaaattgttccattacagtctatttgaatacataca

SEQ ID NO: 688923 - DNA, 2640 bp, Homo sapiens
gggtttcagcaaaagctataaaaagacaaaaaatcccattgaggacattaagcctaaactattgctcagtataaaaatattttttgtgatattccagaagattaagcatagaatttctctcgaagttttccaatgcctagagaactaatgacctcatgatgcatccagttccatagttggctaggactaattgctaaagaagaccaaagtgttaattcattttgattatgtaacctcctggtttattctttgggcttccattctttttaggtaagttctttctttgtctaggcctccaaaagttgctattcttcagtaacctagtgaggttctactcttatcactttactttctccctgtgtgagctcaggttcccactgcaatccacatgctcataatctcaaataaatgcaaccagttaagtggcctgtcctgagtttacattcgtctttccatttgtccactgcccatttccatgatcatgtgctatgggcacttcaatctcagtgtactaagcttaattcctctgctgctcctgaaaaacctctcctccttccgtgtttcctgtctcagtgaatggcttatagttctgtctcctaaatagttcataaattaaagcaatttaccctcacactagtggtgatattttaatataggtcagaactgtctcttggctagattattacaaattcttcaaaaacgttctccatttttccaatcttgcttttccaatctattgtctaggtagcaggcacaacgatatttctgacttgtgtttgattatgtcacttctctgcttgaaaaatcccttcagagcttcttagaataagagcctaaatctttaacaggatttatactccacaatcttcctcgtgtttacattgaggctcaacttttaaactgcttgcttatattctgtagtctgtctttggacttcttttgatttctcaaatattcaaatatattccttttttatgtcttcctagaatactttccctaccttgtcttaacttcatcattttacctcctatctatcttttacatcttggcttagatatgttctggaaagacttaactgactaccaaaaacaaaataaaacaaaacaaaagcctgaattactagtgtcctcacatgcccttgtagtttccatattataacaattgtataagtgtttttttaatcaaatgggatcatatatgtcataaaacaattaaatttctttcatttgacaatatatcacagacatattttcatgtcagtgtaaatacaatgtcatttttctaagtctccgtagctttccattttagtgatataacaacatttatttaacctttaccctattggttgatgttcagtaatcaatacttccaaattataggtttcaatcagtggaaaaataaatatacaaaaattttcttaccatgagatatatgtaggtatgtctttactaacattatgaattctcaaaatgatatataaatcttgaattcaacgtatcttctcatttctgggttttagccatctgtagtttcctaaactttttcatgaatctgcaattaacatcacttaatccaaacctagtgattttccactgtcctaccccgaatctctgagaaaaagttaaacaagctccaggtatggggttaatctgtgtgatgtagagtgatgacagtatacccagaaagttacctttggaaggcaaatagaatgtctttctctatctctacctaactccctgttcttctatataaggagcttataatctacctgggatggctataaattatatacttaaaatgataattcattctatagaaaatcaaatatgtgataaagaacgcaaaggcttaatgaaagaaagactgtattttaagccaaaatatttaggaaagttcccatagtataacagtttaaagaaagattgtgtctagcacaaaaaggaaagctttatttgggcttcagtaactgtcttcaaacacctgaaatgttctcagagtttgttagcttcaagcaatcagtttttctctgctgttacctgtttgcttaatctcagtgaaacttctaagaaatacatcaccaaatgataatgtcttagtctgtttgagctgctataacaaaatagactgtgaagcttataaaaataggaagttatctcctacagttctgtaagctgggaagtctgagatcaaatcaaggcactggcagatttggtgtctggtgagcacccatttcccagttcataaatggtgcctccttgccatatccttctgcagtggaaggggaaaaaggagctatctttgacttcttttataagggtactaatcccattcatgaggactccacccgcatgacctaatcatctcccaaaggtcccacctcctaataccatcgcttcagggattaggatgttaacatgtgaactgggttggcaagaagggtaggggggtgccacacattctgaccatggatgaattgtgtgtttgccaaatggtgattacagatcattacaatgcattaggttttagtatacttaatttatatattttctttgcaaaagtgctactttaatgtgtactagaactgtgtataaattaacatctaatgaaattgttccattacagyctatttgaatacataca

SEQ ID NO: 688924 - DNA, 1046 bp, Homo sapiens
tcattatgctgacccacagcactggtgatctaaagatgaaagtatcatacataaaaatttaaagcccccccacctcattgaaacgtctgagctgcaggtttctgaggcatgttaacatagctccttcaaagtgaataacaaattgatttgtcctgagcccagtatcaataagaaagtgttacaagacaagtctctgtattttgagtcaacatgtaccgaatttgcatgtattgctctagttcattcatataatgaccattaatagtctcagcataaagagatacctagagcaagaaagtgttctccagcttttctgggatgcagtgctaacagagttttaatttagcctggaaccaactgtgcttgaagtgtctattgcagacggtatgctttatgtaaccttaggcacacactaatagaagaaacatagagtaggttctgatagttttagagcaaagcaaacaatatcatcttagaaaatgaatatttccttttaattaggtagtgaattctggtaatttgaaattgcttccagaagttaagactagagcctgcacttccagctattccaaaaaagttttaatcacctgatgcttgcttatgtatccctgtctttccaaattatctattctgttatataccatgaaatctgaaccaagaaaccatgtctttatggtgcagctcaaattcccactcctataaaaggcacatctgaattgactcaattggaaattttatcttccttggtcagctatcacatagtacttaaattctacctttcaaaaacacttattatattattctcatgcgtgttagtgttcttattttattgagatggtgagcactgctcctaatagaatctcctacataaacgtagtcatattagttcagcataatgatacccaatactgtatcaaaatatgtctaatttcatatatatgaattccmaattcagtaagtaatgttaataagctttcttttaatatcctaaattgtttaccaccaattagatgatgaaataagttttcaaataaaactacattttt

SEQ ID NO: 688925 - DNA, 597 bp, Homo sapiens
ttttttgtttttttatttttattttttttaaccatgaatgggtgttaaatttggtcaaatgctttttctgcatatattgatataatcatttgattttttagcttaatgattcatgaacttataaaaatctggcttctataggtgtgaatttggtgacatcatgaaacactcttatgctaaaatctataccttgctttcaatttaaaaacatgatgagttatatagtagagtttctatttcttcacagtgaaggtaaaagacaaatggcatgaacctccctgcccaaccccccgcaccccccaaaawaaagagaaaagaaagaagagacaggagtcaaattttggaacatagccataagcaaatagaatagtattaactcattacaggcagatagggtagctcaattgggaagggcaaaatcagtattatataaattatggaatggtccaaaatcctgagaattataaacatcaagaatgttgaaatagtagaggagatgatgttaaaaaacaagagagttgtttaaaagtctttttaagaagcaacatctcatttccttttatataggtaagcatcttttccccagcaagtagaaaa

SEQ ID NO: 688926 - DNA, 645 bp, Homo sapiens
attggaggtaacaaatccaaactgtatccaggctgagtgttggctcgggaaaacccacttcatggagaagaggcgccttgagggtggacagggaacctgtcagctttccatgggcggggcctggcttgaggggcggggctctggatgagagtgggcggggctctggatggggatgcacaggccctggctggcaatgggtrgagctctgatggggtgggtggggctctgaataagaatgggtggggctctggctgggagtgggtgcggatctggatggggatgcacaaggccctgaatggggatgggtggagctctgggtggggtgagcggggctctgaatgagaatgggtggggctctgaatggggtgggcagggctctggatgagaattggtggcactttgaaaggagttgggcggggccctggatgagaatgggcgtggctctgattggggatgcacagggcctggctggattgggtggggtgctggatgagagtgggtggggctctggatgagagtggatggggctctggatgattgtgggtggggctctggctgggggtgggcggggctctggctgggggtgggcagggctctggatgataattgatggtgctttgggaggagttgggtggcgccctggat

SEQ ID NO: 688927 - DNA, 639 bp, Homo sapiens
aattttctagacctgatcatgtctggattgctttcttccctacttgtatccgaacctttttgtcccrtgccctactgtcctggccctgctcagtttggattacgtccagcattttctcctcactgccgaactttgtcttggaagggagctcctgtttgtgtttcaagagcattcggggccccagtgactccagcactgtcagatccgactgctttgccatctccttgcatgcacactcaaattggatcttgtagaacgccattccagtgtagtggctattttcagattgacctgccttgctttctggtgagtgtccactggtgacttagtgctttccttttctcatgactgtcagaaacccagtcaccttccctctgtttcatcccagtttcttatcccacatgggtcttgcagctttggatagtttgtccttgcccacagtgtctaggagttgtgagaataccttgctatgcagttttattgtaaatgttgctacaggtgattgatttagatagcctaactgctctgtctgttcatttgagaaattcagagaaattcaaaaccaccataaacattttgtcacagtgctaggcacagagcagataatctgatgtttgctgactgatgaaagtttataga

SEQ ID NO: 688928 - DNA, 639 bp, Homo sapiens
aattttctagacctgatcatgtctggattgctttcttccctacttgtatccgaacctttttgtcccatgcccyactgtcctggccctgctcagtttggattacgtccagcattttctcctcactgccgaactttgtcttggaagggagctcctgtttgtgtttcaagagcattcggggccccagtgactccagcactgtcagatccgactgctttgccatctccttgcatgcacactcaaattggatcttgtagaacgccattccagtgtagtggctattttcagattgacctgccttgctttctggtgagtgtccactggtgacttagtgctttccttttctcatgactgtcagaaacccagtcaccttccctctgtttcatcccagtttcttatcccacatgggtcttgcagctttggatagtttgtccttgcccacagtgtctaggagttgtgagaataccttgctatgcagttttattgtaaatgttgctacaggtgattgatttagatagcctaactgctctgtctgttcatttgagaaattcagagaaattcaaaaccaccataaacattttgtcacagtgctaggcacagagcagataatctgatgtttgctgactgatgaaagtttataga

SEQ ID NO: 688929 - DNA, 1431 bp, Homo sapiens
ttttgagacagaatttcactcttgtcacctaggctggagtacaatggcgtgatctcagctctctgcaacctctgcctcccagggttcaagtgattcttcttcctcagcatctcaagtagctgggattacaggcgtgcaccaccatgcccagctaaattttttttgtatttttagtagagatggggtttcgccatgttggccaggttagtctcaaactcctgacctcaagtgatttgcccaccttggcctccaaaagtgctgggattacaggtgtgagccaccacgcccagccaggtgtggattttyaaaaacagcaaaatctgtgggaatctagtatttctctctagatgaagtaatgtcattgaatataatttaagttgtagtgtaattaaagatggtataaatggctctattcttcccatgctgacattttatcccaagccctttcttcgggcatcattggtcaatgatttatgggttttccatggcttccatatcttgtctatcaccaactggtttctgagacatgagtggtttaccccggaagtgattattcaaattctgtggctgctgggctttgttcttacatctaatgtattcagctagattctgctccaggaagagataacaaaaattactgaaacaatttgtaagatgcagccagctgcatattgaccttcaactcccacgagtgtccctgccaaaatgatacagttacttaatttccagagtcaaaattatcaataaagcccaaaggctttctctcaatagacaatgggtatgtgtttcggtgtttgggtgtggatgtgtgtttgtgtgtcacaaagagagagactttcactcaaaagacaaggtatgtgtgcatgagtacatgtgtattagagaaagaaagagagaaagagagcaatgaagacagagcacagctttgttagaatggtgaggggagacccaatgttagtttgcttccaggacttgatggagattattggtttttctttgaaagcccattcctcagcctaggtaaaagcttttcctagtagaccgtgattcattaacatcctgtccttctggggaggaaaagacacgaaaatttaaggcaagattccaggctggaaaagagctgttgttgagacaaagctttgatggaaggtgaaagcaggcctggaaccatgtgtgtcatagtgattattttttatggctcaacgtcaaaatgcctctgctacttgttagtttggggtttggtgggacagaaaagaggaaggctatgaggagagtaaggaacaaagagggagagtttgcagaaaaatttttagagcaattgaagcttgataatactggatgtgtcctgccttttctgttgttgctttcatttgttgaagcatttcataagtagatcacatgttcacaatagaaaagtgaatctattatgca

SEQ ID NO: 688930 - DNA, 1431 bp, Homo sapiens
ttttgagacagaatttcactcttgtcacctaggctggagtacaatggcgtgatctcagctctctgcaacctctgcctcccagggttcaagtgattcttcttcctcagcatctcaagtagctgggattacaggcgtgcaccaccatgcccagctaaattttttttgtatttttagtagagatggggtttcgccatgttggccaggttagtctcaaactcctgacctcaagtgatttgcccaccttggcctccaaaagtgctgggattacaggtgtgagccaccacgcccagccaggtgtggattttcaaaaacagcaaaatctgtgggaatctagtatttctctctagatgaagtaatgtcattgaatataatttaagttgtagtgtaattaaagatggtataaatggctctattcttcccatgctgacattttatcccaagccctttcttcgggcatcattggtcaatgatttatgggttttccatggcttccatatcttgtctatcaccaactggtttctgagacatgagtggtttaccccggaagtgattattcaaattctgtggctgctgggctttgttcttacatctaatgtattcagctagattctgctccaggaagagataacaaaaattactgaaacaatttgtaagatgcagccagctgcatattgaccttcaactcccacgagtgtccctgccaaaatgatacagttacttaatttccagagtcaaaattatcaataaagcccaaaggctttctctcaatagacaatgggtatgtgtttcggtgtttgggtgtggatgtgtgtttgtgtgtcacaaagagagagactttcactcaaaagacaaggtatgtgtgcatgagtacatgtgtattagagaaagaaagagagaaagagagcaatgaagacagagcacagctttgttagaatggtgaggggagacccaatgttagtttgcttccaggacttgatggagattattggtttttctttgaaagcccattcctcagcctaggtaaaagcttttcctagtagaccgtgattcattaacatcctgtccttctggggaggaaaagacacgaaaatttaaggcaagattccaggctggaaaagagctgttgttgagacaaagctttgatggaaggtgaaagcaggcctggaaccatgtgtgtcatagtgattattttttatggctcaacstcaaaatgcctctgctacttgttagtttggggtttggtgggacagaaaagaggaaggctatgaggagagtaaggaacaaagagggagagtttgcagaaaaatttttagagcaattgaagcttgataatactggatgtgtcctgccttttctgttgttgctttcatttgttgaagcatttcataagtagatcacatgttcacaatagaaaagtgaatctattatgca

SEQ ID NO: 688931 - DNA, 590 bp, Homo sapiens
tggctcatgcctgtatgcctgtaatcccagcactttgtgaggccaaggcaggaggatcacttgagcccaggagtttgagaccagcctgggcaacatggtgagaccacatctccacaaaaaataaacaaaatcagccagatgtgrtggtgtgtgcctgtggtcccagctactcagggggctaacaaggaaggctctcttgagcctaagcagatgaatctgcagtgagcagtgtttgtgccactgctctccagcctgggcgacagagcaagactctgtctcaaaaaacaaatgaacacacccacaaaaaaaccacccccaccgctaccaaaataaacagatgagggtgtgggacaccctttaattttgtttttcttaaactatctctacttcgagttctgggaacttgaataatgttttctctcttccaactgcacttagggatcttgtgatccagttcagtcataagccacttacaagcttatgtgagatagaagctccagcacgttcatgaaggcagctcatataaccaagatcacccccttcccttttccttttcccacatgctgactccaagtaagttttttgttgtt

SEQ ID NO: 688932 - DNA, 590 bp, Homo sapiens
tggctcatgcctgtatgcctgtaatcccagcactttgtgaggccaaggcaggaggatcacttgagcccaggagtttgagaccagcctgggcaacatggtgagaccacatctccacaaaaaataaacaaaatcagccagatgtggtggtgtgygcctgtggtcccagctactcagggggctaacaaggaaggctctcttgagcctaagcagatgaatctgcagtgagcagtgtttgtgccactgctctccagcctgggcgacagagcaagactctgtctcaaaaaacaaatgaacacacccacaaaaaaaccacccccaccgctaccaaaataaacagatgagggtgtgggacaccctttaattttgtttttcttaaactatctctacttcgagttctgggaacttgaataatgttttctctcttccaactgcacttagggatcttgtgatccagttcagtcataagccacttacaagcttatgtgagatagaagctccagcacgttcatgaaggcagctcatataaccaagatcacccccttcccttttccttttcccacatgctgactccaagtaagttttttgttgtt

SEQ ID NO: 688933 - DNA, 1898 bp, Homo sapiens
  misc_feature 1033, 1034, 1035, 1036, 1037, 1038, 1039, 1040, 1041, 1042,1043, 1044, 1045, 1046, 1047, 1048, 1049, 1050, 1051, 1052,1053, 1054, 1055, 1056, 1057, 1058, 1059, 1060, 1061, 1062,1063, 1064, 1065, 1066, 1067, 1068, 1069, 1070, 1071: n = A,T,C or G
  misc_feature 1072, 1073, 1074, 1075, 1076, 1077, 1078, 1079, 1080, 1081,1082, 1083, 1084, 1085, 1086, 1087, 1088, 1089, 1090, 1091,1092, 1093, 1094, 1095, 1096, 1097, 1098, 1099, 1100, 1101,1102, 1103, 1104, 1105, 1106, 1107, 1108, 1109, 1110: n = A,T,C or G
  misc_feature 1111, 1112, 1113, 1114, 1115, 1116, 1117, 1118, 1119, 1120,1121, 1122, 1123, 1124, 1125, 1126, 1127, 1128, 1129, 1130,1131, 1132: n = A,T,C or G
caaatctctttttcttttggtggaggtgatttctcatagagaaatgggcgattgcttctcacctgtgtttgcctgtattctggcaggtacaataaattaaaagcactgtaatgttagaaaatagagggatccatgtaggcggctgtagttagggaaggccttatgaaagaagatgggattaaaatgggtagagtttgtgttagtaaggtagaaagctttccaaatgtgaaaaagaaatgaataaagacacattaacaaaagaaagcttgacttgggtctctcccccaaataatagttggagaagaaccagctagattagcaagaaggcccaaccagaggaaaattagacataggctatacatgtggggtgaggccaggttgtggaagactttgagagaatgaccctctctgattatagccagggttgtattatgactttcacatgccctaggcatttttaccttcatggtccactttcttccttccaaaaaaatttaaaattatattttatgactataccagtataaaatgaatataatccagccgggcgcagtggctcaggcatgcaatcccagcactttgggaggccgaggcaggccgatcacaaggtcaggagatggagaccatcctggctaacacggggaaaccctgtctctactaaaaatacaaaaaattagctgggcgtggtggtgggcgcctgtagtcccaactacttgggaggctgaggcaggaaaatggcatgaacccacgaagcggagcttgcagtgagctgaaatcgcgccactgcactccagcctgttggaaagaacaagactccacctcaaaaaaaaaaaaaaaaaatatatatatatgtatatatataaaatccagggggcttttattatcatattcatattattatattgattttttcttccaattttaaaaaaaattaaaattaaaatgtttttattgatttctaaaactatcatgaattttaagcgctgcgcctgatgcgcctaatgataactcaactgtaatcaggggttgatannnnnnnnnnnnnnnnnnnnnnnnnnnnnnnnnnnnnnnnnnnnnnnnnnnnnnnnnnnnnnnnnnnnnnnnnnnnnnnnnnnnnnnnnnnnnnnnnnnngcgccactgcactccggcctgggcaacacagcgagactctgtctcaaaaaaaaaaaaaaaaaaaaaagagaaaaggaaacaaaggcactgagaaagaagctcaagcccacccacagagaacccttaaagacacaaattcatgtttcttgcttaaatcttaattcaatctgattccacaaataggtttactctgatacaattatcagcagtacaattgaaatctaaagaaagaaaaaatgactttccttcaggtgtctgcaatgtaaatgaaaattaaagcctggatatatgattgtcttttctsacttagtttgcaatgaaatcagcccaccaaaatataaacttttacctagcactcttttcaaaaaacttttaacacacacattttaaaaaattctctcacctcctacttaacctgaaatcttgcttagaaacaaagctaaacttggagtgataatggcttttctttagctacaattcctaaggttaaaaaaaaaaaacaaaattaaaaactactgatgtatgctatttaaaaaaataaaaagcagccatcctcccatctgcctgcaaaccccaatgtaaaaaaataaataaataaaaataaaaaataaaatacttttctaaactctgaaagaagatctaaactccgacactctggcctcaggacccaatgttaaaaaataaatcttagaattcaatcttctgtgacttttttttttctcaagattatctaaatttggcttattatgaagacaaggacaaccat

SEQ ID NO: 688934 - DNA, 1898 bp, Homo sapiens
  misc_feature 1033, 1034, 1035, 1036, 1037, 1038, 1039, 1040, 1041, 1042,1043, 1044, 1045, 1046, 1047, 1048, 1049, 1050, 1051, 1052,1053, 1054, 1055, 1056, 1057, 1058, 1059, 1060, 1061, 1062,1063, 1064, 1065, 1066, 1067, 1068, 1069, 1070, 1071: n = A,T,C or G
  misc_feature 1072, 1073, 1074, 1075, 1076, 1077, 1078, 1079, 1080, 1081,1082, 1083, 1084, 1085, 1086, 1087, 1088, 1089, 1090, 1091,1092, 1093, 1094, 1095, 1096, 1097, 1098, 1099, 1100, 1101,1102, 1103, 1104, 1105, 1106, 1107, 1108, 1109, 1110: n = A,T,C or G
  misc_feature 1111, 1112, 1113, 1114, 1115, 1116, 1117, 1118, 1119, 1120,1121, 1122, 1123, 1124, 1125, 1126, 1127, 1128, 1129, 1130,1131, 1132: n = A,T,C or G
caaatctctttttcttttggtggaggtgatttctcatagagaaatgggcgattgcttctcacctgtgtttgcctgtattctggcaggtacaataaattaaaagcactgtaatgttagaaaatagagggatccatgtaggcggctgtagttagggaaggccttatgaaagaagatgggattaaaatgggtagagtttgtgttagtaaggtagaaagctttccaaatgtgaaaaagaaatgaataaagacacattaacaaaagaaagcttgacttgggtctctcccccaaataatagttggagaagaaccagctagattagcaagaaggcccaaccagaggaaaattagacataggctatacatgtggggtgaggccaggttgtggaagactttgagagaatgaccctctctgattatagccagggttgtattatgactttcacatgccctaggcatttttaccttcatggtccactttcttccttccaaaaaaatttaaaattatattttatgactataccagtataaaatgaatataatccagccgggcgcagtggctcaggcatgcaatcccagcactttgggaggccgaggcaggccgatcacaaggtcaggagatggagaccatcctggctaacacggggaaaccctgtctctactaaaaatacaaaaaattagctgggcgtggtggtgggcgcctgtagtcccaactacttgggaggctgaggcaggaaaatggcatgaacccacgaagcggagcttgcagtgagctgaaatcgcgccactgcactccagcctgttggaaagaacaagactccacctcaaaaaaaaaaaaaaaaaatatatatatatgtatatatataaaatccagggggcttttattatcatattcatattattatattgattttttcttccaattttaaaaaaaattaaaattaaaatgtttttattgatttctaaaactatcatgaattttaagcgctgcgcctgatgcgcctaatgataactcaactgtaatcaggggttgatannnnnnnnnnnnnnnnnnnnnnnnnnnnnnnnnnnnnnnnnnnnnnnnnnnnnnnnnnnnnnnnnnnnnnnnnnnnnnnnnnnnnnnnnnnnnnnnnnnngcgccactgcactccggcctgggcaacacagcgagactctgtctcaaaaaaaaaaaaaaaaaaaaaagagaaaaggaaacaaaggcactgagaaagaagctcaagcccacccacagagaacccttaaagacacaaattcatgtttcttgcttaaatcttaattcaatctgattccacaaataggtttactctgatacaattatcagcagtacaattgaaatctaaagaaagaaaaaatgactttccttcaggtgtctgcaatgtaaatgaaaattaaagcctggatatatgattgtcttttctcacttagtttgcaatgaaatcagcccaccaaaatataaacttttacctagcactcttttcaaaaaacttttaacacacacattttaaaaaattctctcacctcctacttaacctgaaatcttgcttagaaacaaagctaaacttggagtgataatggcttttctttagctacaattcctaaggttaaaaaaaaaaaacaaaattaaaaactactgatgtatgctatttaaaaaaataaaaagcagccatcctcccatctgcctgcaaaccccawtgtaaaaaaataaataaataaaaataaaaaataaaatacttttctaaactctgaaagaagatctaaactccgacactctggcctcaggacccaatgttaaaaaataaatcttagaattcaatcttctgtgacttttttttttctcaagattatctaaatttggcttattatgaagacaaggacaaccat

SEQ ID NO: 688935 - DNA, 576 bp, Homo sapiens
aatyctacagaatgacataaaatggttcctgtggaagctttgcacgcagagggtttgcatcagagctgaggaaccctgagtttagaaaaccttgagtttctgtaatggactggaagcaaatctgcctaatcttttcctagagggaaacattatctttatcacactaggcagcccacaaatctaccctttactctgagggacacaccataccttctaagctgcttgttatacaaacatccataagagataatctggaacaaaaggaatcagtgcctctgcttgtgcagtaatatgatagactcatggagaactatctcctcaaacgctcctgcctgtgaactatcacagaacacattttctgttctgtatcatacattatcttaaattcatttttttatcaatatatcgagcctccccaagtcaaccataagctgccattaaaaataactcatttttacaccaatagatttacttaatttctaaggtaatgtcataacatgatttgtgctcaatacatatttaagaacaattactgatgatgatgattgattaactgattggtgctaattgattgat

SEQ ID NO: 688936 - DNA, 576 bp, Homo sapiens
aatcctrcagaatgacataaaatggttcctgtggaagctttgcacgcagagggtttgcatcagagctgaggaaccctgagtttagaaaaccttgagtttctgtaatggactggaagcaaatctgcctaatcttttcctagagggaaacattatctttatcacactaggcagcccacaaatctaccctttactctgagggacacaccataccttctaagctgcttgttatacaaacatccataagagataatctggaacaaaaggaatcagtgcctctgcttgtgcagtaatatgatagactcatggagaactatctcctcaaacgctcctgcctgtgaactatcacagaacacattttctgttctgtatcatacattatcttaaattcatttttttatcaatatatcgagcctccccaagtcaaccataagctgccattaaaaataactcatttttacaccaatagatttacttaatttctaaggtaatgtcataacatgatttgtgctcaatacatatttaagaacaattactgatgatgatgattgattaactgattggtgctaattgattgat

SEQ ID NO: 688937 - DNA, 576 bp, Homo sapiens
aatcctacagaatgacataaaatggttcctgtggaagctttgcacgcagagggtttgcatcaragctgaggaaccctgagtttagaaaaccttgagtttctgtaatggactggaagcaaatctgcctaatcttttcctagagggaaacattatctttatcacactaggcagcccacaaatctaccctttactctgagggacacaccataccttctaagctgcttgttatacaaacatccataagagataatctggaacaaaaggaatcagtgcctctgcttgtgcagtaatatgatagactcatggagaactatctcctcaaacgctcctgcctgtgaactatcacagaacacattttctgttctgtatcatacattatcttaaattcatttttttatcaatatatcgagcctccccaagtcaaccataagctgccattaaaaataactcatttttacaccaatagatttacttaatttctaaggtaatgtcataacatgatttgtgctcaatacatatttaagaacaattactgatgatgatgattgattaactgattggtgctaattgattgat

SEQ ID NO: 688938 - DNA, 576 bp, Homo sapiens
aatcctacagaatgacataaaatggttcctgtggaagctttgcacgcagagggtttgcatcagagctgaggaaccctgagtttagaaaaccttgagtttctgtaatggactggaagcaaatctgcctaatcttttcctagagggaaacattatctttatcacactaggcagcccacaaatctaccctttactctgagggacacaccataccttctaagctgcttgttatacaaacatccataagagataatctggaacaaaaggaatcagtgcctctgcttgtgcagtaatatgatagactcatggagaactatctcctyaaacgctcctgcctgtgaactatcacagaacacattttctgttctgtatcatacattatcttaaattcatttttttatcaatatatcgagcctccccaagtcaaccataagctgccattaaaaataactcatttttacaccaatagatttacttaatttctaaggtaatgtcataacatgatttgtgctcaatacatatttaagaacaattactgatgatgatgattgattaactgattggtgctaattgattgat

SEQ ID NO: 688939 - DNA, 543 bp, Homo sapiens
tgagactagattagactcattggatagtgttttccaaaacctcttggtccagtattgttcaacgataagtttgcatcagttccaaaatggaaaagagcaatttttaatataaatctttctttaytcattagtgatggaatcccagttttatttgggcactagtctatccataaagattacatttcttaatttttcatacagatagatgtggtcatgtgactaaattctagccaatgatgtgatactggaagtaatatcctgttcctgggtatacagcaagatagaagaaaactgaataagtaatgaatatggttctccatgccaaatatggactgtctccagtcatttttttacatgcaatgaaagtgcatttccaccatgttaaatcgctactctgtatatgtgtatgggtttgagtttcagagtgggcagtggttttttttttcttttttatgcagaaggatctaatattatctcattcagcaatgtgagtttctcctaaaactctatatattcaatacaaaaactcagtcttggttaggc

SEQ ID NO: 688940 - DNA, 568 bp, Homo sapiens
taatataaattttctgaagcagcaaaacaaattcatgttgtaaaaggaatactggctcttttgtgaagaaaagattataggaaaataatggaatgctcttttgcaggctagctaggggtcataatggcttgggttagggtgacaatggtcagatttgacatgtatcatggtggcagaaccaagatgactttgaaggaattgactgtaggacaagaagaaatcagaatcttaaagaggtgggtggatgtgggcaccatttacccayatgtggaggcaggtgtgagaagggtgtgtgaagcacagggagggttagggacagagaggggtcctcacccattatagggtcatgaccaacactcctgtaacaaaagacaggttaacaaagggaaaacataaaaaatttatttaattacagttttatgtgacatgggaatcctcaggaataaagacccaaagatccaggtcacatgcagaatagacaactgtggaaaaatgcaattggacaaaagggtatagtctagtggaaattgacagggaaacctagcacggtctgtctgttcagattctt

SEQ ID NO: 688941 - DNA, 616 bp, Homo sapiens
tattctttatctgtaaattttacaatttatagaaaacatcattttcccccctcagcttctcggtttaatcaacagagcaattttacatgtatgtttttatcatttatactatttttcttgtagtttttcagaaacacttattattctcttatggtcatgtaaatatgagttaaccagaataacctaaaaagcaattgtactttttctaggatttattttaaatgcacaattatagattacacaaaatatggttaaaaattaaagaactgatatttgtggatggttggttgagtagggcttgttatattacaatctctaaatatgtggacaggcacagtgttataaattagtcagtaaatacttagttttctatggatttctagattttaggcaaaaataaatggtttgcctaaaccagattagaagttatgactcatataaaagttacaaacgaaattgtggaatttactagttatatatagtctaatattccttttaaaatttctccatttgtcccaacttacctttcagacaatcttctgaaattctgcttctatatatatatatatatgtgaaatttaccaccaatgccctgattakagaggtttcctatctt

SEQ ID NO: 688942 - DNA, 1184 bp, Homo sapiens
tgggaggtcaaggttgcagtgagccataactgcaccaatgaattctagcctaggcgacagtgagaccctgtctttaaaaaaaaaaaaaaaaaaaaggcctggtacctcctcactccccactctcatcatgtgagtatcctgctctccctttgccttctgacatgattggaagcttcctgacaccctcaccagaaggtaggcagctgctggtgtcatgcctgcacagcctgcagaaccatgaggcaaaataaacctcttttcttcataaattatccagtttcacatattcctttatagcaacacaggctaacgtatttctaattcaaactttgaatccaggttctagcacttaataatacatgtaacattgtgctttactatattctgtcttcctccctttcatatccaagcttctagaaaagaggagtacttatttctccagacttcatcatggtgcctagcacaaaggagttcaaaaaaatgtttaataaagttttycaaatttaacagcctttgaatctatagggcaaaattggttttaagacttttccaatttaagcacactacagagaacatcgaaacactctattattagaaataggggccaggcgcggtggctcacacctgtcatcccagcacttcggaaagctgaggtgggtggatcacctgaggtcaggagttcaagaccagcctcactaacagggtgaaatcccgtctctactaaatacagaaaactaaccaggtgtggtggcgcatgcctataatcccagctactttgggaggctgaggcaggagaatcacttgaacccgggaggcggagattgcagtcagccgacactgcaccattgcactccagcctgggcaacaagagcgaaaccccgtttcaaaacaaacaagtctcaaaacaaacaaaagtgtatggccgggccgcggtggcacacgcctgtaatcccagcactttgggaggctaaggcgggcggatcacgaggtcaggagatcgagaccatcctggctaacaaggtgaaatcccgtctctactaaaaatacagaaacaaaattagcagggcgtggtgacgggaacctgtagtcccaggtactcgggaggctgaggagggagaatggcgtgaacccgggaggcggagcttgcagtgagccaagatcgtgccactgcactccagcctggg

SEQ ID NO: 688943 - DNA, 1184 bp, Homo sapiens
tgggaggtcaaggttgcagtgagccataactgcaccaatgaattctagcctaggcgacagtgagaccctgtctttaaaaaaaaaaaaaaaaaaaaggcctggtacctcctcactccccactctcatcatgtgagtatcctgctctccctttgccttctgacatgattggaagcttcctgacaccctcaccagaaggtaggcagctgctggtgtcatgcctgcacagcctgcagaaccatgaggcaaaataaacctcttttcttcataaattatccagtttcacatattcctttatagcaacacaggctaacgtatttctaattcaaactttgaatccaggttctagcacttaataatacatgtaacattgtgctttactatattctgtcttcctccctttcatatccaagcttctagaaaagaggagtacttatttctccagacttcatcatggtgcctagcacaaaggagttcaaaaaaatgtttaataaagttttccaaatttaacagcctttgaatctatagggcaaaattggttttaagacttttccaatttaagcacactacagagaacatcgaaacactctattattagaaataggggccaggcgcggtggctcacacctgtcatcccagcacttcggaaagctgaggtgggtggatcacctgaggtcaggagttcaagaccagcctcactaacagggtgaaatcccgtctctactaaatacagaaaactaaccaggtgtggtggcgcatgcctataatcccagctactttgggaggctgaggcaggagaatcacttgaacccgggaggcrgagattgcagtcagccgacactgcaccattgcactccagcctgggcaacaagagcgaaaccccgtttcaaaacaaacaagtctcaaaacaaacaaaagtgtatggccgggccgcggtggcacacgcctgtaatcccagcactttgggaggctaaggcgggcggatcacgaggtcaggagatcgagaccatcctggctaacaaggtgaaatcccgtctctactaaaaatacagaaacaaaattagcagggcgtggtgacgggaacctgtagtcccaggtactcgggaggctgaggagggagaatggcgtgaacccgggaggcggagcttgcagtgagccaagatcgtgccactgcactccagcctggg

SEQ ID NO: 688944 - DNA, 1184 bp, Homo sapiens
tgggaggtcaaggttgcagtgagccataactgcaccaatgaattctagcctaggcgacagtgagaccctgtctttaaaaaaaaaaaaaaaaaaaaggcctggtacctcctcactccccactctcatcatgtgagtatcctgctctccctttgccttctgacatgattggaagcttcctgacaccctcaccagaaggtaggcagctgctggtgtcatgcctgcacagcctgcagaaccatgaggcaaaataaacctcttttcttcataaattatccagtttcacatattcctttatagcaacacaggctaacgtatttctaattcaaactttgaatccaggttctagcacttaataatacatgtaacattgtgctttactatattctgtcttcctccctttcatatccaagcttctagaaaagaggagtacttatttctccagacttcatcatggtgcctagcacaaaggagttcaaaaaaatgtttaataaagttttccaaatttaacagcctttgaatctatagggcaaaattggttttaagacttttccaatttaagcacactacagagaacatcgaaacactctattattagaaataggggccaggcgcggtggctcacacctgtcatcccagcacttcggaaagctgaggtgggtggatcacctgaggtcaggagttcaagaccagcctcactaacagggtgaaatcccgtctctactaaatacagaaaactaaccaggtgtggtggcgcatgcctataatcccagctactttgggaggctgaggcaggagaatcacttgaacccgggaggcggagattgcagtcagccgacactgcaccattgcactccagcctgggcaacaagagcgaaaccccgtttcaaaacaaacaagtctcaaaacaaacaaaagtgtatggccgggccgcgrtggcacacgcctgtaatcccagcactttgggaggctaaggcgggcggatcacgaggtcaggagatcgagaccatcctggctaacaaggtgaaatcccgtctctactaaaaatacagaaacaaaattagcagggcgtggtgacgggaacctgtagtcccaggtactcgggaggctgaggagggagaatggcgtgaacccgggaggcggagcttgcagtgagccaagatcgtgccactgcactccagcctggg

SEQ ID NO: 688945 - DNA, 1184 bp, Homo sapiens
tgggaggtcaaggttgcagtgagccataactgcaccaatgaattctagcctaggcgacagtgagaccctgtctttaaaaaaaaaaaaaaaaaaaaggcctggtacctcctcactccccactctcatcatgtgagtatcctgctctccctttgccttctgacatgattggaagcttcctgacaccctcaccagaaggtaggcagctgctggtgtcatgcctgcacagcctgcagaaccatgaggcaaaataaacctcttttcttcataaattatccagtttcacatattcctttatagcaacacaggctaacgtatttctaattcaaactttgaatccaggttctagcacttaataatacatgtaacattgtgctttactatattctgtcttcctccctttcatatccaagcttctagaaaagaggagtacttatttctccagacttcatcatggtgcctagcacaaaggagttcaaaaaaatgtttaataaagttttccaaatttaacagcctttgaatctatagggcaaaattggttttaagacttttccaatttaagcacactacagagaacatcgaaacactctattattagaaataggggccaggcgcggtggctcacacctgtcatcccagcacttcggaaagctgaggtgggtggatcacctgaggtcaggagttcaagaccagcctcactaacagggtgaaatcccgtctctactaaatacagaaaactaaccaggtgtggtggcgcatgcctataatcccagctactttgggaggctgaggcaggagaatcacttgaacccgggaggcggagattgcagtcagccgacactgcaccattgcactccagcctgggcaacaagagcgaaaccccgtttcaaaacaaacaagtctcaaaacaaacaaaagtgtatggccgggccgcggtggcacacgcctgtaatcccagcactttgggaggctaaggcgggcggatcacgaggtcaggagatcgagaccatcctggctaacaaggtgaaatcccgtctctactaaaaatacagaaacaaaattagcagggcgtggtgacgggaacctgtagtcccaggtacycgggaggctgaggagggagaatggcgtgaacccgggaggcggagcttgcagtgagccaagatcgtgccactgcactccagcctggg

SEQ ID NO: 688946 - DNA, 1636 bp, Homo sapiens
atcatctccactgacagttggctgggccataacatcctccttcgttatctttgtcaggattatagagagctgccagggaagcatgggttatgttccacgtaactgctctctttgatgttgcttcgaagccaacagttcccagacctatgagccatgtgcgaattgctagaaaagtttccacagacatactttcaatctttgtttaaactttaagtttcctgayttgttattttctattcctagtctttgcttgaattcttgaattaatataactaacagcattcaacaatgatatgtattctctaaccataatctgaagttcttccacttttgtctgtaatgttttctgtttttaactactgtggatggcatataaacagtactcttaacctattaataagtatcttactgtacaatgatctatgtttctgaaacacctaaaaactatgcaaaacagccaataaaacactctgcccaaaagcagaagtggtccctcacaatttcatatgccactttttaatggtgagcagagctgatctacatttgcattgtacttctcttttgtatctataaagtgtatataagtttacaagttgaaagttcctgagtagcgatgcttctataatagaaaataattatgtaggtatcactatttgtacatttaccagattctatttgtatgaaataactggcttatgctgaaatctttttcattccagatctctgctactaaaccataaatgttcttcccaatattaacatcaatctttggattaagacaaatgattccttttaaaaggccaatgtaatagaggaggtataacccattaatctattagcacctttaactacatcagcacacattcataaatcatattaatggaaaaaggtgccccaccaggagagggattttaatgtgaagagaatgaaggaaaaatggaaagttattgaagatgataatcctggctaagaagcaagagtgtgaacagtgagaattgaggggacagaaggaagtctttaaaggccagggggaagcaataaataaagaaagggatgctgcccagagatatggaagacatcaatatacagccttcggctttttaccaggtttctcaaatataagaaaattctgtaactcatgtaatgaagtttataaagctagccatatcatttgtgtctatctatatttcatcttttctcttcctggtaataatgctgctttcccaaagagtaacaatataagtagggagtagctttgtgtttgtttgcttgctttttaagtcaatgctcaagatatgttggttaaaaggggcaaatgttcacatggtaaactaaattcattaatatatcattcaacgggtcaggagtagggtaattcagtaccgcaggtcctctaatagcatcatcattttgttataaaattgatgaaaaaaataattcctggcagaggccactgtctgtgtggagtgtgcatgttctccccaggactctgtgggtattctctggatactccaggttccttctagctcccaaactagagcatggtaggtgaattgggtgcctacattgtcccagtctgagtgtgtgtatatgtgtgtgtgtgtgtatgtgtgccctgcatggaatgaccaaggcg

SEQ ID NO: 688947 - DNA, 597 bp, Homo sapiens
atacatgagggcctctaacctagaaatgagaggaggtgattaggacacaggaagtgatatataaaataaacttgttaaagaaaaagtttatcatgattggattatagaaastcgacagaggattgggatgggttagggaggaagggttgatgttatgagaagtgaagctgaagaaataaaaaattttataagccacattaatggtttgtacatcattcctaaaacaatagaagattttaagcaagtggtgtcatgatcacttttattttagaaagcatcccttatcttcaatgcagagatcagattttaggagagcgatgattaaaaaaagaaagctgagttagcaaactactatagctatagaggtaagagatggtggtgtctcaggtcaaggtaaaaggaggagcataggcaagagtatttgagaactattgagaaggtaaattctatagatgtcataatttattgattgtcagagagaaaatgaagagggagggaaaaaagggagagatagtgtgtgtatgggtctaaagataaaacaaattttgaggtcctcttttggactacacttgcttttgaggaaataggttatactta

SEQ ID NO: 688948 - DNA, 288 bp, Homo sapiens
atttaatatgttctacagattaaaaaactaaggcacacacggtagcttttcctagagctagtggatattggggattctcatgcagaggtcctggctcccaaatcgatgtattttctaccggtttacactgtacccacattacacactggtaatctatatatagggtagctgtttcatctgaaacaaaygttataaaatataattgattaaaatagattctaaaatagcattatttttctaagtattaataataatttaagtagtgcttttgcattcccaactagaata

SEQ ID NO: 688949 - DNA, 684 bp, Homo sapiens
ttttagccaagtagaagtgaaagcctgacatttgcaggctgtaccctgaaaggtgttatggaattttcattttttaataattatgctttaagttctagggtacatgtgcacaacgtgcaggctcgttacataggtatacatgtgccatgctggcccgctgcactcatcaacccatcgtttacattaggtatttctcccagtgctatccctccccctgcccccaaccccatgacaggccccagtgtgtgatgttccccgccctgtgtccaagtgttctcattgttcaaattcccacctatgagtgagaacatgcratgtttggttttctgtccttgtgatagtttgctgagaatgatggtttccagcttcatccatatccctgaaaaggacatcaactcatccatttttatggctgcatagtattccatggtatatatgtgccacattttctttattcagtctatcactaatggacatttgggttggttccaagtctttgctattgtgtttattgccacaataaacatatgtatgcatgtgtctttatggtatcatgatttataatcctttgagtatatactcagtaatgggatcgctgagtcaaatggtatttctagatctagatccttgaggaatcgccacactgtcttccataatggttgaactagtttacactcccaccaa

SEQ ID NO: 688950 - DNA, 1480 bp, Homo sapiens
attattattgttattattattatttttgagatggagtctcgctctgtcgcccagcctggagtgcagtggcgkgatctcggctcactgcaagctccgcctcccgggttcacgccattctcctgcctcagcctcccgagtagctgggactacaggcacgcaccgccacgccctgttaattttttttgtatttttttttagtagagacagggtttcaccgtgttagccaggatggtcttgatctcctgacctcgtgatccacccgcctcggcctcccaaagtgctgggattacaggcgtgagccaccgcgcccggccgaactccaaaattattaaactctgagcgtctgcaggtgactgacacatctgcgcttcctttcttccagggtgtggggaagagcgagaaaaagatttccgctctggaaggtaaacaaatactctctggagagagaagaggaatgtccctagcagatgtctccagagaagacaagactttaaattccgccagggaaatatacaatgtctaacttctaaggcacatttgccattcaatcatgctttaacccacgttgccagaaatttttgctcactaggttttgactgtacaggaatgtgaaaatattcatgaagagttgttttccaatgctaaagaattgatgtgttttaacagttgaattaattgtattgattatgatcacacctactttttatatatcttcatttctaacgtttctgtacaatcctgcctttccacctgatatagttaggccttgtgtcatcaaccaaatctcatcttgaattgtaatcgccataatccccacgtatttagggagagacctggagggaggtgtttggatcatgggggcggtttcccgcatgctgttctcatgaccatgagagtaagttctcaagagatctgatggttttataagcgtctgtcatttccactgcttgcacttctgtgtcctgccaccttgtgaagaaggacgtggttgcttccccttccaccatgattgtgtttcctgaggcctccccagccttgcagagctgtgagtcaattaaacctctttcctttataaattactcagtctctgtattcctctgcagcagtgtgagaacagactaatacatcaccactttatttactttactctctccccataccgaggttttctacattttctttctaggtctctacagtttctgcaaagatcctttatggaactcttagggaagctgggatgtataataaataaagggctcttttctttgagtcccacacccattttctgtgtataaaaatcttcaactccacttttgtctgttctatttaaatgtgtgcacatttccttctaatgttgtatatgaaaaagagacacctcttagcagtctttcatagagcaaaattttttactttgataaaatctaatttatcaatatttttaaattttatggatcaatcatgcttttgaggttgaatttaa

SEQ ID NO: 688951 - DNA, 315 bp, Homo sapiens
ttttcagcagcctcccaggtgaagtccaaacttttgtgcaaggctctcagtgacctagaacctgggatcttctctgagccacagctactctctgcatcccttccagagaattcccatgggctgggcatgcacgcctgctgagcaacttgctgcatctctccttggcgtgttgtgaagcagcagcatgagggcccaacacatggggacccrtcacatcactctctagctcatcctcccttgcctcactcacgctccctgccctgggcctgtatccaccatccacttatccactagacacagtgcccaggacccaca

SEQ ID NO: 688952 - DNA, 761 bp, Homo sapiens
tttcaaaaacacacatttttcacgtcatttccctactttaaaatgcttcaatggctcaccttcacttgcagaatcaagtacaaacccttgattttaaaatacaagatctttcttgctaggcatgtctatctaccttcttagcctcaactccacatgtacctttcaccttagtcatgctcagttatatgtgtgaagtttcttgaaaacatcctctgccctcccaacacccagatacctatgatagttcttccctcatggttttaccactctgtccatcataatcctcctattaaatgtagaaaacagagcctgtcttatgctagtctgtattcttagatctcagcatrggggcctgacatgacagatgatgatagatgtatctgctgaattaacaaatttaatgctaagtttctatcagtttagaataaacacagtcttttttttttttgagacagagtctcactctgtcacccgggatggagtgcagtagtgcaatctcagctcactgcaacctctgcctcccaggttcaagtgattctcatgcctcagcctcccaagtagctgggattacaggtgcctgccaccatgtctggataatttttgtcctttttgtagagatggcgtttcatcacattggccaggcaggtctcgaactcctgacctccagtgatccaccctccttggcctcccaaagtgctgggattatatatgtgagccactgtgcccagcccattttgtatattttagtgtaatagcataat

SEQ ID NO: 688953 - DNA, 608 bp, Homo sapiens
gttaaacataaggtggaacttagtactgcacaatattaacatattctttgaaaagagagaggaggggatcagtattaaactctttgaaagtccgtgtattgtctggaaaatggatgcaattccaataaaaattcctcaaggcttttgtgtacctctgttggtttcaacatttttataaaagatcaagaagccaaaatggccaagactcctctgaattaaaacaaggtgaggtgaggaaccttgttctaccaaattttaaatttattattattaatgtatagtaattaagagcagtagggtactgatgaagggattgatgaacagacaaactgaacagaaaagagaccatacccatacatatatagaaacctcatacgccagagcagtggaaaaagaataggatcttaaatcagtcatgctaggatgtctggttttccaaaaaggaaagcaaataaattgtattcccagctctcacctaacatgcacacacacacacacacacacacacacaaaataagttctcaagtagatttatggtttaaatatgcatgcaaaaaaaatgaaagcttttagcacaawatacaggagaatacagaggtagggaagta

SEQ ID NO: 688954 - DNA, 652 bp, Homo sapiens
caccttcagccttcatccaaggataaacgccaagctgctttctaccttttggaagcatgtatgtgacatgggtggtgtgacgacatcgtccaccatgtgattccccacttgagaagtctaatactgcagaaatgtgtttagcttttgcctccctactgagcttttttctgtgagaatttcctcaattccataagtcctactacctccctgaacacatgcacactttaatgtgtctgaaattggaataagtatttgtatatatgtgcatgtgtgtacatgtaccatacatgtgtgtttattgtgtataaacagatacatacatatgtgattttcccctctaaaagctgctattaaattgatattttaaaatcaagcacttattttaaatcaacctagaaccatgtctactttttccctttgcctggtagcaaacctaaagtcaaatttttggctcaattacttcaaccaacayagatctaaatagcttattttttcttttattcgggcctgagctcttattctaatttaaattattcctagttttaataggttacattttggggtgttttttttttaccatgttatcttatgtctttgtacattaagttcttactaaatcctttgagtaatgggcaggatatatggacacagc

SEQ ID NO: 688955 - DNA, 652 bp, Homo sapiens
caccttcagccttcatccaaggataaacgccaagctgctttctaccttttggaagcatgtatgtgacatgggtggtgtgacgacatcgtccaccatgtgattccccacttgagaagtctaatactgcagaaatgtgtttagcttttgcctccctactgagcttttttctgtgagaatttcctcaattccataagtcctactacctccctgaacacatgcacactttaatgtgtctgaaattggaataagtatttgtatatatgtgcatgtgtgtacatgtaccatacatgtgtgtttattgtgtataaacagatacatacatatgtgattttcccctctaaaagctgctattaaattgatattttaaaatcaagcacttattttaaatcaacctagaaccatgtctactttttccctttgcctggtagcaaacctaaagtcaaatttttggctcaattacttcaaccaacacagatcyaaatagcttattttttcttttattcgggcctgagctcttattctaatttaaattattcctagttttaataggttacattttggggtgttttttttttaccatgttatcttatgtctttgtacattaagttcttactaaatcctttgagtaatgggcaggatatatggacacagc

SEQ ID NO: 688956 - DNA, 621 bp, Homo sapiens
tgaactgaagcagctttgttctgagacatgcttcataaccgctacataacacggctctcctcggctggcttggaagtctttctcaatgtctaacctaaatcctttttgttgcaggctgtgcctattcactacccccttccttagacaaagaagaaagctgctcccttcaatctccattttgttgtgctgagaggcctcaattctttagcccctgtatcctgactccctgggtcttgccgtccaggtcaaggggggccaaacaggaaccctccccttgtgcgtgagcgtgagtgtgtgtgcgcacatgcggtgtgagatgtgtgtgtgcgtgcatgcgtgcaygtgtccacacaaatccccttcaaagaggactggtgaggactggtaaggactgcagcaccctgggctgggtcctcacctcctcactggcctccctgcctcctttccttgtcatctgctgcctctgggctgtttcccaatacccagacctgtagaggtaagtctgctgcctgaacctgctccatggctttcctccattcccagaccattcccagctccaccctcgtcccacctttatttatttatttattttgagatgaggtctcgctacattaaccagac

SEQ ID NO: 688957 - DNA, 2360 bp, Homo sapiens
ccctgtgtcttttgagaatgcctcaaaaatgaaccttgattaatctcttgcctaattataactggttattaaatagcataacccttgatgacagtgtaaagtgatgctttatcttgaaaaaatggttaatgttctcattgattaagactcttgaaaataaaagctgtgatcaaaaaggaagtgctttcaaagttgaagatccaagaccacaattgccaagcttacataattttacgtacgatgatgtaataaactgttaggagcaggaaaagggtggcaaaacctcatttgttggtttgcttgtaacaccatgatttgagaatagagggagccagttcttttgcacattatgagatcactaactagagaagtcattcacactgggctaaatgatgaacacaaaggtaaatgtaggctgctttaaaacctgtaagccagaaggcctacatctagtttaacaaagttagtaggaagcacttttctctcttgctccaaatcacatcacctcacgtcttatccttcagccacatggaggttgcgtcaatttaccagacgaacatgcttgccaatatacctttggcaaatattatctttgctggtcggaatgtcctatagaccacctaactcctcttcaactcagcttaaacatttgttgtagcattgaatmcaagtgattttcccccactttcactcatccatagccttattcctgacagaacaatttctattctcctgattttgaatttgactggtctgaaaattgtgcgtgtgtgtgtgtgtgtgtctgtgtgtatgtacgtgtgcttgtgcatgcatatgagacgatgatgagtaatccttctggcatcttctcatgttcttactttccttactcctaaacttttggaaaacatggttctaattttgttactacattatagtctgaagtgtgtaggtgaagtctaggaatttgtggggaagtatgaagatgaaagatattttaacagaagaacagggatcaattttgctacagcaacggaaaactcttacaagttcagccttttggatgtatctctttgctgcaggagaataatataatgtggcttttagagtgctgtgttagctgccttcttctatatgacactgtaatattatttcaggtaaaatcccctgttcacatttatttatgtctttcagtgaggtttgccattttagacaagacttagagtctaattgatatgcataatacgttctttgcacatcactgttcagaattcttatgtgcatctagggtcagtcatattcttattttatgtgggaagaaaggtaataggcctctagggaaataggtcagttattgagattttttttaaatgcttggtagccctaaagataatttcaaagaatttctttaagaccctgtttttctcctaaatggtataaataccagaaggatgtatccaattgaaaataaatgtgcgagcttgaccttcaagtatttccagaatagtataagctcagtctttttttctattggtgtaaattacaatttatattccctctttaaaaagcatgtgagtagcttttcaaaatacttacagaaattatacttttgactattgaattttttcacaaagagtatgaataactagaaaataggtgctaaactttgacacttagtgctcaaaacattttggtttaaaatttaattaagaatgtgctttaaattgtttcattaaactattgagcatctgccatgttcaaagtattatatgtgtgttccaaaggagcaaattttatacaatgacagatacttctcagaataagtcaattactaggaaatatcttcctttttcttctctatccccttacctaaaacaatgtgtggtataataaagatctgaagtgtatcccagatacaaagaggaaacttacgttatatttatagaagcgttaacacaaaattcaggtgaaaagaaagggcaagtcagatgatgtccataaaacatcaaactttcgtagactgccttatgctcctgtttttagaatctgcatttcccatttatgtaagtctccagtacagaaatgcagaaatttggccaggtgttctaacttattctttctttcatatatacaattaattaaattgatgattttttttctaattcttactgcttaaggagctatttctttttcttggttattaggcatatctttaattcttcttcactactttatttttactgctgcaaagatgctactagtatggaattgcagtaaatgggctttgaagtcagatttgtttcagtctcagctttactgtttactaactatcttacccaagtccagggacttatattcttaaaatcttgttatcacat

SEQ ID NO: 688958 - DNA, 708 bp, Homo sapiens
tcatggaggtgggaggtgttagggcagagtaaggactttggacctgcagaaaatgagagggctttgaacatagcagaaacatgatttgacttcactgtttcaaaagagtcactctccctgcactatggacaacaatttgcagtagggaagggcctttctgacttgaaattaaaggtgtggccaaatacctactaaagctggactcaacaaacacagatgctttgcttactgggccagaagataatatgaaaaagtaaagataaatgattaaagcagctggatgtaaaatgataaaaggcaataggtacttaaccccggtgacaaggatttgaaggagttattgaggttgtgtcaagttcaatggtgggtgsccactttggaggggtagatgttgctcacctccagtttttacagtgtgttaacacaggcccttctttttaaaagaagattagactctgaatttttataagtcccctgagttttagacatatggacactaatttgtattttagactctcttcagcacaagaatgtctgggccaattaaagcatgtctaagtgtggaatttaccagaaagccttcagtttgcattttctaatctacagcaagataaagccagtagtttcaacactggtaaacaaatcagaggtaagataaaagatgatgggagagagatcagtctctaaattattttttttcaggtgaaa

SEQ ID NO: 688959 - DNA, 998 bp, Homo sapiens
aaaaaaaaaaaaaaaattagccaggcatggtggtgggcacctgtagtcccagctactcaggaggctgaggcgggagaatggcgtaagtaaacccaggaggcagagcttgcagtgagcctagatcacgccactgcactctagcctgggcgacagagcagcgagactctgtctcataaaaaaaaaaaagtacaatttggcctatctttgaactaaaaagtttactggtaccctgaaaatatgtataagtaaaaacatgaatgcttcatatgatttattaaaagcattttatgaaaaaaaaacaaaaacacaaaacctctccaggtatggtggctcacgcctgtaatcccagcactttgggaggctcaggtgggtgggtcacctgaggccagcagttcgagaccggcctggctaacatggtgaaaccttgtctctactaaaaatataaaaattagctgcgtgtggtggtgcacacctgtagtcccagctactcaggaggttgaggcaggagaattgcttgaactcaggaggcggaggttgcagtgagccaagatcgtgccactgcactccagcttaggtgacagagtgagactctgtctcaaaaaaaaaaaaaaaagacaaaacaacaacaaaaaaaacccaagcctactgatctaggcttagagtgggcttacactttcaaagggcattgtattatacaaaatatctctcaaaaaaaatttttttggccataggtagagattaagaaggctaaaacaaaaatgcatatatgaattttaatgataacacatatatgtatatttgaaaacaaggccacataagcctggctggyacattgggccattttactggctggccttcaaaaataaagattacaaaaaatttatccacatacacttttttatatccctaaagattacaaaaaatttatccacatatacttttttatatccctgtataaaattgatgccaacatgtttggcattttagaaagacactca

SEQ ID NO: 688960 - DNA, 641 bp, Homo sapiens
cctcccccacccctcatagctgagactccctcagagaatagagagcctggcacataatggttggraacatttattgagcacctactatgtgagtggacaaatattaattactgtactatttcatttgctatatgactgatatctccctgtttttgcacagtgcagtgatcttgctaataggggtatgtgtaaagtctgatggaaacacatccaacagagtggccagatgagcatgtgtaccatggtggccagggcgggggttggaaaaagagcagggttgagaaaaagagaggtaaccaaaaggctgcctggaacctctcaacgtttctgggttttgattcacatggcgagatgggcggtttgccccgctggcacatccgaggaagggaaccaattgtcagacaggctttcactctcaacacacagtaatcaaactggcagaagaagaaatggttgtactcctgtaatcactggaacctcagggagcctaatacagcacagtaaataaatgtaggtagtgggaaatgttatatcattagggcctagaaggctgtccttagggtcagttcccctgggcattcctctttgcagaatcacttactttccttcacatttgcttctatagattttctctctctttt

SEQ ID NO: 688961 - DNA, 641 bp, Homo sapiens
cctcccccacccctcatagctgagactccctcagagaatagagagcctggcacataatggttgggaacatttattgagcacctactatgtgagtggacaaatattaattactgtactatttcatttgctatatgactgatatctccctgtttttgcacagtgcagtgatcttgctaataggggtatgtgtaaagtctgatggaaacacatccaacagagtggccagatgagcatgtgtaccatggtggccagggcgggggttggaaaaagagcagggttgagaaaaagagaggtaaccaaaaggctgcctggaacctctcaacgtttctgggttttgattcacatggcsagatgggcggtttgccccgctggcacatccgaggaagggaaccaattgtcagacaggctttcactctcaacacacagtaatcaaactggcagaagaagaaatggttgtactcctgtaatcactggaacctcagggagcctaatacagcacagtaaataaatgtaggtagtgggaaatgttatatcattagggcctagaaggctgtccttagggtcagttcccctgggcattcctctttgcagaatcacttactttccttcacatttgcttctatagattttctctctctttt

SEQ ID NO: 688962 - DNA, 647 bp, Homo sapiens
tgttctttctgctaatagtctacccacagtttcccttcaggcactttcatagactcactaggcctctaaataatacagcttacaacatgcttccagatgagctaactgaggctcagactcagtcttatgaggcaaattgaattgattttgcatcacacttgaattattctgcttttgcactatgacctatactcaaccctctgccagggatgccctcctcttagccagctccttttataatcctaatcatatgtcaatgtctatatccatgaggcctgtattagtttttgttctgccataacaaatcttacaaaaaaaatcttaattgggaatatattaattagactggggtggctctagcactttaaattcttaaatgtacaaaccaaagcccagagtaatagtacatgggaattagaaaccacatcaatcagaaaccaccaacaaatctctatctagaagtttttcactctaaccaattatgattrtttgttcttgctgctgtgaatactttataaaagtttcccctgttgcccctcctggtggagcgctataccctgagtagtctggtgctactcagattttctgaatgctcaaataaactccttaaaatttaaatgtgcataagtttttctttaacaagagtt

SEQ ID NO: 688963 - DNA, 606 bp, Homo sapiens
gatctgcttggttcctgtttgagttcctctaaagcaaagactgtagtggctttataagcgtctaagagcagtgctctatttctgtactcttgctcccagggttcccttatttagtctttgctctaatacacagctcaggggttactggactcccttgcattgtcccagcgctgggattgactgtgtgtttaatccccactgacaaccaggcactgtgccctcagtacattctaacaaatgccctgtgagagaaaccaacatttagtcattttgcagatgtggaaacagaggcagaaataagaagctgtgcccaaggtcacccagatacgaaatgaagagaacttagaaaaattgcatcgtgwtcaaaagctctgaccttggcaagtttcttagcccatttgtctccttgctttctgtaaaatggagtaataagagtatctgccctaaaaggaggtgtaaggattattaatgcctgtaaagtgcttggaagaatgcctggcacatagtatgagcttgataaatgtcagccttaaacacaacaaatgagaccaaactgcttctaaagcttgtatcctttctgcaactccctgacgcctcacaaggaat

SEQ ID NO: 688964 - DNA, 1657 bp, Homo sapiens
cattacagcttacattttataattctattttaaatacatctgggaactttcagtattgtggtacttaatcttccattgggtggttggaaattcaggttcatagcaagccacgttaatctgatgcttgtctcagtttagtcaattaacatttgactacctgttccgttgaggattctgagaaagttttatagtcctttaccattactatttaaaaagtacagtctttctccttacagaactcgactttttttttacattttttattgagtttttatggtagagataaagaagtattcattcaacagacatgagaactaactatattctgtaattagatagtccctattcttaatcaacttagaagtttagtgggacagacaggaaaatcaacaaattagttatgaacacagtatagtggaagcacagggaagatggaaatatctggatagattcctaaaattaatatgtcatttttgcccatatgggccatcctattctctgtttcagttttattaatatttcatttattttagagtattttgagtctttttcttttctagaatttttaaagagactataggcatcatctagtctgacatgattattttctaggagttagaaccagagcctagagagatttagtgacttcagacgaagaaactaattgcttcttataaagtgtgatatccagaccagcagaatcagtatcacctgggaacttgttagaaatacatactctcaggttccactccagacctactgaatttgatgtgtttcagcagtctgtgtgtttaaccagccttccagatgattctgaagcatgttcaagtttaggaaccactgttacagctcattgattctttgtgcctccatcactaatcaaggtcactgttctagagagcagctgttattgatgcatgtgttttacctcaggggcctttcagtaaaaatcagtaaagagtactgatagagttaattggtgataaagctggaataagagcctccagtctagcattccttccgtcattcagtgttactttttacctttttaaatccctgacagcaacttagtctacagtactgattctgaacccctagctttaaaaaggctacaaccctaatttaaacatcaaagtaaagtaaataaatgaacatattcttagaaaagctttttaggtttttcttcagctttctaaagaactgattctgaatcttctctggattgtggactcctgtggaaaactgatgaaagctataaaccttttcttcgggaaaaaaagaaattatrtacacactagtccccccttatccatgagtgatacgttccaagacaatcagtggatggctgaaactgcaaatagtgccttcatatgctgtttttttccaatgaagacatatgataaggtttaattcataaattaggcacagtaagtgattaacaacaataatagtaaagtaggacaattataacaatgtaataaaaattatgtaaatgtggcatctctgtctctcagaatatcttattgtattgtcctacagataactgaaatcgtggaaggcaaaatgcagaaaggggggactactgtacacctatgaacagtatattacatataatctcagagacttctggtctctcttgaagctaatggacccaggt

SEQ ID NO: 688965 - DNA, 641 bp, Homo sapiens
gatcacctgctttgaactatttaatgtaagaaattttttattttcaaatttaagagtaatccttttataattctaaaacataataaactttttttggaaaaaggaattatatacacaagagcacctgactttaaacatcagtcaaactaagcagattgtatctcttttcagaattaaatgcaattaggtacaaaatcatatgtttacttaacatctagctttatatttgatgtttcatagaacttttcagtaaatttttgtcatgaagtctgtatttgttttgagatatatttctaaaaaagacttctcttggttcagttttttcacctttattaaaaaatatatagcctagtattctaaattttgttactgcttttataccctgacttattccaaatartcagtttcctatggagaaaccgttagtcaaaaagctgggagttagccttaatcaaattacatttacacctttggtggttacaaaatgctatctttcttcctgcaaactgaatttgaatgtatactaggtaccaggtggtgaggattattataggttatagaaaactcagtccttatatatgcaggttctttcttacagagctcaagtttgaatgagcatagacttaacgttgtgtgtgtta

SEQ ID NO: 688966 - DNA, 602 bp, Homo sapiens
cagagcttaagaaactcacacagttgctaagtaatggargtagaaataaaaacaaataaaaggaacaaaactaaacagatcatttaccatgataaaactgaatgggttgaatttgtccaccaaaaaacagaaactttatagaaatgagttaatgaacaaaatctagccatatgttaactaatcagtagcatggctgggattcaaatcctggggacctggttcagagtgttttcttaattaaaatttttttattattaaaaaatattttgtaggtacatagcaggtatatatatttatggggtacatgagatattttgatagaggcatatagtacataataacatcagggtaaatggggtataaatcatctcaagcatttctcctttccttgtgttgcaaataatccaattatactcttttagttattttgaaatgtacaataaattattgctgactgtagtcaccttgttgtactagactttattcattctatctaactaggtattaagcccagcatgcattagctagttttcctgaagttctccctcccccaaccctgacaggccccagtgtgtgtttttcccctccctgtgtccatgtgt

SEQ ID NO: 688967 - DNA, 602 bp, Homo sapiens
cagagcttaagaaactcacacagttgctaagtaatggaggtagaaataaaaacaaataaaaggaacaaaactaaacagatcatttaccatgataaaactgaatgggttgaatttgtccaccaaaaaacagaaactttatagaaatgagttaatgaacaaaatctagccatatgttaactaatcagtagcatggctgggattcaaatcctggggacctggttcagagtgttttcttaattaaaatttttttattattaaaaaatattttrtaggtacatagcaggtatatatatttatggggtacatgagatattttgatagaggcatatagtacataataacatcagggtaaatggggtataaatcatctcaagcatttctcctttccttgtgttgcaaataatccaattatactcttttagttattttgaaatgtacaataaattattgctgactgtagtcaccttgttgtactagactttattcattctatctaactaggtattaagcccagcatgcattagctagttttcctgaagttctccctcccccaaccctgacaggccccagtgtgtgtttttcccctccctgtgtccatgtgt

SEQ ID NO: 688968 - DNA, 414 bp, Homo sapiens
ttgatagaccaaggaatcaaatatagtaagaaaatagagaagccgataacacaatgaacctctgtgatctcgctgagatgtacaaaactgcatattcaactgaaaatacatatttttttaaacactcatggaaagtttataaaaattgatcatttattagcaaaataccccatgatcataaattataaagggkagaagtcaattacacaggcctacacctttggtaataactggaaaggtaatcaagggcctgctttaaaatacatatattagacacaaattgcctatggatcagctctccaagatttcaaggaaatctctatgttaaataaactctttcatatcataaaaaaggtaaaacacttgccaactatttctacaaaaccagattaatagaccctaacatcaaaacca

SEQ ID NO: 688969 - DNA, 519 bp, Homo sapiens
tacaaaaactcaaaaaattagccaggtgtggtggtgcatacctgcggtcccggctacttggcaagctgaggtgggtggatcacaggagctcaggtggttgtggctacagtgagctgcgatcacaccaccgaactctagcctgggcaacagagcaagactctgtcacaaaaaaagaaaaaaaaaggattagcttttgtctgtggtgagagacaaatatttgtttcagtttgcaatttgtatttttacctctgcttatcatacttcttactgtgcagacatttttcatttatatatagtctaatttatcaatattttctttttctaacttctggatttagtagaaacattttttttcctctgccaagttttaagggaattctccaaagttttctttgattacttttatggttttattttttatgttaaaatctttgrttcatttattcttgtgtgtctttccagatgtctatctagttgtcgcaacactctgtgaaaaaaatctttaaccaactgatttga

SEQ ID NO: 688970 - DNA, 633 bp, Homo sapiens
tttttgccctcaattttaagaattrattagtttctaagctagctatgaaatcctttatgcacaaatgtggtcatcaggcaccacaggccaaagcaggtatacagaatcgaaatcatcaactacaggaagcatttttcaatctctttcaggtgttttagcttggaccatgtggaaatcataggatctaatatttactcttagtttataatatagacaagcttattaacatatttatctaaagtacatttgtctaatttataataataatcacatacgtacacaatttacaaataccaactaactgtaaaagtctctctcaccaattccttcctttcctgtattcattttctacaaccgccataacaaattaccacaaatgggtggcttaaaacaacagaaatttattctcccacagttcaggagaccaaaagtccaaaatcaaggtattagcaatgttgattccttcaggagcctctgaggaaaaagccatccgtgcctctttcctagcttctgatggttactggcagtccttggtgttccttggcttatagatgcatccctccaatctcagcctccatcttcacattgctgccttctctgtgtctctctgtgtcttctcctcttataaggaca

SEQ ID NO: 688971 - DNA, 605 bp, Homo sapiens
tgtggagccagaaggagaccaaaaaagtaaagacaaaagaatttaacatttatcttcattaaaaatggaagaaaaacaaataggaaaaatattttttcattgtctgaaatacatacattttcaaaccactctaattcttaatcayataggaaagaaagcatcatttaaagaaaattaataattaatttttaaaagatgatttcataaaagggctagaccaacaaccaagaaaaagacaaaaacaaccaaccaaccaaattgagtattacctgttgtttgtctttttcttgcaatatgaggatactctccccaatagtatctattccagcacgaccagctctgccaatcatctgtttatattgattcctctttaaaaattccttagcaacatagggagctcttaaaataactctgtggaattaatgaaaaatgatactctacagcaaacagcaccaatttaaaaaattcttaatttcattatatatttgtgatattaaatttaatgacatactaacacaaaataataggtaactagtgtttaccaagaatctatgatttcttaggtttttacacatattatctataattcttacaaaactcttagt

SEQ ID NO: 688972 - DNA, 2580 bp, Homo sapiens
attttaacgtaactgaattgagatgtgcaaatatactttgaaaactgtctgatgaaaatagatctaaaggcaaatcctgaataacagcagggtcccgagtataatagaaaagtcaatgagaaaaataattatagctgtaaatccactagtttatagtaggtttaaagaaacatttctttcatataaaaagactgaactgttttttttttttttttaacctggtaggcaatggcttagagaaagctcattaagctgttttatttttttctgtgtccctgcttcagtcggatgacaatttaattatgaatatgatgatttatgacatcaatagatacatattaaaagtaaatttgtgtcttttaaagtgtagtttgtaaaatggattggtttgatggtgggtgataaatacacagagattatttaatagatgtgtttgcctattgaaaatccaagtaaagattgtatttcatgtgctagaaaatagataggtatagggaataatgataaggaagttaatattttgcctaccacaattgttcagttgaacttctttctttcttttgcaaaggtattgctagcttgtgtcaactgattctgatggtcaaatatttttataaataccttcaggagaatttcatagtgatcttaaaaactacaaagaaaaaggtactataacaagtttttagaacaagtaagtcttgaattctgatatgacatggcatccaaatcttgtactatttcagcctttgactgagtggttaccttaagggattaaggcatatgatcttttcaaaataaaatcaattgtcatcagaagatctattttgcacatttcttttagaacatttcagttgtcataagtaaaatatgcaggtgaaatgtataaataataaaagtagagacattaaaatccaagcctttctattttcatagtggtaaaaaacagagatcactataaaatagaaatttagccatgtctgtaaaattccaggaaagtaactaaagttactttaaaaagtttcatttatttatcataattattaaaaacgtttgaagtttttcttataatttaggtgattaatacatattgttcttataaactctaattggcttagaactgagttatggggaaattctgtagaattttatttcaatttactttatgccaataaaataaaattcaacttcagcagaaatctacagtatgctcatgtattagaagaaaattattacgaagatatgcctttatcttaattttgtgtattaacataagttccctaaaattccaaatgagtatttattaatattgaaaaatatcttaaaaatctatgtgaaacaacaaataagaaacaatgacaaagcaatttaaacaagaatataatatatatgaatataatacatatgaatatatatacacaattacatatgtgcataaatattacataatatgtatttgtggtataaacatagttaatatagtaaatattacatatgtacacacataatatttattatatttagtatgcttattattaagatattattaagatatatatcttctcaataatatctacaatgtatcaatacaatagaatttttacataatagtaaaatagtacaatagagcttgtcatacaaactctgaggttttataatatatattttgagggaaatagtcatgcatttcattcattcgtgtgtatagtttctaaaataccaggaggtttgtagtattttatggtgaaagattcccttactgccatgtaaagagttcagtgaactgtgccaaaaaattatgtcaaattgataaagagagagccactgactagactagacaaggccccatatccacggctccacaaggacggagataatagaagtagaaccaactgggaagaaatacgttaagtgctattgcaaaagctttatgctagcttgtcatttcttttatataagtgtcttttcattattaaatttttcctgtctgcaccaaaacttcctgctgaaggaattcttactgattcagtaagaggtatgtttgagtgttcatattagaracactaaattccttcttctaagtcctcctgcagtttatatatcccttaattacaccaataatcatttggcaggcagtatttttagttgtggacatgtcctatatgtctcattagattgtatttcttgacaacacggaacatgtgatattatattacacattaaaaaaaatttatatgaggcatagaatatttccttataaatactacaagaccaatagatgtttctttagttgtgctatttttacatatcaatcctaaaggcatcggatacatttgtcacttttgataactgccaactaattaatatttttatgcatattcttcacagagttcccacggatttataagaaggttcgactatgcttttcccggataaaacgtgtctctttccctttcattgccatctgctggatgacaatcctttattctgatacagtcatctttacaaatgactaaccaaaggtctgttttgaaagatcagcagaaataggtactgtgattataattttaaaaaattacagtg

SEQ ID NO: 688973 - DNA, 2580 bp, Homo sapiens
attttaacgtaactgaattgagatgtgcaaatatactttgaaaactgtctgatgaaaatagatctaaaggcaaatcctgaataacagcagggtcccgagtataatagaaaagtcaatgagaaaaataattatagctgtaaatccactagtttatagtaggtttaaagaaacatttctttcatataaaaagactgaactgttttttttttttttttaacctggtaggcaatggcttagagaaagctcattaagctgttttatttttttctgtgtccctgcttcagtcggatgacaatttaattatgaatatgatgatttatgacatcaatagatacatattaaaagtaaatttgtgtcttttaaagtgtagtttgtaaaatggattggtttgatggtgggtgataaatacacagagattatttaatagatgtgtttgcctattgaaaatccaagtaaagattgtatttcatgtgctagaaaatagataggtatagggaataatgataaggaagttaatattttgcctaccacaattgttcagttgaacttctttctttcttttgcaaaggtattgctagcttgtgtcaactgattctgatggtcaaatatttttataaataccttcaggagaatttcatagtgatcttaaaaactacaaagaaaaaggtactataacaagtttttagaacaagtaagtcttgaattctgatatgacatggcatccaaatcttgtactatttcagcctttgactgagtggttaccttaagggattaaggcatatgatcttttcaaaataaaatcaattgtcatcagaagatctattttgcacatttcttttagaacatttcagttgtcataagtaaaatatgcaggtgaaatgtataaataataaaagtagagacattaaaatccaagcctttctattttcatagtggtaaaaaacagagatcactataaaatagaaatttagccatgtctgtaaaattccaggaaagtaactaaagttactttaaaaagtttcatttatttatcataattattaaaaacgtttgaagtttttcttataatttaggtgattaatacatattgttcttataaactctaattggcttagaactgagttatggggaaattctgtagaattttatttcaatttactttatgccaataaaataaaattcaacttcagcagaaatctacagtatgctcatgtattagaagaaaattattacgaagatatgcctttatcttaattttgtgtattaacataagttccctaaaattccaaatgagtatttattaatattgaaaaatatcttaaaaatctatgtgaaacaacaaataagaaacaatgacaaagcaatttaaacaagaatataatatatatgaatataatacatatgaatatatatacacaattacatatgtgcataaatattacataatatgtatttgtggtataaacatagttaatatagtaaatattacatatgtacacacataatatttattatatttagtatgcttattattaagatattattaagatatatatcttctcaataatatctacaatgtatcaatacaatagaatttttacataatagtaaaatagtacaatagagcttgtcatacaaactctgaggttttataatatatattttgagggaaatagtcatgcatttcattcattcgtgtgtatagtttctaaaataccaggaggtttgtagtattttatggtgaaagattcccttactgccatgtaaagagttcagtgaactgtgccaaaaaattatgtcaaattgataaagagagagccactgactagactagacaaggccccatatccacggctccacaaggacggagataatagaagtagaaccaactgggaagaaatacgttaagtgctattgcaaaagctttatgctagcttgtcatttcttttatataagtgtcttttcattattaaatttttcctgtctgcaccaaaacttcctgctgaaggaattcttactgattcagtaagaggtatgtttgagtgttcatattagaaacactaaattccttcttctaagtcctcctgcagtttatatatcccttaattacaccaataatcatttggcaggcagtatttttagttgtggacatgtcctatatgtctcattagattgtatttcttgacaacacggaacatgtgatattatattacacattaaaaaaaatttatatgaggcatagaatatttccttataaatactacaagaccaatagatgtttctttagttgtgctatttttacatatcaatcctaaaggcatcggatamatttgtcacttttgataactgccaactaattaatatttttatgcatattcttcacagagttcccacggatttataagaaggttcgactatgcttttcccggataaaacgtgtctctttccctttcattgccatctgctggatgacaatcctttattctgatacagtcatctttacaaatgactaaccaaaggtctgttttgaaagatcagcagaaataggtactgtgattataattttaaaaaattacagtg

SEQ ID NO: 688974 - DNA, 810 bp, Homo sapiens
cttaatagctttaagatctaaacattgattaggaagcctgtaaaactttaacaataacaagacattaattgcctgaaacatacagattactcacctctaaattcaccagacattaaaatattataattacatataatagttataatataatatatagttatatgtattttacatatatatagaaagagatctatttactttctttttctcatctttgaaaactatagctcatcaaggtgatgaaaggaagcatacttttttttttcatttttatccaagtttgtgctttcactgtttggtagctttattactgggaataaattttgcttaccagttctctcttttctaccagatacatttcagaaaagccacagggagtagtttgcatcctctgtccacaggggtggtggtactggttcttttggaactgcatgacttggactatctacagttgtagtagtttcataattgcctattttcaggaaaagcatatcattctaagggttattttgtactgmttgtacaatgtagttttccattagctcattctctggttgtatgaaaaatgaagtaaataattttattctagttttcttcctcatgaataaaatttgcacatcctaatttcaaatctatacatatttgttttactgcaaattttcaaatacttatgatagaatcaagtattatacactgaagcagaatgagccctaagaagatttaggaaatctgggtcatgttctagtttaatctacattttttttccctaaggacttattttatttccaacaatcaatggtcacatatcca

SEQ ID NO: 688975 - DNA, 810 bp, Homo sapiens
cttaatagctttaagatctaaacattgattaggaagcctgtaaaactttaacaataacaagacattaattgcctgaaacatacagattactcacctctaaattcaccagacattaaaatattataattacatataatagttataatataatatatagttatatgtattttacatatatatagaaagagatctatttactttctttttctcatctttgaaaactatagctcatcaaggtgatgaaaggaagcatacttttttttttcatttttatccaagtttgtgctttcactgtttggtagctttattactgggaataaattttgcttaccagttctctcttttctaccagatacatttcagaaaagccacagggagtagtttgcatcctctgtccacaggggtggtggtactggttcttttggaactgcatgacttggactatctacagttgtagtagtttcataattgcctattttcaggaaaagcatatcattctaagggttattttgtactgattgtacaatgtagttttccattagctcattctctgrttgtatgaaaaatgaagtaaataattttattctagttttcttcctcatgaataaaatttgcacatcctaatttcaaatctatacatatttgttttactgcaaattttcaaatacttatgatagaatcaagtattatacactgaagcagaatgagccctaagaagatttaggaaatctgggtcatgttctagtttaatctacattttttttccctaaggacttattttatttccaacaatcaatggtcacatatcca

SEQ ID NO: 688976 - DNA, 1385 bp, Homo sapiens
aagtttggagctatacataaaattattctgtttaagcttcccatgaatgccacagatatttttattttagtggaattggggaaagagatagcacctctatatttcytttttaaagcacatacttttcatttaagaggtacagaaattaccacaattagttccgttttaatgtaattacttcttaaagattataaataagaatacaggatatactcatggaaaaatatttagagaaaggaaaattagaaaaagagagattgtaagtttatacaataaataatatgcaaaatattttgagaatatcttaataatttaaatatcatagtgtcacagtgtttgtcatttccattcacttgttaactattcatatgtacatttttgcagatattcttcattattccatcatcatctcaaacctcttgggtatagtgtttgactactactgtgaccataaattccaataaaacctaggaaaaatgaaaccactacattaactgaaagggtaagcaataacaataatattttctaacttccttgaataagaagaatcttgatgatgattgttatttattaattccagagagaaaggaacaagctagtgagtcaggagaaagaattattgcttattaagttcatttacttcaattgtgaggaatagaaagttaatgagattgaataggtgagtggctaatacttatggagaacaaatattgaaatcttttaaaaatgatttttcaaacttaaatggcataaaatttgagaatatcaatactttatatgagtaccagcattaatgagtccaatttactcccttaagctttagcaagctcaagtcatatatttttcatacagaaaggatattataagctcttccttctgctgtgttctcataagtctctctaatactagacctaggcctgtattgagtggaaaactcaatgtagacttcagagtttcctgaagagaaaagttcaggacttggtaacccagcctttaatttgcatttgagcatgatagtgtcaaatgcagaaggtgatctttttccactcctgagaacaaaggtgctaagtaagtagccccaggttctacattcctagaagtgtcagattagggattttccttccattgctgtgaggtgacatctctccaaccaacaatagtaatatgactcagaagaagaggaagtctcatttttcaagaggccaagattcttggaattggggaagggaacacttccccagacttaagaatgagatgcctgccttagggcatccatgtgcctacaagaaaaaattccttagatgactacctgctctgctatcagaattgctgatgtctctctatattgctgaattatggaagacaacattggagaaaacttgtat

SEQ ID NO: 688977 - DNA, 658 bp, Homo sapiens
cagactttctgtagttaaatctactcagcatatgagatgtgggttttctttacctctrcataaagttgaaagataatgcaatacaatcaacatatacatggtaaaatgtcagcattgggaaaatacattgctactcaaaaaataaaaagttttctcttacatattcactaccgaaagaaaacaaaagccacctgatgaatatttaaagagatgtgcccagggtgttatgggggctgtaaccaaacctgggacgctggtagagtaagtggagtttcctggaactgataacgtaagctttgaagaatgagcaaaagttagctagcttaacaaatttaacaatggagacaactggataatttaattggacaaaaaaagttagccaggttaacaaatttaacaatggagacaatttaacaatggagactcttcaaggagaagataggaggctcacgtgtatccatattattggtagatgtacaccttacctgttcagagtgagaatcttcatcccacaaaacatttttcttcagaaaagtaatgatgaccttaggacttgagtttctcaacatgtgtatcaggagtgtccaattttttggcttccctaggccacactggaagaagaagaattatcttgggccacacataagatatgctaata

SEQ ID NO: 688978 - DNA, 743 bp, Homo sapiens
gcagctgtcatgacttcaccaaaatacaactgagggacatcctttcccggttgcaaagcatatcttggctygtaaactaaaaatagactttgtgcaattttcatatggctctttaaaaatggcatttgggatttctccggcaagctgtatgctaagaagtcaggggaccaggtcccagcccatctctgcacccttgctggccacagtttctactctatcggggaggcactacattgccttttctctccatcccatttgcactaacatctgtggcttatggaatatttgccaataaatgatttcaacagaacttgcatactcaaagtaaaacttcagcagcactaatttacagatgagaagtaattgcttggaaggagggtaagagaagacagatcatcctactccagggatggaaggacggatggtcccctccacgtgctgattcacgtaacagcagcttatcaacagggacttggtgaagacccacccacagtgacgagactctgtgcagtcaccgtctgtgcgtttatcaatagtgacgcccaccctgactcctgggctgctccaaccgttccttcctcttctgtctggaacccttgtccttgttttctcaagccactgcaggtctccagaggcgtctgtccattccctcattccttccctcaacaaatatctgggcagctgctcgagccaggtattttagacatgagggacccagaagggcccacatgggcccagggcct

SEQ ID NO: 688979 - DNA, 743 bp, Homo sapiens
gcagctgtcatgacttcaccaaaatacaactgagggacatcctttcccggttgcaaagcatatcttggcttgtaaactaaaaatagactttgtgcaattttcatatggctctttaaaaatggcatttgggatttctccggcaagctgtatgctaagaagtcaggggaccaggtcccagcccatctctgcacccttgctggccacagtttctactctatcggggaggcactacattgccttttctctccatcccatttgcactaacatctgtggcttatggaatatttgccaataaatgatttcaacagaacttgcatactcaaagtaaaacttcagcagcactaatttacagatgagaagtaattgcttgraaggagggtaagagaagacagatcatcctactccagggatggaaggacggatggtcccctccacgtgctgattcacgtaacagcagcttatcaacagggacttggtgaagacccacccacagtgacgagactctgtgcagtcaccgtctgtgcgtttatcaatagtgacgcccaccctgactcctgggctgctccaaccgttccttcctcttctgtctggaacccttgtccttgttttctcaagccactgcaggtctccagaggcgtctgtccattccctcattccttccctcaacaaatatctgggcagctgctcgagccaggtattttagacatgagggacccagaagggcccacatgggcccagggcct

SEQ ID NO: 688980 - DNA, 743 bp, Homo sapiens
gcagctgtcatgacttcaccaaaatacaactgagggacatcctttcccggttgcaaagcatatcttggcttgtaaactaaaaatagactttgtgcaattttcatatggctctttaaaaatggcatttgggatttctccggcaagctgtatgctaagaagtcaggggaccaggtcccagcccatctctgcacccttgctggccacagtttctactctatcggggaggcactacattgccttttctctccatcccatttgcactaacatctgtggcttatggaatatttgccaataaatgatttcaacagaacttgcatactcaaagtaaaacttcagcagcactaatttacagatgagaagtaattgcttggaaggagggtaagagaagacagatcatcctactccagggatggaaggacggatggtcccctccaygtgctgattcacgtaacagcagcttatcaacagggacttggtgaagacccacccacagtgacgagactctgtgcagtcaccgtctgtgcgtttatcaatagtgacgcccaccctgactcctgggctgctccaaccgttccttcctcttctgtctggaacccttgtccttgttttctcaagccactgcaggtctccagaggcgtctgtccattccctcattccttccctcaacaaatatctgggcagctgctcgagccaggtattttagacatgagggacccagaagggcccacatgggcccagggcct

SEQ ID NO: 688981 - DNA, 743 bp, Homo sapiens
gcagctgtcatgacttcaccaaaatacaactgagggacatcctttcccggttgcaaagcatatcttggcttgtaaactaaaaatagactttgtgcaattttcatatggctctttaaaaatggcatttgggatttctccggcaagctgtatgctaagaagtcaggggaccaggtcccagcccatctctgcacccttgctggccacagtttctactctatcggggaggcactacattgccttttctctccatcccatttgcactaacatctgtggcttatggaatatttgccaataaatgatttcaacagaacttgcatactcaaagtaaaacttcagcagcactaatttacagatgagaagtaattgcttggaaggagggtaagagaagacagatcatcctactccagggatggaaggacggatggtcccctccacgtgctgaytcacgtaacagcagcttatcaacagggacttggtgaagacccacccacagtgacgagactctgtgcagtcaccgtctgtgcgtttatcaatagtgacgcccaccctgactcctgggctgctccaaccgttccttcctcttctgtctggaacccttgtccttgttttctcaagccactgcaggtctccagaggcgtctgtccattccctcattccttccctcaacaaatatctgggcagctgctcgagccaggtattttagacatgagggacccagaagggcccacatgggcccagggcct

SEQ ID NO: 688982 - DNA, 1216 bp, Homo sapiens
tgtaatcccagcactttgggaggccaagcagatcacctggggtcgggatttcgagactagcctggccaacatggtgaaaccccgtctctaccaaaaatataaaaaattagctgggtgtggtggtgcacacctgtaatcccagctacttgggaggctgaggcaggagaatcacttgaaccaggaggcggaggttgcagtgagccaagatcgtgccaccgcactccagcctgagcaacagagtgagattccatctcaaaaataaataaataaataaaaataaataaataaataaaaatctcaactcagcagttgaggtcttgggccttggagccaaggactacccagatctgaatcccaactcctctgtttaagtgaaaaggatctctgagcaagttcctaaatttctcttcagcttccctttccatgcattgggattagcagcatttccttgcccaaggtttctagggggataaatgaggcgtgatgcatatggaatgctcggctcacggcctggcacacagagagcagccccagcctcccagggcgcaggctggtcagctgggttttttcatagtatttcttaaagaaaagaacaaggatgcagctccctttgtggggggaagtgcattgcaataaagctagttgcaaagttagagaaatcccatttgccctttgatttcaattcttaaaaatatatagagtgcttctttatcagtggcccctgtggggaagataatcccacctagacggagccatacagggccaaggtgaacagtacagggtgcagggcagaggggagccgaggagctgtgcyggggacagcccacacacaggcagccctggccacccctctgggtgtgcaataccattcgtgtctggcaatccattttcttgaaactaacttatttcttatccataaaatgagcctgcgctatctgtccaattccagactgaaacattttttaagtccaaaacttctgattttgtaaaacacattctggccttatgtcatctcttatgctcacattccatctgatgtttgcttaccccctaccagcgctgacatctggtgtctgcaataccctcacagatggttgcccgtggtacgtccctccagaggtggagctgggtccagccacgttttaggtggcttgcaacaacatggtcagacacattcgtcctgctctctcagaggtctccatggctgttctactca

SEQ ID NO: 688983 - DNA, 1216 bp, Homo sapiens
tgtaatcccagcactttgggaggccaagcagatcacctggggtcgggatttcgagactagcctggccaacatggtgaaaccccgtctctaccaaaaatataaaaaattagctgggtgtggtggtgcacacctgtaatcccagctacttgggaggctgaggcaggagaatcacttgaaccaggaggcggaggttgcagtgagccaagatcgtgccaccgcactccagcctgagcaacagagtgagattccatctcaaaaataaataaataaataaaaataaataaataaataaaaatctcaactcagcagttgaggtcttgggccttggagccaaggactacccagatctgaatcccaactcctctgtttaagtgaaaaggatctctgagcaagttcctaaatttctcttcagcttccctttccatgcattgggattagcagcatttccttgcccaaggtttctagggggataaatgaggcgtgatgcatatggaatgctcggctcacggcctggcacacagagagcagccccagcctcccagggcgcaggctggtcagctgggttttttcatagtatttcttaaagaaaagaacaaggatgcagctccctttgtggggggaagtgcattgcaataaagctagttgcaaagttagagaaatcccatttgccctttgatttcaattcttaaaaatatatagagtgcttctttatcagtggcccctgtggggaagataatcccacctagacggagccatacagggccaaggtgaacagtacagggtgcagggcagaggggagccgaggagctgtgccggggacagcccacacacaggcagccctggccacccctctgggtgtgcaataccaytcgtgtctggcaatccattttcttgaaactaacttatttcttatccataaaatgagcctgcgctatctgtccaattccagactgaaacattttttaagtccaaaacttctgattttgtaaaacacattctggccttatgtcatctcttatgctcacattccatctgatgtttgcttaccccctaccagcgctgacatctggtgtctgcaataccctcacagatggttgcccgtggtacgtccctccagaggtggagctgggtccagccacgttttaggtggcttgcaacaacatggtcagacacattcgtcctgctctctcagaggtctccatggctgttctactca

SEQ ID NO: 688984 - DNA, 1216 bp, Homo sapiens
tgtaatcccagcactttgggaggccaagcagatcacctggggtcgggatttcgagactagcctggccaacatggtgaaaccccgtctctaccaaaaatataaaaaattagctgggtgtggtggtgcacacctgtaatcccagctacttgggaggctgaggcaggagaatcacttgaaccaggaggcggaggttgcagtgagccaagatcgtgccaccgcactccagcctgagcaacagagtgagattccatctcaaaaataaataaataaataaaaataaataaataaataaaaatctcaactcagcagttgaggtcttgggccttggagccaaggactacccagatctgaatcccaactcctctgtttaagtgaaaaggatctctgagcaagttcctaaatttctcttcagcttccctttccatgcattgggattagcagcatttccttgcccaaggtttctagggggataaatgaggcgtgatgcatatggaatgctcggctcacggcctggcacacagagagcagccccagcctcccagggcgcaggctggtcagctgggttttttcatagtatttcttaaagaaaagaacaaggatgcagctccctttgtggggggaagtgcattgcaataaagctagttgcaaagttagagaaatcccatttgccctttgatttcaattcttaaaaatatatagagtgcttctttatcagtggcccctgtggggaagataatcccacctagacggagccatacagggccaaggtgaacagtacagggtgcagggcagaggggagccgaggagctgtgccggggacagcccacacacaggcagccctggccacccctctgggtgtgcaataccattcgtgtctggcaatccattttcttgaaactaacttatttcttatccataaaatgagcctgcgctatctgtccaattccagactgaaacattttttaagtccaaaacttctgattttgtaaaacacattctggccttatgtcatctcttatgctcacattccatctgatgtttgcttaccccctaccagcgctgacatctggtgtctscaataccctcacagatggttgcccgtggtacgtccctccagaggtggagctgggtccagccacgttttaggtggcttgcaacaacatggtcagacacattcgtcctgctctctcagaggtctccatggctgttctactca

SEQ ID NO: 688985 - DNA, 1216 bp, Homo sapiens
tgtaatcccagcactttgggaggccaagcagatcacctggggtcgggatttcgagactagcctggccaacatggtgaaaccccgtctctaccaaaaatataaaaaattagctgggtgtggtggtgcacacctgtaatcccagctacttgggaggctgaggcaggagaatcacttgaaccaggaggcggaggttgcagtgagccaagatcgtgccaccgcactccagcctgagcaacagagtgagattccatctcaaaaataaataaataaataaaaataaataaataaataaaaatctcaactcagcagttgaggtcttgggccttggagccaaggactacccagatctgaatcccaactcctctgtttaagtgaaaaggatctctgagcaagttcctaaatttctcttcagcttccctttccatgcattgggattagcagcatttccttgcccaaggtttctagggggataaatgaggcgtgatgcatatggaatgctcggctcacggcctggcacacagagagcagccccagcctcccagggcgcaggctggtcagctgggttttttcatagtatttcttaaagaaaagaacaaggatgcagctccctttgtggggggaagtgcattgcaataaagctagttgcaaagttagagaaatcccatttgccctttgatttcaattcttaaaaatatatagagtgcttctttatcagtggcccctgtggggaagataatcccacctagacggagccatacagggccaaggtgaacagtacagggtgcagggcagaggggagccgaggagctgtgccggggacagcccacacacaggcagccctggccacccctctgggtgtgcaataccattcgtgtctggcaatccattttcttgaaactaacttatttcttatccataaaatgagcctgcgctatctgtccaattccagactgaaacattttttaagtccaaaacttctgattttgtaaaacacattctggccttatgtcatctcttatgctcacattccatctgatgtttgcttaccccctaccagcgctgacatctggtgtctgcaataccctcacagatggttgcccgtggtacgtccctccagaggtggagctgggtccagccacgtyttaggtggcttgcaacaacatggtcagacacattcgtcctgctctctcagaggtctccatggctgttctactca

SEQ ID NO: 688986 - DNA, 571 bp, Homo sapiens
caccaccagtgagagtatgagtgagcaggcccggcctcggctgtggccatgggctgggtggcaggggagaaagacccagaggctggtcggacagggctgtggtcggtgcatgcagaggctggtgggaggaatccagagagacatctggtttcccatctggaggacggggtacaagataggtgagcagaacrgtgtggggcacaggagcacctccatgcagccttctactagacagggaacagcaggcctgacctctggtgggagggcccttatccaacacgaggcagcccctcccttcccctccaccaccttcccagatctccacccagggaagagtccggcaatgatcagggaggtgaacttgggccttttgaaggcaagaaggaagctcttgtaagtgaccactgctggggtcctcccagggggacagtccaggaagggggacaggaccttcttagactgtccgcctgtggcaagcccagcagtggtcatctcaaggtgatctgcttaaatgatcacaggagatatgtctgagagttgtcatcagggtgtttgaaaccaaagcgggaaa

SEQ ID NO: 688987 - DNA, 636 bp, Homo sapiens
tctagatcctagttttcttaagaaagagcccttgaaaactgcttctcctgtgaaacgattaccgtgggtctagcagttatgtatcccagtgttcctttcctaaactcccatgtggaaatttagtgtcaaacagggaatttaggggcaaaaaagctgaaactccctgagaagctcttcctgactaagaatgagagcttggcaattcatctcgtttcccttttcacctcagcatccaggaggctcagagccacatgtgatagaaaaatygtagttctttatttcttctttgttgcaataggtaagatgcctttggttacaaaatatgagagtgcccaactgaaatgagtgcagacaataaggacaattcattattttgcaaacaagaaactggtattagtggacccagggttgttaattcagcagctcagtgatgctgggactcaaggtagcttttctatactttacctgcctttctcctattcttatatgactgccacagatgggaggatcatatcctctcaagacagcctccagggaagaagcgcaggagcgactttccatctcttgaatgtcttcatctccctggggaggaagcacctaaccctccagtccacttcctctcaggccccacctacc

SEQ ID NO: 688988 - DNA, 590 bp, Homo sapiens
acaacacaaatcagcctaagcagcggtgactctgactttccccaccttccctgtccccacgcccggcagcgcaaggatggcgttgcactgtccacaagcccagcagtggggtgtgcctttttcctgtgtgaagacaccccttggctccagggtgggtttcgggtttgtggcctaagtgttcttcccgagtgagagtgaattgggagctggggctccctccctagtcccggcaaagagagcagagcagaagacaggatgggagtggggtcctcgcggcgacaagcagaggagaagagctggcaggttatccctctctacaaaagtctggttttgagaagctgagygcagaaatacatcatgggaaaataggcattgcgggggacctgctgggctgtggtgtacacgaagtggccgggctgggtggggctgaggaattgcagctgaagtcctcgccctttagctgctctctttcctcaagagcacagaaggcacaaacaccattgcttctgcaccccctgccctgtccctctccaaagctgcccctcccttggtgccctggtccccagggaatcctgccctctgcagggtca

SEQ ID NO: 688989 - DNA, 654 bp, Homo sapiens
taaataagaaaatacaaattacacagagtgtcagtggcccttcttattatacagaaaaggatagtgggtaaaccaggagcactgaacagtgtggagagatcagtcaaaggaaagacgtagagaggggatcaccaaactctgtctacctacacctgactgacctccaaatgacacgtgcgaagccgactccaaacatcccagctgaagacaaaagatttgaaaagaggatggagctgctgcatwagaaacgaaactgcagttcaaacccagcctccccacaaaaaaaaagtacctttaataacacaggaaacaatattcatcagtgtaaaacagaacaaaaatctttacaatttaacactattaatatgcactacaaaatccaaaattacccaacatacaaagaacgaaaaaatggaacacattctgaagaaaaaacaaaatcaatcaaatctgtctgatgccaagatgaacctgatgctgaaaataataaagatttaaagtggatattacagctatttgctcttaagaaaaaaaagttttcaatacagtcacactccacataacattttggtcaatgacagatacatatatgactgtggtcctctaagattaaaatactgtatttttactgtatcttttctatgtttacatatt

SEQ ID NO: 688990 - DNA, 692 bp, Homo sapiens
tagtaactgaacacactttttattctggcagggagtttcctattagtagttgggctagttgccacttttttggggataatwtccccttattaatagcaacttatgagaaatagcagcttctgagagatgaataaaaatcagcggatctgtcactgtgtcaggattaacatttttgtctttatactttattttatttagtgtatagtaaaaaataattttatctttacattatatgtctatttacacacacacaaatcctcctttttaactgacaaataattacacatatatatgaggtacatgtgatattttgatacgtgtatacaatatgtaatgatgaaatcagggtaattatatctgtcacctcaaacatttaccatctttgtgttgagaacattcaaaactctcatctagctattttgaaatatacaataaattattgttaattataatcaccctagtgttttattgaacactagaacttattcctcctaactgtaatttaattcccattaatcaacctctcccactgtcccttaacgttcacccttcccagcctctagtaattactatgctgctcttctatgagacaacttttttatctctcacatatgagagagaatatgcagtatttgtctttctgtggttggattatgtcacttaatgtaatgtccttcaggcttatccatgtt

SEQ ID NO: 688991 - DNA, 398 bp, Homo sapiens
cctttaaagtttaacactactctctcaaagaatcaaaaayaagaagtaatttccatttttaagtaaaaaattttaagttagagaaaagtgatttcttgatgaaaaatgtttacatagaaggagtgacttaggaattttcattggctgcttacattgcacatgagaaacacctctcatgattcacacagcacatttctctaccatttaatttcatgacatccggtctccaaggtgctgtgaaattgaagtaaatacaaatcacttgcttttgagaacacgactccttgatacagcttggaatgctataaagccagaagtagaaatcactggaattattaataagaactttgttaggtccaaaactcaatattttgaactagttgacattagaaaatcag

SEQ ID NO: 688992 - DNA, 398 bp, Homo sapiens
cctttaaagtttaacactactctctcaaagaatcaaaaataagaagtaatttccatttttaagtaaaaaattttaagttagagaaaagtgatttcttgatgaaaaatgtttacatagaaggagtgacttaggaattttcattggctgcttacattgcacatgagaaacacctctcatgattcacacagcacatttctctaccatttaatttcatgacatccggtctccaaggtgctgtgaaatkgaagtaaatacaaatcacttgcttttgagaacacgactccttgatacagcttggaatgctataaagccagaagtagaaatcactggaattattaataagaactttgttaggtccaaaactcaatattttgaactagttgacattagaaaatcag

SEQ ID NO: 688993 - DNA, 574 bp, Homo sapiens
attgcagagatgtttctactgttgcctcattaatactctcttcttaaggaagctaccccacatgcagcttctgtttggcctgactggtcttttaaataatagttaatcagtgaacaataggcacctgacctgagggcaaccaatatatagactaagcaatatttatgaactgcatagtttaattcaaatatgtgctttgagataaacagactgtttcacagagaaataaatcatcggttaacaatgagaattaaattgaagtcatgatatggatgggcctasagagattaggatgggtcatacacaggctgaaattacaggggaatagaagaggccagtggaaagtagtgtaaggtacattcagagacagaatagggcatagtacccactaagtgcctactattgtcctactgaggacttgggtaaaagctgaggttaaatcccagctttaccactaattagctgagggaacttaggtaagttgcttaaattctcaaaagctgtttctcatttataaatgtggataatagaacataatagaatataaatcacaggaattgtgaatattgcatga

SEQ ID NO: 688994 - DNA, 591 bp, Homo sapiens
tattaatatcaggtcctattccccagaacctgtaaatattaccttttatagaaaaaaaggtcttttcagatacaattaggttaaggatcttgaratgaggcgattaccctgcattatctcagtgggccctaagaactcacaagtatccttatagagggaggtgggagatttggcgcagagaagaaggtaataacgttaccatggagatagagattggaatgaggtggccacaaatcaaagaatgctgcagtcaccagaagctgaagggagcaaggaacagattccccaatagcacctctagagggagcacagccctgttgatgccttggtttggagctagtgaaactgatttgggatttttggcttccagggctgtgagataatacatttctgttgtttaaaaaccaccgtgtgtggtaatttgttatagcagccataggaaactaatatacacataacggagttaaaaaatcctgttactgtgaccagtgtgaacctgaacaaaatcactgggagcatttcccttaggctgggataactgatggatatgttacatttatatgtatgtatttatcatcatcatcatcctca

SEQ ID NO: 688995 - DNA, 849 bp, Homo sapiens
gagtctaggtcaggccaggcacagtggcttatgcctttgggagtccaaagcaggaggatcacttgggcccaggggattgagaccagcctggacagcatagtgagaccttgtctctacaaaaactttcaaagtagctgagcatgatggtgcattcctgtagtcccagctccttgggaagctgaggtgggaggatcacttgagctccagaggtcgaggctacggtgagctgtaatygcaccaccgcacttcatcctaggtgacagaaggagatcctatctcaaaaaaggaaaagaaaaaaaaaagaaaaagaaaaaaaggaggaggggatgcattttggtggttgaaccaatgtattatagtatgtgtctcattctcttaagctccgtcagcagcagctgcagtaaaaacaactttatttgatctatgaccctgggtggtggaagttaaggaggagggaagcaattagtttcctggagtcccaaccttagtcccaagaggtctcttttacatacatggagagccagtagctgaatgggacaaaaaagaacccaggaagtaagtgaaaggtctttagacaaaatgggtatggggtttctttttggggtgaagaaaatgttctggaattattggtgacagttgcacaaaactgtaaatgtactgaaagatactgagttgtacacttcaaaatggttaaaatagtgaatgttatgtgaattctacccgcccccccaaaataaaaagaagacattcaaaatctcaaaggattcatcactggcagacttgcagtataagaaatgttttttgtttcttttttcagggggagggtcttgctctgtctctgaggctgga

SEQ ID NO: 688996 - DNA, 878 bp, Homo sapiens
aacactatcctgaattatgtgcctgtctagataagcagagaccatgccaaagctataatggaaaacaagtttacaaagaggtgagaactaaatcacatttggtacaataagcaattctgttactttcttttcacaattaaagtccctacaaaaaattaaaatgcatggagtaccatgggaatcatgatataaaaatctcagaaatttcccaaattaaaaaaatccttatttaaagataaaagcagatagacttcatttcttctatgagtctggcatcatttaagcccaatattaataggtcaaagaaacattctactgcaatgggaggcaaagtacaaactaacataaaagtttattttatcctctctttggtcatcttaatcattattctcttttattttttcctactttaacataagttctagaaaacaatattttcactacaattttcaatgttttttgttttctaatcaaatttccttttctcargaaatgaggtttcttctttcccaaaatttaaagaaaggactccaagtccttcccaaatacatttaagggtttaggttctctatgttactgacagctaccaatttacctagttattgctgcaattgagaagttaccttgaacatttaatgtcaattgaaaaagataggttaatcttttatgtgttgtagatgtcatatttatgtgacttgtgaatgtcaatacatggatgtcctagttcttcttattgatcagttcatcaaatacttactgaccacctcctatgcgccaagctttctaccagtcaccgggaattcattcctgaacagagcacaatgtctgcgctcatggagctgatgctcaagtaaggaagagagaaagatagttaggca

SEQ ID NO: 688997 - DNA, 878 bp, Homo sapiens
aacactatcctgaattatgtgcctgtctagataagcagagaccatgccaaagctataatggaaaacaagtttacaaagaggtgagaactaaatcacatttggtacaataagcaattctgttactttcttttcacaattaaagtccctacaaaaaattaaaatgcatggagtaccatgggaatcatgatataaaaatctcagaaatttcccaaattaaaaaaatccttatttaaagataaaagcagatagacttcatttcttctatgagtctggcatcatttaagcccaatattaataggtcaaagaaacattctactgcaatgggaggcaaagtacaaactaacataaaagtttattttatcctctctttggtcatcttaatcattattctcttttattttttcctactttaacataagttctagaaaacaatattttcactacaattttcaatgttttttgttttctaatcaaatttccttttctcaagaaatgaggtttcttctttcccaaaatttaaagaaaggactccaagtccttcccaaatacatttaagggtttaggttctctatgttactgacagctaccaatttacctagttattgytgcaattgagaagttaccttgaacatttaatgtcaattgaaaaagataggttaatcttttatgtgttgtagatgtcatatttatgtgacttgtgaatgtcaatacatggatgtcctagttcttcttattgatcagttcatcaaatacttactgaccacctcctatgcgccaagctttctaccagtcaccgggaattcattcctgaacagagcacaatgtctgcgctcatggagctgatgctcaagtaaggaagagagaaagatagttaggca

SEQ ID NO: 688998 - DNA, 878 bp, Homo sapiens
aacactatcctgaattatgtgcctgtctagataagcagagaccatgccaaagctataatggaaaacaagtttacaaagaggtgagaactaaatcacatttggtacaataagcaattctgttactttcttttcacaattaaagtccctacaaaaaattaaaatgcatggagtaccatgggaatcatgatataaaaatctcagaaatttcccaaattaaaaaaatccttatttaaagataaaagcagatagacttcatttcttctatgagtctggcatcatttaagcccaatattaataggtcaaagaaacattctactgcaatgggaggcaaagtacaaactaacataaaagtttattttatcctctctttggtcatcttaatcattattctcttttattttttcctactttaacataagttctagaaaacaatattttcactacaattttcaatgttttttgttttctaatcaaatttccttttctcaagaaatgaggtttcttctttcccaaaatttaaagaaaggactccaagtccttcccaaatacatttaagggtttaggttctctatgttactgacagctaccaatttacctagttattgctgcaattgagaagttaccttgaacatttaatgtcaattgaaaaagataggttaatcttttatgtgttgtagatgtcatatttatgtgacttgtgaatgtcaatacatggatgtcctagttcttcttattgatcagttcatcaaatacttactgaccacctcctatgcgccaagctttctaccagtcaccgggaattcattcctgaacagagcacaatgtctgcrctcatggagctgatgctcaagtaaggaagagagaaagatagttaggca

SEQ ID NO: 688999 - DNA, 650 bp, Homo sapiens
ttctcccccttccctttttttttcttctcttcgtctctccctttcttcccctttctgtcccttttcccctcctttcctttttttaatccaatgactaggttagcaattatgctgaaggttggtctataggggcctgtaggtttccttccagatagaaaattctgagactctacaaacagatccacagtaaggtgttctcccttgccaggtagcaattttatctgtggtattgttgcttcccatactttaaatcttgtttatctgacagagactatgcctttgtgaagtggaagcatgctctgagatttccattcaggtcttctgtctctatcttgctgtacttgtatgaattgtgtgatctgagttactctgtcaagtttagatcgtgamtatagaggcaaaaatagcaattattaacagtgatgataaacatttggatgtagtgcttttcatttctaaatggctttgaagagaccaaatacatctgttagtattagtcattctgcctgtgggattccttatcttgggtcagagggttttgcttggactctgttctagctgtgtagaaagactcattttggtagctattgaatttttccccctatgaggcatattctaaacttttagtcatttctcatgggttacatatg

SEQ ID NO: 689000 - DNA, 1211 bp, Homo sapiens
tgcccagccgaaaaacatcgtttcttagttgagttataattaatattgagagcattaaatttatgtagaaaaatcatttttccttaaatcctcaaagataacaaacaagcataaaaatcatttatagatttagtatttttctgttaaaatcatttactcttctttgtttttgggtcagtgttcaattggtttatacctttgatagttgaaatttacttactgaatactgatatcatttgtgggtcctggtaaatatttcaaagttgtcgtacaaacaggacaatagattctctcaactcttcaaacgtctaacatgacagacttataagtcttttttcttcttytttttttttttttttttttttttgtagagatggggtctcgctatgttgccaaggatgatcttgagctgctgggctcaagggatcctctcaccttgaccttggcctcccaaagtgctgggattataggcatgagccaccacgcctagcctcttgcaaagtcttataatgtcgtttttaaactcttaagctgccaagtgtgggtggctcatgcctgtaatcccaacattttgggaggctgaggtgggaggatcacctgagcccaggagttcaagaccagactgggcaacatggcaagaacctgtctttacaaaaaattaaaaaataaattagctgggcatggtggtacacacccacagtcacatctacttgggagggtgaggtaggaggattgcttcggcctaaaatgttggctgggcatggtggctcacgcctgtaatcccagcactttgggaggccaaggtgggtgagtcatgagatcaggagttcgagaccagcctggccaacatggtgaaaccccgtgtctactaaaaatacaaaaaaattagccaggcatggtggcaggtgcctgtaatcctagctactcgggagggtggggcaggagaattgcttgaaccgggaggcagaggttgcagtgagccaagatcacgccactgcactccagcctgggcgacagagagagactccatctcaaaaaaaaaaaaaaaaaaaaaaaaaaaagtcaaggctgcagaaaactatggtcactccactgcaactacatcctgggcagcagagtgacctttaataaaataaaaacacccttgagctactctcgtaaacccagtaagacttacacatttaataaatcagattgtcttaagccttttg

SEQ ID NO: 689001 - DNA, 642 bp, Homo sapiens
cagctggtaaactaagcagccagcttttgagcccacggccaccacttccacaccccatgctccctatgaggcccsacatgtccaaagctgccgatgcctgaccaccaccccccgtccccctaatggcgccgggtgctacgccaagtggctaaggtcacccaaggctggaaagtccctgccggtccagagggaaagcagagggaagaaaaggaagctggactcactcggagggcccagcgccagttcccagtcagcatcgtcacagccgaccccagcacgtagcccagaccactgcaacaaaggggcaggggcgatgggctgtgaggggagggaggcggaaggcagaccccaccaccagcctgacccagggtgccccccccacgccccagggagctggctctctgcaggctcagacctgtttcactgaggaaagtaagccacgtgaggcccagatgtccactgccctcggtcaggtcaccagtgacctctggctcctggcccacccccagcgccactctctccacctatggaaacacataccctacaccctcctgcccaaggctgggccctgcttgagtcaggcaagttcaggaaacctgggtcagaggccagggtcctgattgcaaatcctgctctggccta

SEQ ID NO: 689002 - DNA, 642 bp, Homo sapiens
cagctggtaaactaagcagccagcttttgagcccacggccaccacttccacaccccatgctccctatgaggccccacatgtccaaagctgccgatgcctgaccaccaccccccgyccccctaatggcgccgggtgctacgccaagtggctaaggtcacccaaggctggaaagtccctgccggtccagagggaaagcagagggaagaaaaggaagctggactcactcggagggcccagcgccagttcccagtcagcatcgtcacagccgaccccagcacgtagcccagaccactgcaacaaaggggcaggggcgatgggctgtgaggggagggaggcggaaggcagaccccaccaccagcctgacccagggtgccccccccacgccccagggagctggctctctgcaggctcagacctgtttcactgaggaaagtaagccacgtgaggcccagatgtccactgccctcggtcaggtcaccagtgacctctggctcctggcccacccccagcgccactctctccacctatggaaacacataccctacaccctcctgcccaaggctgggccctgcttgagtcaggcaagttcaggaaacctgggtcagaggccagggtcctgattgcaaatcctgctctggccta

SEQ ID NO: 689003 - DNA, 642 bp, Homo sapiens
cagctggtaaactaagcagccagcttttgagcccacggccaccacttccacaccccatgctccctatgaggccccacatgtccaaagctgccgatgcctgaccaccaccccccgtccccctaatggcgccgggtgctacgccaagtggctaaggtcacccaaggctggaaagtccctgccggtccagagggaaagcagagggaagaaaaggaagctggactcactcggagggcccagcgccagttcccagtcagcatcgtcacagccgaccccagcacgtagcccagaccactgcaacaraggggcaggggcgatgggctgtgaggggagggaggcggaaggcagaccccaccaccagcctgacccagggtgccccccccacgccccagggagctggctctctgcaggctcagacctgtttcactgaggaaagtaagccacgtgaggcccagatgtccactgccctcggtcaggtcaccagtgacctctggctcctggcccacccccagcgccactctctccacctatggaaacacataccctacaccctcctgcccaaggctgggccctgcttgagtcaggcaagttcaggaaacctgggtcagaggccagggtcctgattgcaaatcctgctctggccta

SEQ ID NO: 689004 - DNA, 602 bp, Homo sapiens
ctatacatattgatacatattgttaactatacatattgatacatattgttaactatatrgatgtttccaacagaaatgatacatattgttaacaaatagctataaggaggctattgaatgttcccaacacagaaatgatacatattgtttgttgttgttgttgttgtttttgagacacccacacccagctaatttgtgtatttttagcagagatggggtttcaccatgttggccaggatggtctcgatctcttgaccttgtgatccacctgccttggcctcccaaaggattacagacttgagccaccatgcctggccacatattgttaactatatatcatttctgtgttaggaacattcaatagccgccttatagctatttgaaactatatgatacattattgttaactatagtcattctacagtgatttagaacactatctatttatacttttttttgtttttttttagtgacaggttctcactttgctgcccaggctggagtgcagtggtgcaatcatactcactgtcacctcaacctcctggactcaagcaatcctcccacctctgccccctgcatagctaggactacaggagtgtgcc

SEQ ID NO: 689005 - DNA, 1693 bp, Homo sapiens
ccccacttcgtggcaatattgcagactttatttctccccagtcaaataaagtgagttttcttctgggcaacctctttattcacctttagtgcactccatggtacatgtcagcagctgggttgtgtctggtgttgaaaatgtcagaaaatcttaggagctatatgggtgactgctgattcagtattacttagcatttaagaatgcctagttcctgctagtattcatctgatcacaaactataatcatcatcctatttatacaatagtaagtttgagaagttttctgaaggtgttaaaattaattatatggttatttgagtctatctttgggatgctatttaatataatactatttagtggtaaatatccatttgtattttcttattatataaatatgatattgaaaatgccaccagctctattatgccactaactctattaaaccttaaattttcttttaacataaatgcttagaaaagttcttttttcttctcttactaagagatctagatcctctctgaaaattggtacaatcaccagtacttaaggctgagagcacagagttttctgctgtgtttaggtgttagtgacattgaacataataaaaaaaaaaccacatctctgaactcaatttcaacaggtataatactttattttcagcttcaagtaattcttaggattcaaattgcagggttttagaaaaagaatatcctaatgaaattatgacatatgcaatatagaaacttaccaaacatttttctaaatgaaagtgcttggtgctgcagatgatgaggtagttatagatcttgggacagaaatatatcccaagtggccatctaatctcctacctcctcatgggcagaacctaattaaaagcatcaggcaaagtagttaatgtacttcttggagattaaggtcaagacaggagttctacatcttcttctgccacactttacaaattataccaaatacttttgcggatggtcttgtatcccaacaagccaaatgcatgtactacatgcatttctgtatttcgttttgatttttaggcaaagtttcaataatggcatggagagtttttgytcacttttctgcttcagtgtgactattatttgaatcaccatgttttgtggatagagatgaaatattatatatgtaagtacaactaaaaatcttaagtttttcttagaaattattttgctctgaattttcacattgttatttcattttaaattttattattaatcacttattagttatttataaataacagaactattttctttattatctcaaccttcattctatcttttcttatttctttattaactgttgttattaacaattagtcaagtctgattcttgatggaatttcatttttttttacttcaaggtttagagggtttatttctaaaacacataatagctggacaacacttaaccattttgtcaaagggaattatatgcttaatacattcaagaatttcattcttaaaaaacgttttaaattatgatcatgttatatttatattttctcagttttctagaattataatgaataatttattaatattttccattttactatccatataattaatttctgaattttttatgactgttttgtatcatttctaagaatgccaaaacctagaaagaacactttaagaaattaattttctgaagccagaaag

SEQ ID NO: 689006 - DNA, 1693 bp, Homo sapiens
ccccacttcgtggcaatattgcagactttatttctccccagtcaaataaagtgagttttcttctgggcaacctctttattcacctttagtgcactccatggtacatgtcagcagctgggttgtgtctggtgttgaaaatgtcagaaaatcttaggagctatatgggtgactgctgattcagtattacttagcatttaagaatgcctagttcctgctagtattcatctgatcacaaactataatcatcatcctatttatacaatagtaagtttgagaagttttctgaaggtgttaaaattaattatatggttatttgagtctatctttgggatgctatttaatataatactatttagtggtaaatatccatttgtattttcttattatataaatatgatattgaaaatgccaccagctctattatgccactaactctattaaaccttaaattttcttttaacataaatgcttagaaaagttcttttttcttctcttactaagagatctagatcctctctgaaaattggtacaatcaccagtacttaaggctgagagcacagagttttctgctgtgtttaggtgttagtgacattgaacataataaaaaaaaaaccacatctctgaactcaatttcaacaggtataatactttattttcagcttcaagtaattcttaggattcaaattgcagggttttagaaaaagaatatcctaatgaaattatgacatatgcaatatagaaacttaccaaacatttttctaaatgaaagtgcttggtgctgcagatgatgaggtagttatagatcttgggacagaaatatatcccaagtggccatctaatctcctacctcctcatgggcagaacctaattaaaagcatcaggcaaagtagttaatgtacttcttggagattaaggtcaagacaggagttctacatcttcttctgccacactttacaaattataccaaatacttttgcggatggtcttgtatcccaacaagccaaatgcatgtactacatgcatttctgtatttcgttttgatttttaggcaaagtttcaataatggcatggagagtttttgctcacttttctgcttcagtgtgactattatttgaatcaccatgttttgtggatagagatgaaatattatatatgtaagtacaactaaaaatcttaagtttttcttagaaattattttgctctgaattttcacattgttatttcattttaaattttattattaatcacttattagttatttataaataacagaactattttctttattatctcaaccttcattctatcttttcttatttctttattaactrttgttattaacaattagtcaagtctgattcttgatggaatttcatttttttttacttcaaggtttagagggtttatttctaaaacacataatagctggacaacacttaaccattttgtcaaagggaattatatgcttaatacattcaagaatttcattcttaaaaaacgttttaaattatgatcatgttatatttatattttctcagttttctagaattataatgaataatttattaatattttccattttactatccatataattaatttctgaattttttatgactgttttgtatcatttctaagaatgccaaaacctagaaagaacactttaagaaattaattttctgaagccagaaag

SEQ ID NO: 689007 - DNA, 2524 bp, Homo sapiens
aaatttctgtaaggctggtagtaaagcctctgtttcattcctgattttagtaatttgagtctctttttttcttggtttagctaaaagtttatgaattttaatctttttaaaggaccaacttttggtttcattggttttctttactgtcttcctattctctatttcattaattttaactcttgtcctattacttttaggagggcctcttaaggaggggtcgtatgctgacttaaattgagggttggtcaaagttcaaaagcctgggggaaggaagcttaatattttctctagatcagtaagtacaagcaattcagctaagaatttgcttcatttatgaagcaaagaatggtaattttcaggacagtctgtgtctgattttgttataagtaaatgggggaagggagataaacatctgtgagtcttatctaagtcacccggggaaggatggttctttataataagccatttcctggaacacgcaggcgatgggcaggggggttactacaaccttatagaaataaaatttctttaactctgcctatatttcagggtatagtcctcaggtaaagcttcacattgtcaagaagaacttgaaaataccttttttccataaaaacacaatgaaactaatactatgtaacggaatattccaaagcactagttcttataaataactattggccaaaatacaaataactgacccaattcaaaattctctaagatttcattaagatccttttgtagttcataagcctgatgcatgggtgttcacrcgcatgtgtgagatgtgcctccctcaaaccttgttatggcgccagcccattaccggtctgtcatgaaaaaaaaaatatttcagtaaaagaggatacttctagtatcctttttaaaatttgaattggaagcaaatagtatttcatcccagcatgttaaaattgcaagggtcacctaccccagcttaccatttgctaaacacgcatcagtcaccagtggaacacacatttccaatgctaaaggtcttgactgcttggtgaaaaccactttgcaacactggtgttggaaattactttcttatattaagctgaaatctacctcattggaacctctgctcataagtcctgagtctcatgtagttcagaccttgtctcttctgccccatctggctacttatctccagtttctcctgccagtcttccggtggcatagccccaaaccctttcatttcatagtttgtcactgccctttttaagaggactggggtgctcagaacttattggctgaccctagctcttcctttggcctggtcactatatttgaaaagtgctacctgaaatcataagagcttttttgttttgtttttaacagccattttctattgttgattcattttagttttggttacaactgaaatatctgtctttcacatgaaatatagcttctcatttgcctttcttcacaaagtctgttctaactacacatttccttggcttcagcctcatgcttgatgcagaagtgaggagagtgcaataaaaatttgaacagttgcttggatttttgcaataatagattgtcagttggggtcatatgactctcaggtgctagaaaatactctgcctttcagaacgtaaccgtgggcacactgaatgcaactgtataaaaatgaatgtgaatttttaaaggcagcataattaaagtttgtacattttaacagtttatgtaaatctgtctcatagaatacatgtaattttctctgaggtggatgttgtgatacttgatcaatatttgtcacctacagtaaatgtaccattggtcttggaggtatttctgtgtgtgtttttagcccattctcatatatttcactcctcatcttccgaatgatcctgtggtacagacatgaccttcagtttcaggtagagaagctgactcgtggtgactaaatgtcatactaccaataagtactggagcctgaaatcaaacctggactcaatttcaatacacaggttcctactcttcagtggtgcttctcaggttgataggaaaacctctcacctttagaaaattatacaaaaataaacattgtggccggatgcggtggctcacgcctgtaatcccagcactttgggaggccaaggcgggtggatcacttgaggtcacgaggagtttgagaccagcctggccaacatggtgaaaccccatgtctactaaaaaatacaaaaactagccaggtgtggtggcgggtgcctgtaatcccagatacttgggaaactgaggtaggagaatcacttgagccccggaggcaggggttgcagtgagctgagattgtgccactgcactccagcctgggcaacagagtgaaactccatcatcatctcaaaacaaaacaaaacaaaaaaaaattgtgtaggactcaggctagaacattgaaatatattcaaaacaacaccaataatgcatatcctctttatttggctttttaaaatcactgtttattccatttggtagagggttttatttttttccatacaaa

SEQ ID NO: 689008 - DNA, 650 bp, Homo sapiens
tcaatgagcatgtcagcactcaaaaagttttggattttagagcatttcagatttcagatctttggactggggatgctcaactagtattttctaaagtttctgcaatgaatgtgtatttatttaattgtttaatggtgccattagtatgatgaaaaatttatttttgtaatcttatttaatggtattttaataggaaacaaaaactataygcaacaatatatcagtattttccttatgtaactctgtataagaaagttgttttatctccactttacatgttattaatttcctgtagtaatattctactgctgtacttctttaaacttattaatcacctgtatttctattcatataaaggcagacaagccttttgttgttattttctgggagaggtgattacaagatattgaagataacgacccctatgcaaatattcaacggactaagcttaatttgtactactgtaatgtgatatcaattatgattttgtttgccgtgtggaagaacaggcagtatgctaaagctacagaaggtacctcttcatagttcatcctctcctaatgttgcattgattggaacagagaccacaagagaacaagggtagatcagcatgaaatgtccttctgctggtcaatcaggaacactatgct

SEQ ID NO: 689009 - DNA, 650 bp, Homo sapiens
tcaatgagcatgtcagcactcaaaaagttttggattttagagcatttcagatttcagatctttggactggggatgctcaactagtattttctaaagtttctgcaatgaatgtgtatttatttaattgtttaatggtgccattagtatgatgaaaaatttatttttgtaatcttatttaatggtattttaataggaaacaaaaactatacgcaacaatatatcrgtattttccttatgtaactctgtataagaaagttgttttatctccactttacatgttattaatttcctgtagtaatattctactgctgtacttctttaaacttattaatcacctgtatttctattcatataaaggcagacaagccttttgttgttattttctgggagaggtgattacaagatattgaagataacgacccctatgcaaatattcaacggactaagcttaatttgtactactgtaatgtgatatcaattatgattttgtttgccgtgtggaagaacaggcagtatgctaaagctacagaaggtacctcttcatagttcatcctctcctaatgttgcattgattggaacagagaccacaagagaacaagggtagatcagcatgaaatgtccttctgctggtcaatcaggaacactatgct

SEQ ID NO: 689010 - DNA, 642 bp, Homo sapiens
catcctaaatagcaagtacccgccaccaccaccactacgcacaaataccaatcttccagtgaaacaccacctgatcaacctcgagtgctgctgacaaattcagcaaccaaagcgaatgtcaggaatatgagctactagagttgagaagtttggtttacagaaatcaactcatttctctatctcactctggttaggaccagaggaactataatatgttgtaaggggaatgaaaaagtactgtgcttttctcactttctgaatcttcattttcatggggctttatcacttcctattatgtgtgcataatattctcacacattgcctgacaagcttggaygcaaacaaccagcaatgaggcagaatgatgtaccaatattaagcctaatgtggtgcctataccatttgagttttgagttatttctcccacagcagatcccctatacaaaaagaattgatacacgtatttccctttctttctgtaaattactcatatattcactacataattatttaaaccttgttgatggtaatcaatcactaaatgagctagaaagcaaggagtgtctttcatgattcattgtagtaattgtctctggaagttctatcaccatttatttgtcttagctggacttggtctataac

SEQ ID NO: 689011 - DNA, 1134 bp, Homo sapiens
ttttttttttttttttttttttttttttgagacaggttctcactctgtcacctagcctggagtagagtggcatggtctcagctgactgcatcctacgcctcctgggttcaagtgattctcctgcctcagcctcccgagtagctgggactacaggcgcacaccaccacgcctggctaatttttgtatttttagtaraaatggggtttcaccacgttggccaggctggtctcaaactcctgagttcaagtcatctgctcgccttagcctcccaaagtgttgggattacaggcgtgagccactgcacctggcccctttcaccttttaaatccggttactaacagccagccttgatgtcctccccagaaagaagcctcttccccatttctgccagaaatcagcagacaagtcaaggaaaagggaattaggccagaaatgaagactcttattcctttgtcaaataataacatatggccaagggccttattctctgaagctgtttaacagaaggtgtcaagagaggttttaaaaacacgaggcagttatgggaataggggaaatattgcatgacatttgaacattatttattgttcttctaaattgattcccctgcgatcttaccgggtcaagtggagtttgcctatgaattgtgaggaaaagttctgcctaaaacaaatgatctccagagagagacttacaggcaaagtgaaccatgcctaagaggatgttctaagggtaaaacttgggaacttcaagtacttgctgattcctaatgtcccatcaaggaaaatgtgggaggaaaaggtaaaaggagataaagcaccagtagccaggatgagtatattcaaggatttctgcttggagccaaatgccattaactagcaccttgtttccactgtaacatctgattccaaagaagatggacttgaagtttgtttttctcttggtcataacccttgaactgcatttaagcccacatgaagcctccgtgtttatgacggtgtctagcataagactaccagcttgggaaaacctttgtacatgattgctgatgttactgttgtacgttactaaggatgtggtgggcggggtgcttgaaatgagattaagttatagcaaagctaattttgttgcatc

SEQ ID NO: 689012 - DNA, 1134 bp, Homo sapiens
ttttttttttttttttttttttttttttgagacaggttctcactctgtcacctagcctggagtagagtggcatggtctcagctgactgcatcctacgcctcctgggttcaagtgattctcctgcctcagcctcccgagtagctgggactacaggcgcacaccaccacgcctggctaatttttgtatttttagtagaaatggggtttcaccacgttggccaggctggtctcaaactcctgagttcaagtcatctgctcgccttagcctcccaaagtgttgggattacaggcgtgagccactgcacctggcccctttcaccttttaaatccggttactaacagccagccttgatgtcctccccaraaagaagcctcttccccatttctgccagaaatcagcagacaagtcaaggaaaagggaattaggccagaaatgaagactcttattcctttgtcaaataataacatatggccaagggccttattctctgaagctgtttaacagaaggtgtcaagagaggttttaaaaacacgaggcagttatgggaataggggaaatattgcatgacatttgaacattatttattgttcttctaaattgattcccctgcgatcttaccgggtcaagtggagtttgcctatgaattgtgaggaaaagttctgcctaaaacaaatgatctccagagagagacttacaggcaaagtgaaccatgcctaagaggatgttctaagggtaaaacttgggaacttcaagtacttgctgattcctaatgtcccatcaaggaaaatgtgggaggaaaaggtaaaaggagataaagcaccagtagccaggatgagtatattcaaggatttctgcttggagccaaatgccattaactagcaccttgtttccactgtaacatctgattccaaagaagatggacttgaagtttgtttttctcttggtcataacccttgaactgcatttaagcccacatgaagcctccgtgtttatgacggtgtctagcataagactaccagcttgggaaaacctttgtacatgattgctgatgttactgttgtacgttactaaggatgtggtgggcggggtgcttgaaatgagattaagttatagcaaagctaattttgttgcatc

SEQ ID NO: 689013 - DNA, 645 bp, Homo sapiens
tgcacccagcctgggcgacagagcaagactctgcctcaaaaaaaaaaaaggaaaaaagggaacccccaacccccaaatgcatctctctgtagcctataaaatagatgccataaagttctgagctgccggtgaacccactgtctgctggaggtaacgactggaaatgacaaggctttcatatgtcctttccttaaarcaagaaggtctgacatctgcaaaagagagtcctaccaataaatatataaataaaaagaattctgttgtttttttctggtgccataaacccttcatggacactggaaacaatttttgacaatgtactaatttcacaggaatgagattatggaggatgtgtgattttccctccattttcccagaattgcgactcaagggtcatctctaagaacaaaaccaatggcagcccagaatctgcctcctaggatctgcagaggctgggcccagctgcctcaccacagggcttcatgagaagggccgggctcgtcaaagggccagcaaaatgttctccaccctcccacacaccctagtccacacgagaggggcctgaggagaggcacctttggaggaggggacatgatgcatttgtgaagttattttgcctcctcttttcacaactcaaaacccaag

SEQ ID NO: 689014 - DNA, 1952 bp, Homo sapiens
tctaaaggtcactgtaaatgaatatgtttggaacagttgataaggcagaatgcaggacggagattttttctctcatttaacaagttagcaatttcttcaatccgttaaattacctgatagcatgtttgctatgggttggagagctttaagtaatctgtgttgtgtgtagattcaaaacatgtttaagatccacgtgagtctaattttcaaaagtacatgaaaacagaaatctttgaatgagtaaaagaattttttcttgaaatcatgagtcctttcttcctcaataattctggaattaaatatcaaaaaacttctctggaaaaaaaagcactttactacatgcaatttctctgttacctaatataatctgagaatgtgattttctgataaatgaagttgactattaataggaatattaaaaacagatcagtctcctttgggaggccaaggcaggcagatcacgaagtcaggagatcgagaccatcctggctaacacggtgaaaccccgtctctaataaaaatacaaaaaattagccgggcgtggtggcagcgcctgtagccccagctactcgggaggctgaggcaggagaatggcatgaacccgggaggcggagcttgcagtgagcagagatcgcaccactgcactccagcctgcgtgacagagcgagactccgtctcaaaacaaaaacaaacaaacaaaacagatcagactcaaataaaagcctaacttaaaatatttttaaatgcaacattttatttaacactacaatgtaaacgctctgctgtatttccatattttataatatcacaatggctcagagccttcattatgaatgtcaacttttatggtatcaaagcaaaaagagccagttagcagaagttcacaattattgtacagtagattaaactaagtttactataggatgcatttctatatatggcaataattaagttaatagagcataaataagttgataaaaggaagtctgattatagcattattcctcaatacttccttagtttcgttttataaataatttaaaaattaccttcccaatgtttggggatgtcaggtatcagaccatacttgtaaacatacttgtaaaatgtcaggtatcagaccatacttgtaaacagttggttgtagcctggattatgaataatttgtttgcattttaatcagtttataagccaaagcaggtgatgttgaataagtttctcccttgattttttattaatgctactcgagatacagagacagtgcaaaaaataagaataaaaggccaaattaaaaaaaaaaacaacaaccctgttttgatattgttaatagtcaagtattccctgtgagctaatttgacagtaaaaacacgtggaaaggcattgrgaataaaacatacctgttccttgtacaaaaaggaacgacataagcttgaataactataataacaaaagttaggtggattgaagttatcattgatcagagaattattcaagattccattattctgagcctaacagtattgtagaaaatacatttctcacttgagaaatgaaccttgtgtctttaaaaatgatatcaggaacattaggcaaccaagaaaaacatgttgaaaatcatgaatatgttattttggtgattaatttttgatgatgctaaatattttattctgcatgttttggagacttttggtcttagaaaatagctgtttaccagtttgagtaattatcatagcgtgttggcagaggttagacactaagtaagcttaaggtttaatttatcttccacttaaaaaatggcacatgatcaatgtagacacactggaaataagagaaaaatttaaagggaataaaaatgactataactcctctttgtaagaatagtcactttagttctacactctaagaatgttcactttaaccctgtccagtattttttttgatgttcacatgca

SEQ ID NO: 689015 - DNA, 697 bp, Homo sapiens
tggggctgtttttccccattcctttccagctcttcttttctctttgtataaaagtatgtcaatgaattctattaagtttaagctattatgacagtaaattcttaaactttaaaaaaataatttctacttaatcttttataataatcatgttggaagataatttatttgtttgagttaaaacaattgaatgtaagaaaagagtctgttaaaaattgatagactgatagcctggattacgttttgctattcaagggtatttacacttcaggtttttacaatgcaacctaattttgcaaatatttattaacacaactatacaaaagtgtgatatgcatatcttcagataactgatgacatgattctgtctgcttaaagtatgagaaaaaatttcatgaagactttaaagrtattggtgaaattctacttttttcaaatctactagttattttggtcatcagaactctttgatcaagggaatgttctttaagctatattttcaaagattaaaagtcaaggaactccaaaactcagaagtcgggataggagttatttgtagtagtctatgtgaaacgtggacctatttcagaaaaggctctattacttggtcactaatgaaatagcagaaatgatggataaaaagaagaggaacaaatgtcttacaggtttaagcctaaagacagaaattaatctagtggat

SEQ ID NO: 689016 - DNA, 656 bp, Homo sapiens
agtttgctttttaaaaaatggaaggtatcttatagacatagtaatgctttgcacttatcccagttagaactagtaagtccccagacctcactcacctgtaattaccaaaaagatcgtggggcttcgaggtggggagaggagttgttttgtttttttgagacagggtcttgctctattgcccggctggygtgcagtggtataatcatagctcactgcactgcagccttgaactcctgggctcaagcaatcctccttttttcagcctcacgtgtagctgtgactacatgcgagccaccactcctggttcattttaaaaacaattttttatgtaaaaactgagtcttaccatgtggcccaggctggtctcaaactcctgggctcaagcaatcctcctgcctcagcctcccaaagtgctgggattacagctgtgagctactgtacccagcctgtgttttcttattatccaaataatcatgactttgaggcccaattccataactcaagaaagttattcttctccctgcttctccttcatgaacatgttggagaattctggagagatgctggatgtgccgcccacccatcccagtagtcactcatccctccagccaccctgactccaaggccggtgctgcaaagccctgcaaggaaattcc

SEQ ID NO: 689017 - DNA, 656 bp, Homo sapiens
agtttgctttttaaaaaatggaaggtatcttatagacatagtaatgctttgcacttatcccagttagaactagtaagtccccagacctcactcacctgtaattaccaaaaagatcgtggggcttcgaggtggggagaggagttgttttgtttttttgagacagggtcttgctctattgcccggctggtgtgcagtggtataatcatagctcactgcactgcagccttgaactcctgggctcaagcaatcctccttttttcagcctcacgtgtagctgtgactacatgygagccaccactcctggttcattttaaaaacaattttttatgtaaaaactgagtcttaccatgtggcccaggctggtctcaaactcctgggctcaagcaatcctcctgcctcagcctcccaaagtgctgggattacagctgtgagctactgtacccagcctgtgttttcttattatccaaataatcatgactttgaggcccaattccataactcaagaaagttattcttctccctgcttctccttcatgaacatgttggagaattctggagagatgctggatgtgccgcccacccatcccagtagtcactcatccctccagccaccctgactccaaggccggtgctgcaaagccctgcaaggaaattcc

SEQ ID NO: 689018 - DNA, 420 bp, Homo sapiens
gaattagactctatgttcttcatgactataaccatgaactccattgttcatggagccacccggaaaagcccaaatgcccaggaggaaagaatccgtggaaaaaattatggtgcagcatcggatggcatctacttgcaaccaggatggtgaagatttttaatggtttgtgaaaaagcaaaaatgtcatattcttatttttgtgaagaatgtgaatattttcatattgagaagtacagactagaagactaaacrttaaaatgtgattaatagttattggtaggtgctggagaaacaaatgatttgtatatttcttccctgtgattttcaggattttccaaaatgtttacaatgcacaggtgttacttttgcaatcaggtaaaatgctattaaagaataaggatgctgagggaaaaaaggact

SEQ ID NO: 689019 - DNA, 420 bp, Homo sapiens
gaattagactctatgttcttcatgactataaccatgaactccattgttcatggagccacccggaaaagcccaaatgcccaggaggaaagaatccgtggaaaaaattatggtgcagcatcggatggcatctacttgcaaccaggatggtgaagatttttaatggtttgtgaaaaagcaaaaatgtcatattcttatttttgtgaagaatgtgaatattttcatattgagaagtacagactagaagactaaacattaaaatgtgattaatagttattggtaggtgctggagaaacaaatgatttgtatatttcttccctgtgattttcaggattttccaaaatgyttacaatgcacaggtgttacttttgcaatcaggtaaaatgctattaaagaataaggatgctgagggaaaaaaggact

SEQ ID NO: 689020 - DNA, 1648 bp, Homo sapiens
tgttatccttacaaataatggctgacagaatttgctctatttttgagagcattgttaaaacaaaacaaacaaacaaaacaggagtcaattgatgttagctccttcttccctggcattttttatcctgggttccagtcttgtctaatggtaccaggaagtacctaattgctgaaaactatggaaccttcctgtttttctcttttttcaacatttccacatactaattcagtctggtctacctagtaattttatataattgtggatcatttcttacttaggaagatcattccttctatcatcatttcttgcatagagtgttgycttctaactagtccaagatgatggtttgaaagtgaaatattttcaaatccctgttctttgtggagctctttagtgtccttttggccttcctgtgaccctgatgttataatctaagcctgctggtggacagcacactaaacagttccctgatttaggaagtgtatctgcaaggccgagcctttttctgtgctgtcctttctacttggaactctcccatgtttgcctaattattgtctcctggtctttcaaaccagtcacacttggtcccttcatcttcctcaagcaaaatgtggtgatccctcctctatgctctaaaaaagtcggctccaagaaggaagaattatgccaaagaaaaagcctacaagaagacatatttccagagtttgaaggttggtttcaagtccttgactgctaagaatatccacttttgacacataataaagcaaaccagcctttatttctatcttcttctatttgcttatatatctcttacatgaaattaaaggacaaagacctcttcctgccttttaaactgtgttctggagcatctccaagttggttatgccatcttcctctcttaaaagggatttggggcataatctgaatagtgagacaaggcaacagcttacttcatgaagctgtgttaaggctccatctgcagagagtgagacgactctgtccaatggttcgaaaggaaaacgtcatgcttgacaacgtgtgaacaactaaagacagaatgttctctagttttaggaagaatcatttaatcaattccattagtattcccatgcgctgaaacatagtgtctacatttcccatatgggacacagagttaaaacccacagggatgaattcatttccagagatctgcaactttatcgttttgtctgttacaatacatgaaacaatcccagagattttcaacatcattaatatttgatgttccatgttcgatatacttcagttattcttaaccagaaaaagagtttaattttaccatgaaacatatatctacataagctaaaaataatacttagtgatgtttcatatttattatgagaaagctgttcaaaatgatgagaaagctgttcaaaatgatcagaaagaaattataaagatactaacacagtcaggttaataaaagtcacatatgtatagagaaagcataggcatattattaacttagattgcaaataaaaatatcaaagcaaaatggactgcagataatgatgttttatggatgaaaataggaatgcaattttaaaaggaatccaacaagtaaacagttgtagctgaattgataaactctgaaacaatgtgtttttac

SEQ ID NO: 689021 - DNA, 1648 bp, Homo sapiens
tgttatccttacaaataatggctgacagaatttgctctatttttgagagcattgttaaaacaaaacaaacaaacaaaacaggagtcaattgatgttagctccttcttccctggcattttttatcctgggttccagtcttgtctaatggtaccaggaagtacctaattgctgaaaactatggaaccttcctgtttttctcttttttcaacatttccacatactaattcagtctggtctacctagtaattttatataattgtggatcatttcttacttaggaagatcattccttctatcatcatttcttgcatagagtgttgtcttctaactagtccaagatgatggtttgaaagtgaaatattttcaaatccctgttctttgtggagctctttagtgtccttttggccttcctgtgaccctgatgttataatctaagcctgctggtggacagcacactaaacagttccctgatttaggaagtgtatctgcaaggccgagcctttttcygtgctgtcctttctacttggaactctcccatgtttgcctaattattgtctcctggtctttcaaaccagtcacacttggtcccttcatcttcctcaagcaaaatgtggtgatccctcctctatgctctaaaaaagtcggctccaagaaggaagaattatgccaaagaaaaagcctacaagaagacatatttccagagtttgaaggttggtttcaagtccttgactgctaagaatatccacttttgacacataataaagcaaaccagcctttatttctatcttcttctatttgcttatatatctcttacatgaaattaaaggacaaagacctcttcctgccttttaaactgtgttctggagcatctccaagttggttatgccatcttcctctcttaaaagggatttggggcataatctgaatagtgagacaaggcaacagcttacttcatgaagctgtgttaaggctccatctgcagagagtgagacgactctgtccaatggttcgaaaggaaaacgtcatgcttgacaacgtgtgaacaactaaagacagaatgttctctagttttaggaagaatcatttaatcaattccattagtattcccatgcgctgaaacatagtgtctacatttcccatatgggacacagagttaaaacccacagggatgaattcatttccagagatctgcaactttatcgttttgtctgttacaatacatgaaacaatcccagagattttcaacatcattaatatttgatgttccatgttcgatatacttcagttattcttaaccagaaaaagagtttaattttaccatgaaacatatatctacataagctaaaaataatacttagtgatgtttcatatttattatgagaaagctgttcaaaatgatgagaaagctgttcaaaatgatcagaaagaaattataaagatactaacacagtcaggttaataaaagtcacatatgtatagagaaagcataggcatattattaacttagattgcaaataaaaatatcaaagcaaaatggactgcagataatgatgttttatggatgaaaataggaatgcaattttaaaaggaatccaacaagtaaacagttgtagctgaattgataaactctgaaacaatgtgtttttac

SEQ ID NO: 689022 - DNA, 1319 bp, Homo sapiens
acttctgaatttttgacagttcccaagtgattcccaagaataggtaggtgtttatggaaataaatatttgtgaaattcaaaatgaagaagcaggtgtataagatgtataagaagcaggtgtataagatgtataagaaggcatctgagaaaagatgaggagacaagcaacacaacaaccttgggggactatttttatctcttatagctcttcacattataaaactctaggacattttatgaatatatgctcaaaagactctcatgttgaggaaatatgttttagaggtttaagatatattcaaatgcagattataaagattaaatcaagattccaatgatgattataaattacatgaaaatcatgggaaaagaataaatactcttcatataaactgaaaaccatagggaatatttataaaactagagctccctgagtagtgaattattcagtcattaaatggatgcaggtagagagagagagagagaaatagatacagagatatacaccgagatcttcctgcttaaggataaaacaacagaaaataggactcttagaatgagaaatgtttgtctgggtacatctgaaatataaacagtaataatagacaatcaaaaaacatcttgatgaccacagaatgactgtgacattagaataacagctaacaattattgaaattgtattttatactaagcctggtattaaggcctttttatttattgttttatgtaattctcataaaaacttctaagggaagtgctgttcttatcccagagttactgagggagaaagttatgtatcactttgagaagcaatgacacagtctcagagtcactagtcaagatctacactgagctagaagtgagtacttgctttagcgcaaaaatttttgttttcaagatggatcttgctctgtctcccaggctggagttcactgcaacctctgcctcctgggttcaagtgattctcctacctcacaccaccatgtctgcctgtttttgtatttttagtagagacagggtttcaccatgttggccaggctggtctcaaactccttacctcatgatctacccgcctcagcctcccaaagtgctgggattacaggcatgagccaccgggcccagcctagtgcaaaaattctaatcgctacactgctgcatacaatawgatctccataaatatgtgttgaatgatgtcacaatgttactataacctaatgctataaaatacagcaggtgtccttctaccaatatttcaaatagacattgacccacaattgtatttaatctattttgccgcaattaaatagttaagtaacaga

SEQ ID NO: 689023 - DNA, 1170 bp, Homo sapiens
ctcttctttgaggtggcatctttcatttgaatagtgtatcagggaaaattattatattcactgaaaatgtttaattcaagatgattaactcaagcacttaaagatctcgtttgcctcatgaatcagtcagggcccaacatagaaaacaaaaagcattctaagcatttaaatcaaaaaagttaatacagggaataagatgaataggggacagaagagccaagaagccacatagaagacagggagacatcctcgggattaggaaatgtaggaagctggtgtccagcctgggctggagggaggaggtgatgcttgtggtgtccagggtcagtgcaagtggctgaaaccaggatgggcttacattggaagctagagcctcagaggagctgcatttgagaggtgccactgaagtcagagaacaaggataataaataccctggcttctccttacttcccactctccaatctcactccagtgcctcccattgatggaataatccagctgaaaggaagccagytgacaggaaagcctgtgaaatgcggtctgcagaggtcaggtctcttgtatattgagaaggggagaggtgaggaatggaccttccttcatgcagtccagagaccagcatatttaagaattctcaatacaacataggacaggattctactcatttattgcacaatgtttctactacccctggattcctttagtgagtttatttcttgcttaaactgtaaaaacgttagagacccattctttggaatataagatatttaagattagggaggcatgcacttgagaacttaagaaagaagagtttagtactagactctacactcctttttattctaaaatctctcccagaaattttaaaatgtgtctagaaatgcattgttaattgggtcaattgagctactttggttaaagaataaaatcagcctagatttcagaactgaagaatcaggtcctctgtacaagctagtgattctaaaaattgactttacttaaattagaatccctcttctcttggcaacattaatgatacctgttatattttactaaagttggcaagtaagacaacactaagcctctcttctcaatttcaaattgtaaataatgagagacaggcaagataacaataccttaaatcagaattataccatggtagtttggta

SEQ ID NO: 689024 - DNA, 606 bp, Homo sapiens
agaccttaccttcccatgtggtcccagccctgctggaaagatacataggcagargtgacaaccgttctcttggtagtcacagggaacctgtctgatcccagcctgcctagaagaaagggacatacatccataatctgtgatggggtgagatgagacgtcttgaacctctggcacccacagcctccttgaccttgagcttccttggccttgaccaggcggtctcacctggcgctgcacagccaccccacggtgcgccatctgctgcctccttttatgtgcctgcaggccctttctcctttttgtctttgaattccttctcatctatcaggagaggacttgcctcctctaggaaactacttgccctgatccactgtctccctaccccataggtgcaccttaggttccctttctcagtgcccccataacactgggccctcttttattacccagcttctatattgttttcacgtttgctgtctccctgtgtaaaattcttttcctgtagctgtagccggtgttccctgaggtcagaaattgtgttttttcatctttgtcgctgcactgcctcctgtgtctgcctccagtagacgtcctcaataaaaatga

SEQ ID NO: 689025 - DNA, 626 bp, Homo sapiens
cagacccaagtttctcacattctgagcaagatcacatcacaggaggatgtggtggcaaaaaaacaaaaatgaaaacaaaacaatcaaacaaaaaaccagataaaaatgtggctcaagtatgatgatacagttgtatacaaatgaatcaagtaaattatattgcacaacgagtatcctgaaacctaattcagtwgttttgttcttgattatatatagcacataatggaaaaagcaaaaatatgttcagagagattcagaaatacacaatttcgcttccaggttgaagccttctgcccttattatgcaatgttaccttttctctaatgaaatctaaatgagtgaagaagaatctcaccaattgatttggccagagattttaaggtgcctcttaattgtttgtgtttgtccaaacccatgtctctgtttttggtggccccctggagactaggatgtggcatatcttggtagaactctgagataagtaaggtagaaaccaaaccttctagacgtaactgggaaggtaggatgttggatgtatattccagttcttctattttcaaggtgaagctgagtgtgtgtgtttatctgccactctctctgctgaaagccagggagattatatgggg

SEQ ID NO: 689026 - DNA, 646 bp, Homo sapiens
aacaatgaattatctcattgtttccccagtacatgctctctttgttgcattcatagaatcataaaaaaatatgagggggaaaggaattgtagacacacttggcaccaacaccctcagtttgcaaattaagaaagagccctttacacccaagcatcctcaagtcacacactcactctgatgggtagggactttgtcactcttcctgccctttcacccagtyttgtccatccccaagaaagggattctgtattagtcggctttcacactgctatgaagaaatacccaaggctgggtaatttataaaggaaagaggtttaattgactcacagttctgagtggctggggaggcctcaggaaacctacaatcatggcagaaggcaaaggagaagcaagtacctttttcacgcggtggcaggaaagagagagagcgaaggaggaactgcaaaacacttataaaaccatcagatctcacgagaactcactcactatcgtaagaacagcatgggggaaccaccccatgatccaatcacctcccaccgggtctctccctcagcacgtggggattatggggattacaattcaagttgagatttgggtggggacacagagccaaaccatattagattttgtctgtaaacaagttaaa

SEQ ID NO: 689027 - DNA, 646 bp, Homo sapiens
aacaatgaattatctcattgtttccccagtacatgctctctttgttgcattcatagaatcataaaaaaatatgagggggaaaggaattgtagacacacttggcaccaacaccctcagtttgcaaattaagaaagagccctttacacccaagcatcctcaagtcacacactcactctgatgggtagggactttgtcactcttcctgccctttcacccagtcttgtccatccccaagaaagggattctgtattagtcggctttcacactgctatgaagaaatacccaaggctgggtaatttataaaggaaagaggtttaattgactcacagttctgagtggctggggaggcctcaggaaacctacaatcatggcagaaggcaaaggagaagcaagtacctttttcacgcggtggcaggaaagagagagagcgaaggaggaactgcaaaacacttataaaaccatcagatctcacgagaactcactcacyatcgtaagaacagcatgggggaaccaccccatgatccaatcacctcccaccgggtctctccctcagcacgtggggattatggggattacaattcaagttgagatttgggtggggacacagagccaaaccatattagattttgtctgtaaacaagttaaa

SEQ ID NO: 689028 - DNA, 815 bp, Homo sapiens
tacattccaaaggctcaacatcatatggaaaattttttatgaccatactatgtagtaaaatcagaaattaataacaaaggaacaaaaaaagtaaaaaataagtttgcaaaataaatattaaataaccattacagaagaaatcttaagagaaattataattttaagtacatttttaacgaaacaagaaagactgaaaacaagcaagttaaacagtcaacacaagaatctgcaaagagcaagtaacaaattgaaacacaaaaaagggaaacaatgatgagggcagggatcaatgtgaaaaacattcatgaaggaggaggaaaagaaggaagaagatgaggaggagagaaggagggagaaggaagattaacaagctagttcttgggaaagattcctaaattatacatagttcaagaaaatctgaaaaagataaaaaggtagaagttgcaagttaaattaaaaaacagaaataactacaaactgatttttaaatgagaaaagaatatcaaatcttcttgaaaatattaagcatcaaaattgtttgagataaaatagaaatcttggataaaacaataatcataaaaaacagaaccrgaaataataatttttaaatctcttccaaaaacggaaaatattaggcccagatcattttgccagtgagttttactttcaacaaacagatcattcctattttatatgttattaaagcacacagaacaagaggataagctgcccagcatatgtgataagaacactggtaccttaactccaaaacctaataaggacaatgaaagaaaatctcacttatcaacatagat

SEQ ID NO: 689029 - DNA, 646 bp, Homo sapiens
ggtgagatgacagttaaggataagtggacttcgtacacaatgagacaaatggagtagaaccacattctatgtggacctaattttatggagaaaactgtacctttcaaatggttctgactgggagtgctgctatgaaaagcccagcgtgttcagcccagagctccctactttttatggaattccaactctgacacaacactcatagcttagatttagtcagaatcaacttaccaagcctcaaaatgttccacagaagcttttgtttttattaatctattaagactttacaaagtttccttctctttggttagaaatgaaaaaagtgggttaatctcatgtcttgtttcaaccgggaagccatgacttaaggagagcagcctatctgccacagatgataccaaaaattaaggatactcaaaaacactggtcccaaatcaatggcatgtccacagcctttgttccctgaagatctgcagctcataaacatccaggggaggccaggtctcctctctgtccttcctagttgcagatactgatacagcagaaggcaaagttagracatgtatggattagattgttctgatctcaggacaatctagttgccagaaagaattcaagacttaaagaatagcactctaacaaattc

SEQ ID NO: 689030 - DNA, 615 bp, Homo sapiens
tgcacgattccacccttaatccaaaggaaccataagtgaatcactagaacttattattatcttcttgggaagaggaaagkgtgctatctgagggttcaaaccattactgcaaacagagttgaagtgtgaactgcccgctaaatagggtaatatatgctagttactctaagaaaaacaccaagtctcagtggcttcacaccatagtcgtctatttcttgctcacctcatagttcagctttatgtcaggtgatccttctgagtacttttcctctaagcaatgactcagaaatttgggctgcttccatctggtggctctgcctcctctaggtagaaggcagaaatctttcctcaaagtcaccaggggagcaaagacagaaagtgcagaggatctttcagtgtttcacagttagtaataaagatgcctttcattggccagaaccctgcctcaacctaacagcaagggaggcaggcaaatgttctcttcctgtgtgcccaggaagaggaaatgtgacacattagcgtcttccagtctctgatacagctcacaaccttttcttcatcagcaagcagcatcttggtgcctaagtgaattcttgtagtttgatggcactgatg

SEQ ID NO: 689031 - DNA, 1945 bp, Homo sapiens
cacaccacgcacacatatactcctgggatcagactgaaggatgacttagtgtcctttttttttttaatttcattaggtgaaggcccaaggcccacatatcctgcattagcctaagaatgctgctgatagtgcaaaaatcctggtaatgtgatttgtccccctcacctctggttcttgggtcatcatgaaggatcatataattcccaccagaatgcaaatagtattatatctatgtggttgcaagagagagcttgcctacttcagagaaaaataagtcctaggggacacaaagtgtgtactaacagtttattttgaggtgacattatgtatccagcyagtattgattatcttctgcttggtcatatagattttctgctctttaagatggtgacaagatttggttacctcaaggatgtggagaaagttgcaatcatggcttttgcagtaagcactgctatgtgaagtagttgcaaactttcctaagagcgaagatatcagaacaagcatatcattttatgcctggaggaaatgaggaaagtttgatataattcatgtggttgaagaaaacatctatgtgaaggaccaaagcatacagactaaagaggctgtgacagttaccaagaagtaattgtctaggaatcactaggaattgtctagggaagggaatgggatctaaaaagatttcctacatcttgagcagactgtgggcaacatttgaaacatcactatcagccacaaactgggaaagctttagccagcttttgggctggtcatttctatagtaagagagaagaaagataatttatccacgctctgagcacccttccctagcttctaaaggtcaggagtgttcatgcataaattgttgctttgggaaatagctagtattcttgttattctccagtaggcataaactctatagaaatcccacagaaatgcttctgcctccaatgatgacttctgaagaacaacaacaacaacagcaatagaaaggaaatgtgtagaaaatgtatgataaccatagcaatattcctcacttccagagacatcgaatcataaaatccccaagaaatgatatggtgttatcctagtagcaaggatccaaaatcatttacatcatatccatccagtcatactcattcgatgaattgtaaatctccatctattcaccttggtgaagattcgtgtgaattagagggaaagagtgagttttgagatacagaaactttggagtccttagacctcaggtaaaaatgtgttactctaaccttaaaaaaaaaggaaatctatgaactaaaatggaaacatctccaagatgtgttcagtgaaaagaaaaatatgcaggccagtaggtatattatgttctatttgtgttaaataaataatactccttatattgtggtatagaaatacaaggatcctgaattaccagatgaactgtcttatttcccatgcctgacacccacatgcctaagagtttcacccagcagaaagtccttgcagagtagggcagtgttcattttttttaagagttcacataaccaaggataggtgaaacagacaaccctgtcaaattgttgcaggagaaattgttgcagatagtctttgagagagtcgtctcattgctcagtggtatttgctccccatgactgatagtgagttaaaccaccaaatgccatgctgagaggcctagggcagtggcaggcataagcagaatcccactgacaaattttattaggttgggaaatttccatgcctgaacgatattttcaatagctatatgtgcattatctactccagaaagaacacggcagctccattgcccacaaatatgtctatggcaatcaggtcccatttttgtctccttggttgggtcaggaatatttgccagatgcaagttgatccatgtacatgtggtggttgcctagtttgtttaaagttatgc

SEQ ID NO: 689032 - DNA, 1945 bp, Homo sapiens
cacaccacgcacacatatactcctgggatcagactgaaggatgacttagtgtcctttttttttttaatttcattaggtgaaggcccaaggcccacatatcctgcattagcctaagaatgctgctgatagtgcaaaaatcctggtaatgtgatttgtccccctcacctctggttcttgggtcatcatgaaggatcatataattcccaccagaatgcaaatagtattatatctatgtggttgcaagagagagcttgcctacttcagagaaaaataagtcctaggggacacaaagtgtgtactaacagtttattttgaggtgacattatgtatccagccagtattgattatcttctgcttgstcatatagattttctgctctttaagatggtgacaagatttggttacctcaaggatgtggagaaagttgcaatcatggcttttgcagtaagcactgctatgtgaagtagttgcaaactttcctaagagcgaagatatcagaacaagcatatcattttatgcctggaggaaatgaggaaagtttgatataattcatgtggttgaagaaaacatctatgtgaaggaccaaagcatacagactaaagaggctgtgacagttaccaagaagtaattgtctaggaatcactaggaattgtctagggaagggaatgggatctaaaaagatttcctacatcttgagcagactgtgggcaacatttgaaacatcactatcagccacaaactgggaaagctttagccagcttttgggctggtcatttctatagtaagagagaagaaagataatttatccacgctctgagcacccttccctagcttctaaaggtcaggagtgttcatgcataaattgttgctttgggaaatagctagtattcttgttattctccagtaggcataaactctatagaaatcccacagaaatgcttctgcctccaatgatgacttctgaagaacaacaacaacaacagcaatagaaaggaaatgtgtagaaaatgtatgataaccatagcaatattcctcacttccagagacatcgaatcataaaatccccaagaaatgatatggtgttatcctagtagcaaggatccaaaatcatttacatcatatccatccagtcatactcattcgatgaattgtaaatctccatctattcaccttggtgaagattcgtgtgaattagagggaaagagtgagttttgagatacagaaactttggagtccttagacctcaggtaaaaatgtgttactctaaccttaaaaaaaaaggaaatctatgaactaaaatggaaacatctccaagatgtgttcagtgaaaagaaaaatatgcaggccagtaggtatattatgttctatttgtgttaaataaataatactccttatattgtggtatagaaatacaaggatcctgaattaccagatgaactgtcttatttcccatgcctgacacccacatgcctaagagtttcacccagcagaaagtccttgcagagtagggcagtgttcattttttttaagagttcacataaccaaggataggtgaaacagacaaccctgtcaaattgttgcaggagaaattgttgcagatagtctttgagagagtcgtctcattgctcagtggtatttgctccccatgactgatagtgagttaaaccaccaaatgccatgctgagaggcctagggcagtggcaggcataagcagaatcccactgacaaattttattaggttgggaaatttccatgcctgaacgatattttcaatagctatatgtgcattatctactccagaaagaacacggcagctccattgcccacaaatatgtctatggcaatcaggtcccatttttgtctccttggttgggtcaggaatatttgccagatgcaagttgatccatgtacatgtggtggttgcctagtttgtttaaagttatgc

SEQ ID NO: 689033 - DNA, 1945 bp, Homo sapiens
cacaccacgcacacatatactcctgggatcagactgaaggatgacttagtgtcctttttttttttaatttcattaggtgaaggcccaaggcccacatatcctgcattagcctaagaatgctgctgatagtgcaaaaatcctggtaatgtgatttgtccccctcacctctggttcttgggtcatcatgaaggatcatataattcccaccagaatgcaaatagtattatatctatgtggttgcaagagagagcttgcctacttcagagaaaaataagtcctaggggacacaaagtgtgtactaacagtttattttgaggtgacattatgtatccagccagtattgattatcttctgcttggtcatatagattttctgctctttaagatggtgacaagatttggttacctcaaggatgtggagaaagttgcaatcatggcttttgcagtaagcactgctatgtgaagtagttgcaaactttcctaagagcgaagatatcagaacaagcatatcattttatgcctgsaggaaatgaggaaagtttgatataattcatgtggttgaagaaaacatctatgtgaaggaccaaagcatacagactaaagaggctgtgacagttaccaagaagtaattgtctaggaatcactaggaattgtctagggaagggaatgggatctaaaaagatttcctacatcttgagcagactgtgggcaacatttgaaacatcactatcagccacaaactgggaaagctttagccagcttttgggctggtcatttctatagtaagagagaagaaagataatttatccacgctctgagcacccttccctagcttctaaaggtcaggagtgttcatgcataaattgttgctttgggaaatagctagtattcttgttattctccagtaggcataaactctatagaaatcccacagaaatgcttctgcctccaatgatgacttctgaagaacaacaacaacaacagcaatagaaaggaaatgtgtagaaaatgtatgataaccatagcaatattcctcacttccagagacatcgaatcataaaatccccaagaaatgatatggtgttatcctagtagcaaggatccaaaatcatttacatcatatccatccagtcatactcattcgatgaattgtaaatctccatctattcaccttggtgaagattcgtgtgaattagagggaaagagtgagttttgagatacagaaactttggagtccttagacctcaggtaaaaatgtgttactctaaccttaaaaaaaaaggaaatctatgaactaaaatggaaacatctccaagatgtgttcagtgaaaagaaaaatatgcaggccagtaggtatattatgttctatttgtgttaaataaataatactccttatattgtggtatagaaatacaaggatcctgaattaccagatgaactgtcttatttcccatgcctgacacccacatgcctaagagtttcacccagcagaaagtccttgcagagtagggcagtgttcattttttttaagagttcacataaccaaggataggtgaaacagacaaccctgtcaaattgttgcaggagaaattgttgcagatagtctttgagagagtcgtctcattgctcagtggtatttgctccccatgactgatagtgagttaaaccaccaaatgccatgctgagaggcctagggcagtggcaggcataagcagaatcccactgacaaattttattaggttgggaaatttccatgcctgaacgatattttcaatagctatatgtgcattatctactccagaaagaacacggcagctccattgcccacaaatatgtctatggcaatcaggtcccatttttgtctccttggttgggtcaggaatatttgccagatgcaagttgatccatgtacatgtggtggttgcctagtttgtttaaagttatgc

SEQ ID NO: 689034 - DNA, 1377 bp, Homo sapiens
tgatgttaatgactatcacttaacttagtgcctactgtttgcaaagcactatgttaaaccttcaaatttttgtatcttttcctcatggagaccttcaaattaggtggtatcatccttattgacagaagaagaaattaaagttcactatgcattctctacgacgcagaaattccattcttaggtacatacccaacagaaatgaagtcagaagtgcactaaaaatgtccgaaaatgttcataacagcattgtttgtaatagtcccagactggaaacaacccaaatgtccattaacagtgaaatgaataaataaactgtggtatattcacatagtaaaatgctgcatagcaatgaaggtttaaaaatgctacagatggtgtggtggctcacgcttgtaatcccagcactttgggaggctgaggcgagtggaacacctgaagtcaggagttcrggaccagcctggccaacgtggtgaaaccccatctctactaaaaatacaaaaattagccaggcttggtggtggacgcctgtaatcacagctactttggaggctgaggcaggagaatcgcgtgaacccggaaggtggaggttgcagtgagccaagatctcgtcattgcactccagcctgggcaacaggagcaaaactctgtctcaaaaaaaaaaaaatgctatagacaacaacatggttgcatgtcacaaacataaagttgagtgaaagaagccagatacaaaaaatacacactccatgagcctttctctctctctctctctatatatataatacatatatatataatacatatatatattatatatgtacacatatacatacattatatatatatatatatatatatatatatggcaagactaacctaggggattagaaatcaggataggggctatctttggagaggaagcttgggcagggacaatgctgtggtgctgacaacattcagtttcttgttcattttgtgataattcatgaaactccacacttttgtgcacatttctgtaaatattttatattccaataaaaatgttataaaaacattattgtcaagtaaaaatgaaatatggacaaggcaataaagaataaaaataaaatagagtgaagcttagaaatattaaatgcttgtctgagaccacccagctgataaatagccaagttgggaattagccccaggtccccctggtttggcttgcaagtccagtgcttgtcccaccacgccagctgtcagtcatatgctgggaagggaccagtgtgctccctccttctccttgggcatgggtgacttaagggacagaagatcgatgcactggaggtgaaaatctactggattttcaagcagctctggcagctggctgttgtctgttga

SEQ ID NO: 689035 - DNA, 1377 bp, Homo sapiens
tgatgttaatgactatcacttaacttagtgcctactgtttgcaaagcactatgttaaaccttcaaatttttgtatcttttcctcatggagaccttcaaattaggtggtatcatccttattgacagaagaagaaattaaagttcactatgcattctctacgacgcagaaattccattcttaggtacatacccaacagaaatgaagtcagaagtgcactaaaaatgtccgaaaatgttcataacagcattgtttgtaatagtcccagactggaaacaacccaaatgtccattaacagtgaaatgaataaataaactgtggtatattcacatagtaaaatgctgcatagcaatgaaggtttaaaaatgctacagatggtgtggtggctcacgcttgtaatcccagcactttgggaggctgaggcgagtggaacacctgaagtcaggagttcaggaccagcctggccaacgtggtgaaaccccatctctactaaaaatacaaaaattagccaggcttggtggtggacgcctgtaatcacagctactttggaggctgaggcaggagaatcgcgtgaacccggaaggtggaggttgcagtgagccaagatctcgtcattgcactccagcctgggcaacaggagcaaaactctgtctcaaaaaaaaaaaaatgctatagacaacaacatggttgcatgtcacaaacataaagttgagtgaaagaagccagatacaaaaaatacacactccatgagcctttctctctctctctctctatatatataatacatatatatataatacatatatatattatatatgtacacatatacatacattatatayatatatatatatatatatatatggcaagactaacctaggggattagaaatcaggataggggctatctttggagaggaagcttgggcagggacaatgctgtggtgctgacaacattcagtttcttgttcattttgtgataattcatgaaactccacacttttgtgcacatttctgtaaatattttatattccaataaaaatgttataaaaacattattgtcaagtaaaaatgaaatatggacaaggcaataaagaataaaaataaaatagagtgaagcttagaaatattaaatgcttgtctgagaccacccagctgataaatagccaagttgggaattagccccaggtccccctggtttggcttgcaagtccagtgcttgtcccaccacgccagctgtcagtcatatgctgggaagggaccagtgtgctccctccttctccttgggcatgggtgacttaagggacagaagatcgatgcactggaggtgaaaatctactggattttcaagcagctctggcagctggctgttgtctgttga

SEQ ID NO: 689036 - DNA, 1377 bp, Homo sapiens
tgatgttaatgactatcacttaacttagtgcctactgtttgcaaagcactatgttaaaccttcaaatttttgtatcttttcctcatggagaccttcaaattaggtggtatcatccttattgacagaagaagaaattaaagttcactatgcattctctacgacgcagaaattccattcttaggtacatacccaacagaaatgaagtcagaagtgcactaaaaatgtccgaaaatgttcataacagcattgtttgtaatagtcccagactggaaacaacccaaatgtccattaacagtgaaatgaataaataaactgtggtatattcacatagtaaaatgctgcatagcaatgaaggtttaaaaatgctacagatggtgtggtggctcacgcttgtaatcccagcactttgggaggctgaggcgagtggaacacctgaagtcaggagttcaggaccagcctggccaacgtggtgaaaccccatctctactaaaaatacaaaaattagccaggcttggtggtggacgcctgtaatcacagctactttggaggctgaggcaggagaatcgcgtgaacccggaaggtggaggttgcagtgagccaagatctcgtcattgcactccagcctgggcaacaggagcaaaactctgtctcaaaaaaaaaaaaatgctatagacaacaacatggttgcatgtcacaaacataaagttgagtgaaagaagccagatacaaaaaatacacactccatgagcctttctctctctctctctctatatatataatacatatatatataatacatatatatattatatatgtacacatatacatacattatatatatayatatatatatatatatatggcaagactaacctaggggattagaaatcaggataggggctatctttggagaggaagcttgggcagggacaatgctgtggtgctgacaacattcagtttcttgttcattttgtgataattcatgaaactccacacttttgtgcacatttctgtaaatattttatattccaataaaaatgttataaaaacattattgtcaagtaaaaatgaaatatggacaaggcaataaagaataaaaataaaatagagtgaagcttagaaatattaaatgcttgtctgagaccacccagctgataaatagccaagttgggaattagccccaggtccccctggtttggcttgcaagtccagtgcttgtcccaccacgccagctgtcagtcatatgctgggaagggaccagtgtgctccctccttctccttgggcatgggtgacttaagggacagaagatcgatgcactggaggtgaaaatctactggattttcaagcagctctggcagctggctgttgtctgttga

SEQ ID NO: 689037 - DNA, 1242 bp, Homo sapiens
ccaggctggtgtgcagtggcacgatctcggctcactgcaacctccgcctcccaggttcaagcgattctcctgtctcagcctcctgagtagctgggattacagacgtgcgccatcacgcccagctaatttttgtatttttagtagatacggagttttgccttgttggccaggctgtgctggagctcctgacctcaggtgattcacctgccacagcctcccaaagtgctgggattacaggcgtgagccacagcaccctgccaaataagatcctttttaaaaaatatctgaaaaaagcttcatatctttacaaactcataaaatagctgattgggccatggaggagatgaggctgtttagaactggttttgtttcaagtttgtcaattttccctgtatgagaacttgggtaaagcacaaagaaacatacagtgctagtaacaggtctcctgcgccctggawctaagtgtttggaggaaggactaaaccccgggggaggtgagtataaaataattccactaagatcacctcctcagtccccagaaggctgatggtggatcctctggccatctcctgtggggtcttactgctcctctgccatttctctatgcctgaagacacgaagatgatatcaaggcagagctaccatatcgcagccagtctctaggctactgctgtgcagtggctcccactttctaatgcttttttgtttttgctttttctaacaaaacaatcttttttcaaaatgaattccaacccctgctagcttccttccccgcctccatactgttttaggcagcaccgtttatgtgacagagtccgtgtttctcaaatgcatggtgttcctcaggtggagagtgggcagaagtttttgcaacactttttttttaagttattgggtgcaaaatcccaaaccaggatatgtgtatgtctgtgtgtttatgttttttatttgaccctcccctctttcaacctacccccttttatatctaatgtagaaaaagcgaaattgaatctggaaagcaaactgttgtatatagttgcggtaacaatcatgaagagagagccgggctgtcccctcagtaattcattttaaataacaaattatttaaaaataaaattcatgccagagccagctgaagaggccttccttcatcaccactgaggccacccccaatctgggccctctgtccatctggcatgtctcctcccagcaagattcatctgttcaatgccatttgcgttt

SEQ ID NO: 689038 - DNA, 598 bp, Homo sapiens
agatccagctttgagagacatcagtacgtagaatgcagctgatgccatcagaatggatgagataatccggtgagaggctctaaaggtgaaaacaaaggaggcctaaaataagaccttgccaacacccacatgtctcaaggaagagggtccttgaaggaggcctaaaggagctrtcagagagctaggaggaaagccatgaaggctgcggtggaaaccgatggggaagcgttttgaaggaaggacctggccaatagcgccagatgcttcccacgcagtttgagcaatatatgaaataaaagataaatccgacttagtgacaggagggtcagaagtgatctggatgaaactaatttccatggaatgttgggggtgaggcaagagtgtgttggattgaggaatgaatacggatcaaaaagtagagctctttgaggaagtttgggtatacgggaaggctggcgctacagctggaagggactgtggacagaaggaggatctgattaaccgggagagatgggcaggtttaaagggtggtgggaaggggccaggaaagagggagaggctaaggctgtggaagagggtgcgggagtgcaatgtgggg

SEQ ID NO: 689039 - DNA, 598 bp, Homo sapiens
agatccagctttgagagacatcagtacgtagaatgcagctgatgccatcagaatggatgagataatccggtgagaggctctaaaggtgaaaacaaaggaggcctaaaataagaccttgccaacacccacatgtctcaaggaagagggtccttgaaggaggcctaaaggagctatcagagagctaggaggaaagccatgaaggctgcggtggaaaccgatggggaagcgttttgaaggaaggacctggccaatagcgccagatgcttcccacgcagtttgagcaatatatgaaataaaagataaatccgacttagtgacaggagggtcagaagtgatctggatgaaactaatttccatggaatgttgggggtgaggcaagagtgtgttggattgaggaatgaatacggatcaaaaagtagagctctttgaggaagtttgggtatacgggaaggctggcgctacagctggaagggactgtggacagaaggaggatctgattaacygggagagatgggcaggtttaaagggtggtgggaaggggccaggaaagagggagaggctaaggctgtggaagagggtgcgggagtgcaatgtgggg

SEQ ID NO: 689040 - DNA, 781 bp, Homo sapiens
tatgcttacaatcttggaataactggggatactgtaggtctttatataggtcttacacaaaccactagttgcctagggatttccaagctgatcaatattcactggcaagttcctataacctttctaatcaatcacagtagcasacacctgaaaaggtaaccaattcacccaagaaacaaaaagagaaaaaatattcaggcatgtctcccctctctagaggcccatcactctgctgactttattactagaagaaatatgcagaaagactttcttatggccccaagtctagatgtctgtaacctctttcacagtagcaatacccaatacagatgggcagggtgcttggtatccatatttttaaaaactgtaacatgctccaaagcaccagaaatgcttggcttttgcagactgaacccttcctgaatctgctaagtaaatatggagttgagaattccgtatttcaaaagcataaaaccatgtcagatttctcagcatagtataagcccatggctggggagctatcttccctcttctactctccatgtctcagatacctgcatggtggcattgtcatctgtgtgaagggtacactgtgccacagcagggaaagcttggcagatgagaagctgggaaaggggaggctttgtatttcgtactactgttgtcaggatatcaatggctgtctgaaagagagaagaaaaagaaaagtcagaattgcctctggggtgggggttgcccaacaaccaagatccttactggatgggtattacatagcaaccca

SEQ ID NO: 689041 - DNA, 650 bp, Homo sapiens
ggcacttcagagagcagagtgctacagtgacttgtttatctccccaaagagatttcccggtttctccaaaaatggggtttgctacaagcttcccagtatgagtcaccagaccagttggcaaagcatttagttctgctgagagcaatggagttgaccctycattggccgagaagatctgccacaagaaccttcatccccctagtgatgggttctgcataacccccaggcagaagccagaatggcgctgactgtgaagtcttagctattgcaggctgtgttgcatgccctcacctcaaaacgcctctgtctttctctacttgcagtgaatgcagaagccttggtggtaggggtaagggcctaggtgaaacacagacaccgctcaccgtgccttcctttctggtgcctcttgatggctcttggcaggcttttgaggtcaggccaccttcccccatttaccatccctttcactagaaaccctggtccttaaagactcaaggcaggcaagaaccctcccagccttggcagagtttggtgacacatgcagtgtaagtgcccagccacccacatctgcacattatccttgtcttttccagaaggtttctttgctccccttccctacaaagacagagcaggccctgagatggtggcgt

SEQ ID NO: 689042 - DNA, 650 bp, Homo sapiens
ggcacttcagagagcagagtgctacagtgacttgtttatctccccaaagagatttcccggtttctccaaaaatggggtttgctacaagcttcccagtatgagtcaccagaccagttggcaaagcatttagttctgctgagagcaatggagttgacccttcattggccgagaagatctgccacaagaaccttcatccccctagtgatgggttctgcataacccccaggcagaagccagaatggcgctgactgtgaagtcttagctattgcaggctgtgttgcatgccctcacctcaaaacgcctctgtctttctctacttgcagtgaatgcagaagccttggtggtaggggtaagggcctaggtgaaacacagacaccgctcaccgtgccttcctttctggtgccycttgatggctcttggcaggcttttgaggtcaggccaccttcccccatttaccatccctttcactagaaaccctggtccttaaagactcaaggcaggcaagaaccctcccagccttggcagagtttggtgacacatgcagtgtaagtgcccagccacccacatctgcacattatccttgtcttttccagaaggtttctttgctccccttccctacaaagacagagcaggccctgagatggtggcgt

SEQ ID NO: 689043 - DNA, 1913 bp, Homo sapiens
acatgatttctgagttaatgtagtttaatgcaaatcaccatgatcacttaacccatgcttctttattaaaggaggtagaagggatgtgatttgatgggaggatggcccgggatccaggacctgggaaagatgcaatgagtaaaggggagcaacagaaaagtagggaataaagtaagcgtgaagagtcatcaacttccctcactgctcctggcctctggcattggaagcccagaggtcttttctagggcctcagagaagcttccaggtctgttcatttctttttccccacccctgcttgtatcacaaataaattactgacacctaaatttctgactaggtggtagaattttagggatccttcacctcatcagaattccatgtaagttgtgggagtcatatgggttaagtaagcaatagtccttgagattatttgatcatataaatcatcagaaaatgtttagtcatcttgattttatcataatgtgtagctaggggaggctggagggagaggactggagtgagaagagacagcaaaagaggtggcttttatgcatggggctctatgaagtaatcaggcctaagtggaaccgagagggaccttggagcagttctggagaggaaagcttggggcacaagtcgtctgttgatggtgaggcttaggccctggctccaaccaatcacatcatctttctgactgggatgcctaagcagtgtgttttttgtttgttttagtgtttgttttttggtaaagcatacagtggcattaactaaattcacagtgttgtgcactcatcaccaccatccatttccagaacttttccatcatgccaaacagaaactctgtgcccatgaaacagctgttatttgcattagaatctgttctaaatattttgtgtaagttctcacttaggcatcacaatgatgtcctgtgagatagctactatatttatctccactttatcgatgagaaaattgaggcacaggaagcctatgtaactttgcttgtaagtgaaaggccttaaagtagaattcaagcccaagttgaactgaacccaaaggccaagcttttttctattcaaacaggccactcttttattattgtagtgagtaataagagctaaaaaatattatgtttttttcaggagaaaattatttgttttgaaggtagaggaagagcatgctatttaatgtttactattacatgaattactctatgttttgagatggtgtactgaaactttctaaaaatttatctcaatctcatagaatggatctacatttgtcctgtgtcaatggctatccagaagcggtaactttgctggtgcacagaaagtgccagcttaacgtgtgtgacggtgaaaacacgacacctctgatgaagatatatagtagccagttatttcagcatgagatggatttggtttaaatacatagaataaaaatggatttatttcattgaaatgtaactaatttgtgaacctatggaatatttatttgtattttctagaatttacaatgtgtttcttggtctaatactgacaggctatacaatgccaagaagatgtttatgcaactattctgctggactttggtgcctatccagatattacagatatcaacagaaaaactgctctccactgtgctgtctatagtgagaatatgtcagtggtggcaaaactgctttcacacaacacaaacatctaagtgaaaaatggagtagagaayaaccaacattattttcaaaatatttgaaatccatttgctttaacactgacatgcgttagggtcagtttttcatatttggaagctcaagcatgctcttctgtgaatgaaaatattctgaagtaactgtctaataatttaaatattaatgtttttaaagaagtattagacggtatagctttctttcatgc

SEQ ID NO: 689044 - DNA, 617 bp, Homo sapiens
tattgaactgcttgctttttggtttgctgttcttgattcttgacttttttcctgtatgtgtgtagcaaattttggataacattgagtttttttaatttcatatacatattctaataattttaagattattaggtatgatggatgaatgaaaataagctgtgaatattaaggcactgattaatacaagtcacaatcaattttaattttaaataacatattattgaataaaatttttgtttttayatgtacaaacttctgtctatacatgaaacacataaattctgtctgatacacacaggtatatatgtgtgtttatatatatattcacatatacataggtaacaaacgtatgttttattattgtaatttttcagataaataaatgaaattcacatttgttaaccaaagaaaattgttttcttttttctttcaatttttacataacaagtagcacatttaaaccaaggttcgcatgctgaaaaaatatagtcttttcaatgcgtcaccctgcttctctttaagataatacccacacaattaaatctaagaggtatttgattttgtttctgattgattcaaaactactggattttattttaatctcagaaacagcaatg

SEQ ID NO: 689045 - DNA, 617 bp, Homo sapiens
tattgaactgcttgctttttggtttgctgttcttgattcttgacttttttcctgtatgtgtgtagcaaattttggataacattgagtttttttaatttcatatacatattctaataattttaagattattaggtatgatggatgaatgaaaataagctgtgaatattaaggcactgattaatacaagtcacaatcaattttaattttaaataacatattattgaataaaatttttgtttttacatgtacaaacttctgtctatacatgaaacacataaattctgtctgatacacacaggtatatatgtgtgtttatatatatattcacatatacataggtaacaaacrtatgttttattattgtaatttttcagataaataaatgaaattcacatttgttaaccaaagaaaattgttttcttttttctttcaatttttacataacaagtagcacatttaaaccaaggttcgcatgctgaaaaaatatagtcttttcaatgcgtcaccctgcttctctttaagataatacccacacaattaaatctaagaggtatttgattttgtttctgattgattcaaaactactggattttattttaatctcagaaacagcaatg

SEQ ID NO: 689046 - DNA, 660 bp, Homo sapiens
atgaaattgaaaatgttatttatatttataatatttaaacatagggaaaaaacatacatatctacagtattagcttgcatataacgatagacatacaacggatatctaaccacaattcaacataggtctaattatctttaaagccattattataatcctcatttttcattgtgtaaaataacgtttcacaatttaagtttgtaatctaactgaagttagttgcttttttctttgccaagttctgaatcattttcagcatgaatcatagcagcattctggaggctcttccactgttttggggacctaatttgaaattcctcataagatagtggatggatccatccattttaagatacgcatttgcaactcattaaattccaagcatttggtgaaactcatgatgaggaatctgtttccccaaatcccttaaataaggaagctccttcaattcctcaatcacttcctaattatgctgcttatatttccaacmcttctcactctcaaaattcttataacagtcatcagtttacaatcgtttgtccatttcaatttttataagtgcaataattgtttttattactcactcattagtttgtccatcactcatcaaaaaagcctcatgtatcaagatcttcaataaatatttgttgaatacatttc

SEQ ID NO: 689047 - DNA, 660 bp, Homo sapiens
atgaaattgaaaatgttatttatatttataatatttaaacatagggaaaaaacatacatatctacagtattagcttgcatataacgatagacatacaacggatatctaaccacaattcaacataggtctaattatctttaaagccattattataatcctcatttttcattgtgtaaaataacgtttcacaatttaagtttgtaatctaactgaagttagttgcttttttctttgccaagttctgaatcattttcagcatgaatcatagcagcattctggaggctcttccactgttttggggacctaatttgaaattcctcataagatagtggatggatccatccattttaagatacgcatttgcaactcattaaattccaagcatttggtgaaactcatgatgaggaatctgtttccccaaatcccttaaataaggaagctccttcaattcctcaatcacttcctaattatgctgcttatatttccaacacttctcactctcaaaattcttataacagtcatcagtttacaatcgtttgtccatttcaatttttataagtgcaataattgtttttattactcactcattagtytgtccatcactcatcaaaaaagcctcatgtatcaagatcttcaataaatatttgttgaatacatttc

SEQ ID NO: 689048 - DNA, 574 bp, Homo sapiens
tgaagagaagttgcttctattggcaagaaaaagtgagtaacttgaaagttcaaagtacttggattcatctgggttcaaatagayttctccattctaagttttagatgctcagtctttcacagtcatgatcataacattcatgtgaaagaattgaaaggcaaggaattcacctcacattgcaattctggaatggaaacaaactttttgtttagttttaactatatttttcctgattattttatggcaatcattgaggctctatgtgtttcctgagggtgacttaccctcagaaattaaagatgtatttcatttagtttctgtaagcacttaagtgtactcagagaatctacatcacagaaattgaagttatcattactgtcaaattgaaaatgcagcagctatttggtctgatgaggcatttgcttcagtaagcatttcaagatctgatctcatatcatgatggtaatgtttgtcaggaaatactagcattttattacttattgtcaaaagaatctggcactgcattgaagaccaaaaatctaaccaatacaattctcaaataatatctgattat

SEQ ID NO: 689049 - DNA, 587 bp, Homo sapiens
taaagattttaagcctaagtaacacaaaccgtaattaaagatggttaattggagctgagagacagtaagttgaaaagtggcatagtaacagaaaagaaaactaaaattggaacaaccaaatcaatggtagagtactacagagaagatagtgwactttctctataattgatattttttctgggtcacttgtacatattttgctaatttcataggcatatatatccttagaataacctctgtacccatacttaaggacatttgaggaagtctaagtcttcttaactaaataaaatatacctaaacaattcttcaatttaaagatgactaaacaacaaaaactaagtgaactactcacaggtaatttggtaaaaataaacgtttaataaaagtctacatatttaatgctagaaatggcacatcctcttattatttttaaaattttgtcaactactataaatacattctgtttggtagtcttggcacttttggcaaaataatttagcagtggtcatagtctattttctgattaaattattcatacatataacagtgtcaactttcaattttatgtttaacatatggaatgg

SEQ ID NO: 689050 - DNA, 587 bp, Homo sapiens
taaagattttaagcctaagtaacacaaaccgtaattaaagatggttaattggagctgagagacagtaagttgaaaagtggcatagtaacagaaaagaaaactaaaattggaacaaccaaatcaatggtagagtactacagagaagatagtgaactttctctataattgatattttttctgggtcacttgtacataktttgctaatttcataggcatatatatccttagaataacctctgtacccatacttaaggacatttgaggaagtctaagtcttcttaactaaataaaatatacctaaacaattcttcaatttaaagatgactaaacaacaaaaactaagtgaactactcacaggtaatttggtaaaaataaacgtttaataaaagtctacatatttaatgctagaaatggcacatcctcttattatttttaaaattttgtcaactactataaatacattctgtttggtagtcttggcacttttggcaaaataatttagcagtggtcatagtctattttctgattaaattattcatacatataacagtgtcaactttcaattttatgtttaacatatggaatgg

SEQ ID NO: 689051 - DNA, 620 bp, Homo sapiens
actgcataatacatttgatgttaacattgctaaataaatgtttctagataaaattatgaaataatagtagagtatcttgtcactattcataatgctttatgccaatatgtcactctattttatcccaacatgcaactcactcatcatttttatttttggtttttgttttgttttttgagatggagttttgctcttgtcacccaggctggagtgcaatgatatggtcttggctcactgcaacctctcccttctatgttcaagcgattctcctgcctcagcctcctgagtggctgggatttcaggcaccygccaccatgcccagctaatttttgtatttttagcagagacagggttttgccatgttggccagtctggtctcaaactcctgacctcaggtgatctacccacctcggcctcccaaagtgctgggattacagacttgagccaccgcacttggccctcactcatcatctttataataaaatttgtatctaagcgtgcatttactttactcacctgtgacacattcatgttccatttaaattgtaccacaaaacttttccataagttactgcatcatttactctactaacagtcagaggggtcaaatgctcttttaa

SEQ ID NO: 689052 - DNA, 1836 bp, Homo sapiens
tcattctcttgcaccttgcatgttttctctgacaccgcagacccaagttgtggcttgctggttaacttgtttacataaccttcttaagtaactctaaactttaaaaaaaaaaatgttttacaggaataatcggtggagatggattgtgaaatggaggtgcataaatatccagtttgccaaccgagctaagaaatgctggataaaagtaaaaggtaattgtaaaagacactgatcacacccctggaagcttagagatgggataagacactttgatttttcctagacaaaactgaggaagtcagaggaaaaacagttgatggtgagattggcatcaggctgggctttgtttggattgggccgcggtggctgcagtgagggctgttggagtggggagagtgggggttgagcctggctgcagaggccccctccaggcctcagctcctctccggcactcctccgtgtcctctgccatgcatacctgccccggtgacttaataggtgagggcctcaggtgacaccgtcgtctgaagtcttggagaaacctttactgtccaggggaggagaggactggcggtcggtggggatcgaggcccagcacacatcactgggtggcttgaatgtcttcggcagagatcacatgccctgccttgcagcctggtccttagagaaacggagagagctctgggcctgggcagcggccctggctgtaccactcacaggctgtgtgtcctcaacgcagtctcagttcctcacccttgccaggtggccgtgagcactggggacgtggaggcacaggtagggtgtaaggtagtccctggtgaccaggcaggcctcccrgatgtaggtcaggtttgagacgcttgctcaccaggaggcagcctgtgtgcccatcgggggctgggggtgctcattgttcccttgggtggtggttggcccgagcgcccacagggagacttctctggctccttcctttcccagagttcctccccacccccctgctgcccaccgcctgggttgggtccagctcatgtctcagagcagcctgctggcacaggctgagtcagctgtcatgggcactgtcgtttctcgcctctcctgaagccaatcctcccctctctccctgtccagacacacaagggaggcccgggagttaggtgacctcaagatcatgcagccaggctctctatgtggaaccctgcgtactggtggggtgccattgctgtgtgctttatgatttctgtgccggctgtgaggtttcccaggttgggctgtggggtacccctgagtctgcaagttggcccaggccaggtgtgtcaccattgcccaggccttcagtggctttccagtgctccctccacatccatgtgtctcggcctgatttttctcaagttcccccgctcgctcccaagaatggcccctccaggctctcctggctccaggcagacaggctcattgcccagatctgccctgggttgtccccaccccatccccacctgtcatcttggcccatgtccatcccggagatcctaactgaatgtaggctctttcatcttatcccttggtcctcggatttgccaggccactcttgcctccaggcctttgcacctgctgttcccacccccttggcatcagccacccccagatgcccacctggccggcccctcacttattgccggctccctgacagccctacataaattagcgttacttccccttctcttgttaaccttgctttgtgtttctccttagtactcaacattcagtgtgttatttatatacttgtttgtttattgtcagtctcttaccactcaattgtaaaagactttgttcacctct

SEQ ID NO: 689053 - DNA, 1836 bp, Homo sapiens
tcattctcttgcaccttgcatgttttctctgacaccgcagacccaagttgtggcttgctggttaacttgtttacataaccttcttaagtaactctaaactttaaaaaaaaaaatgttttacaggaataatcggtggagatggattgtgaaatggaggtgcataaatatccagtttgccaaccgagctaagaaatgctggataaaagtaaaaggtaattgtaaaagacactgatcacacccctggaagcttagagatgggataagacactttgatttttcctagacaaaactgaggaagtcagaggaaaaacagttgatggtgagattggcatcaggctgggctttgtttggattgggccgcggtggctgcagtgagggctgttggagtggggagagtgggggttgagcctggctgcagaggccccctccaggcctcagctcctctccggcactcctccgtgtcctctgccatgcatacctgccccggtgacttaataggtgagggcctcaggtgacaccgtcgtctgaagtcttggagaaacctttactgtccaggggaggagaggactggcggtcggtggggatcgaggcccagcacacatcactgggtggcttgaatgtcttcggcagagatcacatgccctgccttgcagcctggtccttagagaaacggagagagctctgggcctgggcagcggccctggctgtaccactcacaggctgtgtgtcctcaacgcagtctcagttcctcacccttgccaggtggccgtgagcactggggacgtggaggcacaggtagggtgtaaggtagtccctggtgaccaggcaggcctcccagatgtaggtcaggtttgagacgcttgctcaccaggaggcagcctgtgtgcccatcgggggctgggggtgctcattgttcccttgggtggtggttggcccgagcgcccacagggagacttctctggctccttcctttcccagagttcctccccacccccctgcygcccaccgcctgggttgggtccagctcatgtctcagagcagcctgctggcacaggctgagtcagctgtcatgggcactgtcgtttctcgcctctcctgaagccaatcctcccctctctccctgtccagacacacaagggaggcccgggagttaggtgacctcaagatcatgcagccaggctctctatgtggaaccctgcgtactggtggggtgccattgctgtgtgctttatgatttctgtgccggctgtgaggtttcccaggttgggctgtggggtacccctgagtctgcaagttggcccaggccaggtgtgtcaccattgcccaggccttcagtggctttccagtgctccctccacatccatgtgtctcggcctgatttttctcaagttcccccgctcgctcccaagaatggcccctccaggctctcctggctccaggcagacaggctcattgcccagatctgccctgggttgtccccaccccatccccacctgtcatcttggcccatgtccatcccggagatcctaactgaatgtaggctctttcatcttatcccttggtcctcggatttgccaggccactcttgcctccaggcctttgcacctgctgttcccacccccttggcatcagccacccccagatgcccacctggccggcccctcacttattgccggctccctgacagccctacataaattagcgttacttccccttctcttgttaaccttgctttgtgtttctccttagtactcaacattcagtgtgttatttatatacttgtttgtttattgtcagtctcttaccactcaattgtaaaagactttgttcacctct

SEQ ID NO: 689054 - DNA, 1836 bp, Homo sapiens
tcattctcttgcaccttgcatgttttctctgacaccgcagacccaagttgtggcttgctggttaacttgtttacataaccttcttaagtaactctaaactttaaaaaaaaaaatgttttacaggaataatcggtggagatggattgtgaaatggaggtgcataaatatccagtttgccaaccgagctaagaaatgctggataaaagtaaaaggtaattgtaaaagacactgatcacacccctggaagcttagagatgggataagacactttgatttttcctagacaaaactgaggaagtcagaggaaaaacagttgatggtgagattggcatcaggctgggctttgtttggattgggccgcggtggctgcagtgagggctgttggagtggggagagtgggggttgagcctggctgcagaggccccctccaggcctcagctcctctccggcactcctccgtgtcctctgccatgcatacctgccccggtgacttaataggtgagggcctcaggtgacaccgtcgtctgaagtcttggagaaacctttactgtccaggggaggagaggactggcggtcggtggggatcgaggcccagcacacatcactgggtggcttgaatgtcttcggcagagatcacatgccctgccttgcagcctggtccttagagaaacggagagagctctgggcctgggcagcggccctggctgtaccactcacaggctgtgtgtcctcaacgcagtctcagttcctcacccttgccaggtggccgtgagcactggggacgtggaggcacaggtagggtgtaaggtagtccctggtgaccaggcaggcctcccagatgtaggtcaggtttgagacgcttgctcaccaggaggcagcctgtgtgcccatcgggggctgggggtgctcattgttcccttgggtggtggttggcccgagcgcccacagggagacttctctggctccttcctttcccagagttcctccccacccccctgctgcccaccgcctgggttgggtccagctcatgtctcagagcagcctgctggcacaggctgagtcagctgtcatgggcactgtcgtttctcrcctctcctgaagccaatcctcccctctctccctgtccagacacacaagggaggcccgggagttaggtgacctcaagatcatgcagccaggctctctatgtggaaccctgcgtactggtggggtgccattgctgtgtgctttatgatttctgtgccggctgtgaggtttcccaggttgggctgtggggtacccctgagtctgcaagttggcccaggccaggtgtgtcaccattgcccaggccttcagtggctttccagtgctccctccacatccatgtgtctcggcctgatttttctcaagttcccccgctcgctcccaagaatggcccctccaggctctcctggctccaggcagacaggctcattgcccagatctgccctgggttgtccccaccccatccccacctgtcatcttggcccatgtccatcccggagatcctaactgaatgtaggctctttcatcttatcccttggtcctcggatttgccaggccactcttgcctccaggcctttgcacctgctgttcccacccccttggcatcagccacccccagatgcccacctggccggcccctcacttattgccggctccctgacagccctacataaattagcgttacttccccttctcttgttaaccttgctttgtgtttctccttagtactcaacattcagtgtgttatttatatacttgtttgtttattgtcagtctcttaccactcaattgtaaaagactttgttcacctct

SEQ ID NO: 689055 - DNA, 1958 bp, Homo sapiens
  misc_feature 1027, 1028, 1029, 1030, 1031, 1032, 1033, 1034, 1035, 1036,1037, 1038, 1039, 1040, 1041, 1042, 1043, 1044, 1045, 1046,1047, 1048, 1049, 1050, 1051, 1052, 1053, 1054, 1055, 1056,1057, 1058, 1059, 1060, 1061, 1062, 1063, 1064, 1065: n = A,T,C or G
  misc_feature 1066, 1067, 1068, 1069, 1070, 1071, 1072, 1073, 1074, 1075,1076, 1077, 1078, 1079, 1080, 1081, 1082, 1083, 1084, 1085,1086, 1087, 1088, 1089, 1090, 1091, 1092, 1093, 1094, 1095,1096, 1097, 1098, 1099, 1100, 1101, 1102, 1103, 1104: n = A,T,C or G
  misc_feature 1105, 1106, 1107, 1108, 1109, 1110, 1111, 1112, 1113, 1114,1115, 1116, 1117, 1118, 1119, 1120, 1121, 1122, 1123, 1124,1125, 1126: n = A,T,C or G
tcacttaggaaagccaggagatctccatattgagctacatttgtgccttttacgtcttgtagtaagtaggtacctattctttgtttaatcctcttaaacaaatccccttaaatcctgtcttctctgcttttcttactgtgtgcatctgcttcctggttcttttaaaattgcttcagcttaacccacttcctgccttctcagagatctccattcactattcagcagacattttactgagcatgtactatatgccaggcactgtcctaagggcatggagatcaacaagacagatactatcatggtccttgggaaacttttgttctcaaggccaaaatcagctctgacatagcccatccaaggaccagcatttggaaactactgtatttaggttatttccaagtttacttttctcaagtaaaaataagcaatatccctttgagatctttatagagaaagcacgaaagagcttcatgtcgcaaaccaccaagccaagagcaaggcaattcttatttcacttcacttcaaatattcatcttgggcctagaaaaccatgtcaaggtgttatgtgcctctttttggtcttgcccttggcttagtggtcctgaatgtgaatgcggagtatctcctgtccctcctagatcctggaaataaccacccataagccttcgcctgcagagcccaggcagcagtcatctcttgtgccaagtcccctgcagtcatccctgctgcaagagacctcacttgcacagtgacaggcttagctgcatgcttggacacttctcagccattgctctgtactggtgtctgttcttgggcttatgcctagctgctccattagattataaacctattgagggcagctgcccagtagaccttgtacctagctgatacttaatagtatttgtgccttgatggagtagatgtaatatacttccgttcttgagatatttgctagacaggcatgtcacttatttctttgagtcactgctagagggatgttaagatcttccacatccccttttcttcnnnnnnnnnnnnnnnnnnnnnnnnnnnnnnnnnnnnnnnnnnnnnnnnnnnnnnnnnnnnnnnnnnnnnnnnnnnnnnnnnnnnnnnnnnnnnnnnnnnnattttcaagcaagtaagcatccagacactgaagggtacacaatgctcttgccaaaaggacaaagatgatgtgagatagggttccctactaagaaatatcctcaattagaagcatgctcaaatccatcctaaggataatgtcacactttgaaatttggtgactgaaagacgctgccatcactggatacgtccttggataataaactgtgatgtgagttagataaagaatgttgatgaattgctgtttctaatgatttttgctttactcataggggtcaaaccttggtcaaatatcatggaaatcctggaggaaaaagatggagttgatacggagctactggtttatgcaatgactttggtgaacaaggttggttgactatgttatgggttgaattgcgtcacctaaaaagatatgttaaagccctgacccctggtatctgtgcttgtgggcttatttggaaatagtgtcgtagcagatataatctggttgtgagggtgggctctgatgcagcatgactgtgttcttataagaggaaaagagacacagagggaagacgatgtgaacatgcaaagragacagccacaagaggacaggcagaggtcagaataatgcatctacaagccagggaacgccacagattgttggctgccaattgaggatgaggcaaagacagacttcctgtagagccttcagggaaagcatggccctgctgacaccttaatatcagacttctagtctttcaaactgagacagaataagtttctgttattttaagccacctagtttgtggtactttcttatagtagccatagggaactaatacattgtgaaa

SEQ ID NO: 689056 - DNA, 1263 bp, Homo sapiens
  misc_feature 51: n = A,T,C or G
agtgtggccccttcctcagcagacagatgattggtgcagaggagctctganacagacctcagtgtatagaacaactcactgtacagttagttaacattggtggggacgggttaggtactgattggagaggtgtttgttaaatggaagtaaacaaaaacatactttaaccatacaccacagtaagccccaaggagcttaaagcatttaatggaacatagcaacctgtaggaagaaaaaaaagagagagagagatgaagcctaattagtctgtggttggtaacgtttattttaaaaataaaaccagtgaaacaggttccagaggaagagatttaactattttactgcataaaattttaaaagatcttatttacaaaatgaaaatcacaaattataactaaatgcaaatgacaaactaggaaattgtttacaaaaagaaaggtagaaaatgatgttatcctaaatatattatgaaytcagtagaaaaatgaaagacattaaaccaactaagaacaaaagaaatacatatgaaaacaacaagacatgtttcccaggtcacattggcaatgattgccttttaatgaagtatcatttcttgatgaacacccaggaaactcctataaccctggtgggaaatgggcacaacttttctgaaacataatcctaagaattctgcttttattttcaaatctttttgtgagctcattttaccatttgatttgaagcaattttctgttggtttctaaggattaaagtcatctatttcctgtcctttttagtcactgccattgttttggaaaacaccgaattcagcaaaaatggaattttcacactgccacagtgttccccattgtaacattacctattttattgataaggccattcccagctattcttatgatcatagcagtacccacacaatgtggtactttgttgctaatcactggcagagacccagtgcctgtcaccctctgtttggcattctgtggcatttgatgtccaggaatccctcacttactctttctcttctggcagttctttctcatcctttgttagttctggccaaggagacatccagaaagatccttgaggtcattcattcaaatgtaatcctttccttaactcatttatgcctagtgttccgttattggaacgctaagcttgtgtgagttatttatatcctgcttctcaaggtcatcaccaaggtataatttttcacacacaaaaaaaaaaatttgcaacctccggcataaatgcgttaaacaa

SEQ ID NO: 689057 - DNA, 1726 bp, Homo sapiens
ttcatgatcttgctcttaagcatcactgtcatgtcagatctgctacaaaatatacggaatgtaaaaattatgaaatgaacagttttaaatatgctgtataaaataatggcaaaagacagtgttattaaaatgtttccatcttatttttgattaattgaatatatctatcatgcatctgaaattgcctaggatggttctgattgctggtattcagatccaatgtaactccaaatatttacccatacacttcaagaatgtttgaatgataaggtctctgtgtgctttacaataggatagatttgataccactgaataataaatggcttttgctgagtcagtagcgacctagagcactctacttatagtcattgagtcactcatttattcactaaacatttgttgagcatctacttgatggaactgctgaggatacagtaatgaattggccaggcaattccttccttcagacatgtttgcagaagtctagcagaagagatagacattgaacaatttttaaataattgcatacacagtataattagaattgaaataagggctataggatgctaaaagagattatcacctgatcggagttcaaaggtcagaaaagctttactgacattctataaaaagcaaaaaaaaaaaaattggtccatggatgccagggatatgggtgggaaatggggctgtccacaaatggcacaaggggagttttttattttattttattttattttattttattttattttgagacagagttttgctcttgttgcccaggctggagtgcaatggcacgatctcagcttactgcaacctcgatctcccaggttcaagtgattctcctgcctcagcctcctgagtagctgggattacaggcgtgtgccacgatgccaggctaattttttttgtatttttagtggagacggggtttcgccatgtcggccaggctggtctcgaactcctgacctcaggtgatccgcccacagcctcccaaagtgctgggattacaggcttgagccaccaagtctggccaaggggacttttaagggggctggaaatggtctccattttgattgtgaggtggtggctacaagattgcatgcatttgtcaaactcatagaactgcacactgaaaagagtgaattgtactgtatgtcaattatacctaaataaatctgacttaacaaaaaaataaaacccagtattcttgtaatctctgaacacaatttaaccaacaattccttgggattatgatgtaaaagtagtcatatcccagagacccacaccgactcccatgaccacctcctgtattcctgaatataaattacatacacacatatagtcaacgcctgaacctttaaggtagactctgacaaagatttttattcatgtaggacctcacttgaggacagcaggccccagtagggtagctcagcatatggcaatgggcactcaaggtccccagagcgggcactgggcaacagccagaggcacaagccttcatcaaccctggctttcagagatgccatcttactctatctttacatgggagtaataatgtyccccctttccaactgcaggaactgaggattacagtagctaaatgatggtccaggatcattgaggcaatcaatttcagagtcagaatcctggcagaagcaaagaggtgccaaaaggggaggagaaacaggagacatagttttccggctttgattcccatttt

SEQ ID NO: 689058 - DNA, 580 bp, Homo sapiens
tgggtgacagagaagactctgtctcacaaaaaaaaaaaaaaatttatatatatatatatatatgagagatatgggaggatagacaatgaggatactccctagatggtaggaatagagtggttttgttttcttatttttgctcatctgtaacttccagctttctctaatgtacgtgcacagctgttggggctcagaaacggtactccaaagtatggcactatggcaggctgagtactttgaactaaagaaactggaaggtctcraaagtcaactctctctctgacgttctcccatcctcctgtctcctgcccctctttcgcccccagaggaatccatagacaccagaattctttttccccagtcatagaaactagaacccctctcccctaaagcaagccataaaacctagaaagggtcactctctcccttctcccctgaagacccctattccagaaagggtcctgcccgatacctgctggaaggagtgccgtacagagaggccaagaagcatctcaatagacaggacttgctgggtatccgcgctcagtctattcccatgaatcatgctcttttgtccgat

SEQ ID NO: 689059 - DNA, 580 bp, Homo sapiens
tgggtgacagagaagactctgtctcacaaaaaaaaaaaaaaatttatatatatatatatatatgagagatatgggaggatagacaatgaggatactccctagatggtaggaatagagtggttttgttttcttatttttgctcatctgtaacttccagctttctctaatgtacgtgcacagctgttggggctcagaaacggtactccaaagtatggcactatggcaggctgagtactttgaactaaagaaactggaaggtctcaraagtcaactctctctctgacgttctcccatcctcctgtctcctgcccctctttcgcccccagaggaatccatagacaccagaattctttttccccagtcatagaaactagaacccctctcccctaaagcaagccataaaacctagaaagggtcactctctcccttctcccctgaagacccctattccagaaagggtcctgcccgatacctgctggaaggagtgccgtacagagaggccaagaagcatctcaatagacaggacttgctgggtatccgcgctcagtctattcccatgaatcatgctcttttgtccgat

SEQ ID NO: 689060 - DNA, 634 bp, Homo sapiens
ggtttcgccatgttggccaggctggtcttgaactcctgacttcaggtgatctgcccgcctcggcctcccaaagtgctggaattacaggtgtgagccactgcgcctggtctagaagctgattttctagaggcatcttcaagacccaggaacttcaggactgagtttctaatgaagagaagaataggaagtccttggggacagtcagaaatggaggygaaggtacagggggtgtggggtggtgagggtgcaggggtgcggggtggtgagagtgcagggggtgcggggaggtgagggtgcagggagtgcggggtggtgagggtgcaggggcgcggggtggtgagggtgcagggagtgagggatggtgagaatgcaggggggtgcggggtggtgatggtgcagggggtgcagggtggtgagggtacaaggggtgcaggaaggagagggtgcaggggtgcagggtggtgaggcagcattccagacagagggaacagcatgggcaaaggagaggaggctggatgcaaaatgagaggggaggagtgagctgaactgatgctgtgccctgcacatagctcaagggacaaacgtagatcatggggaacgtggggccacatgagtgtttcaagctgagaagtat

SEQ ID NO: 689061 - DNA, 651 bp, Homo sapiens
tgaaagcactaaaagattcttggtagacctgaattaagtgtgactttgtatgtattttactactaataataaccataatagcagttaacatgtgttaagtgttcactgcgtaccagctgctgctctttctgagcactttacatgcattaactcataatctcaacaacccgattcttcagttacatttataatttctgtattacagatacagaaattgagggacagagagataaaagccacttgcttatagtaaaaagcaaacarataaataagaacaaccatagcaaaacaattgctaaatgactgcacatttaaggccgcaactttcagattgcatagtttctttagacgtgttactcacccaaagtacttgtactaattttgtattttaaaaacccatcattggaaattaagaccctattccatttgaaaaatatatctgtgtattatgtggggcagaggtcacccacccaggagtttgcagatttccccaaattgcctttctagtattagaagagcttgacacaaatataaaaagtttgtcaggcttccttttctctcctggagaatgatctttccaaataattaacagtggagacctctgttcccacctcatgtgagtggttgcttttttttctttcttttttgaga

SEQ ID NO: 689062 - DNA, 663 bp, Homo sapiens
ggcatggtggtgcacgcctataatcccagctacttgggaggctgaggcaggagaatcacttgaatccgggaggcagaggttgcaatgagctgagattgcgccactgcactccagcctgagcgacagagtgagactctgtctcaaaaaaaaaaaaaaagaaaaaagaaaaagaaaagtaaacatagtttgagaatttcacaatagttcttcatatactcagtgaaaaaaacaaaggaaaaataattttggctggaagaatgagagagatcacttaactcacacttttcacaactcttaatatttttctcctatgttagaaccaaaaagcatgtttcatgagctattttgatatctgtctctgatcaggagttagaattgattcaccatagttagtccatgagcttttgtgtgttttaaaaaaggcaattagccaggcacagtggctcatgcctgtcatcccaccactttaggagaccaaagcaagagaactgcttgagcctatgagttcaagacraggctggacaatatagggagaccctcatctctacagctaaaaaaaaaaaaaaaaaaaaaaaaaaagtcagggagccagtcctggtggttcatgcctgtaaacccagcactttttttgggaggcccaggcaggcagattgcttgaaccca

SEQ ID NO: 689063 - DNA, 614 bp, Homo sapiens
tctaagtgactcataagggatctgaaatatttaaagcaggcaagttatttgttcaagcatgtgtgtgtgtgtgtgtgtgtgtgtgtgtgtgtgtgtgtgtgtgtgtgtgtgtgtatttgagacatagtctcactctgtggcccagactggagcataatgacacaatcttggctcactgcaacctctgcctcccgggttcaagcgattctcctgcctcagcctcctgagtagctgggattgcaggcacctgacaccacacccagctaatttttgtattttcgtagagatgggatttcgccatgttggccaggcttatcttgaactcctgacctcaagcgatccactcgcctcagcctcccaaagtgctgggattacaggcatgagtcactgtgcccggcccaagcgtgtgttgatggcagcatagattaagagggaaatggactggggggagagacctgtcacagtaatccgagtgaaaaatgatgaagatctaattttattttattattattattattaaaaaaaawtttttttgagacagtctcgctctgtcacccaggctagagtgcaatggcgtaatcttggctcactgcaggctccatctctcggattca

SEQ ID NO: 689064 - DNA, 614 bp, Homo sapiens
tctaagtgactcataagggatctgaaatatttaaagcaggcaagttatttgttcaagcatgtgtgtgtgtgtgtgtgtgtgtgtgtgtgtgtgtgtgtgtgtgtgtgtgtgtgtatttgagacatagtctcactctgtggcccagactggagcataatgacacaatcttggctcactgcaacctctgcctcccgggttcaagcgattctcctgcctcagcctcctgagtagctgggattgcaggcacctgacaccacacccagctaatttttgtattttcgtagagatgggatttcgccatgttggccaggcttatcttgaactcctgacctcaagcgatccactcgcctcagcctcccaaagtgctgggattacaggcatgagtcactgtgcccggcccaagcgtgtgttgatggcagcatagattaagagggaaatggactggggggagagacctgtcacagtaatccgagtgaaaaatgatgaagatctaattttattttattattattattattaaaaaaaattttttttgagacagtctcgctctgtcacccaggctagagtgcaatggcgtaatcttggctcactgcaggctccatctctcggrttca

SEQ ID NO: 689065 - DNA, 1160 bp, Homo sapiens
ttttagtagagacagggtttcaccatgttggccagactagcctcaaactcttgacctcaggtgatccgcccgcctcagcatcccgaagtgctgagggattacaagcatgagccactgcacccagcccccagtcccaccttttaaaataatgaataagcaaaaggccagatagagtgagcctcttgcattttaagaagcccattccagccataacagtcctttctgagctaaagaaggcaaagtacaaacacatccaggccccaactaacaacaaccaaaatgtcacatgttgtcaggtacttggaaagagggaaaacctttctagcttttttccttctggtgttattagcccactgcttggcaatgacatagaaggaagactgtgaagaagaaaagaagttggagggaaagtttggrttcaaaggagccaggtagaattaggtagaaaatacagggtctagagaaggatattttttgttcatttctgaaaaagggacccaaataagcacgattgatttgacacttggaaatactatttttggttttctctcttttccttaattttgccctatcaaccaagacccatatctctaagaattctgtcaggtacttcccattcctgtgttcattctcttatttcctattcctgtgaataaaatcagatgatgcctctgataatcctggaaactgatcactgaaagcatggatggcagaaaagtaaagaaaaaaatctgtgtgtttattccaatggctagaaagtaaatttaaaaggttactctattgggtagatgatgtccaaagtaaaccattctccctaatgcttgcaattactcacatacaacctccatgttaaaaagaaataaaaagcaatactggtctttcctgttctcattctcacttgaaaattgtgtgtctggtttctgttggtttctcattggaagagaaattttaagaatacctcaattcaattgatgtgtactcacatgctgaagtctggggtatgcacaagctaacaagagctatgctagggtggggtgtggtggttcacacctgtaatgtcagcactttgagaggctgaggtgggagcactgcttgagcccaggagtttgacactagcctggggaacacagtgagaccctgtctctacaaaaaaattaaaa

SEQ ID NO: 689066 - DNA, 645 bp, Homo sapiens
cggccgattttattaatttaatagacaccattgagtgcccagtgtgtgtcaggccttgcacctctttggtactgttctcattactcagaacagtggtaggcacataaaggggactcagcaaagtatctgcaggttggctgatagacaaatgtttggaaaacaagtctaaggaaatatataaccaagtgtgaggatgtatcctccatgctggatggtaattaaaattgctaccatgtaccagatgctcagtcttctggagttcaggggacaccaaagagggctgaggtcaattttagaagacttatccattttgctgtagatttgcggagtcagaggaagaggttctggctatgagtttatgattaatctggrttgctctgaaatgattttctttgaaaaacactggccgtgtagggggaccacaagaaggagcactgggccgggcatggtgggtcatgcctgtaatcccagcactttgggaggccaaggcgggaggatcaactgaggtcaggaatttgagaccagcctggccaacatggtgaaaccccttctctactaaaaatacaaaaactaaccaggtgtggtggcacacacctgtaatcccagctactccagaggctaaggcagggagaattgcttgaaact

SEQ ID NO: 689067 - DNA, 645 bp, Homo sapiens
cggccgattttattaatttaatagacaccattgagtgcccagtgtgtgtcaggccttgcacctctttggtactgttctcattactcagaacagtggtaggcacataaaggggactcagcaaagtatctgcaggttggctgatagacaaatgtttggaaaacaagtctaaggaaatatataaccaagtgtgaggatgtatcctccatgctggatggtaattaaaattgctaccatgtaccagatgctcagtcttctggagttcaggggacaccaaagagggctgaggtcaattttagaagacttatccattttgctgtagatttgcggagtcagaggaagaggttctggctatgagtttatgattaatctggattgctctgaaatgattttctttgaaaaacactggccgtgtagggggaccacragaaggagcactgggccgggcatggtgggtcatgcctgtaatcccagcactttgggaggccaaggcgggaggatcaactgaggtcaggaatttgagaccagcctggccaacatggtgaaaccccttctctactaaaaatacaaaaactaaccaggtgtggtggcacacacctgtaatcccagctactccagaggctaaggcagggagaattgcttgaaact

SEQ ID NO: 689068 - DNA, 1506 bp, Homo sapiens
tgatagagttgcctaatgttaacaaaatggagaaacaatattgtatctccttccttcctgccttcatttactttcaggatgctaatacagtactcaattctcagccacattacaatctgctttcatccatttcttgataatctcaaccccgttattgttgctataaatagtagcaatgactaacaattgctgtactacatttttttgtacccatgttcagttgattctcctgcctcagcctccagagtagctgggattacaggcctgtgccaccacacccggctaaatttttgtatttagctgaaattttgtatttagacasggtttcaccatgttggccaggttggtcttgaacacctgacctcaagtgatccacccatcttggcctcccaaagtgttggaattacaggcgtgagccactgcactgggcctactgtactacagtttgagcatttattatgcactagacactgctaagtactaaatactttacatgcattatttcctttaattttcagaatgacattatgaagtaaaaggtattactacctctatcccccttttatagatagggaacctgaggttaagtgcccctcccaaattcacattgactgaaagagtctggcagtctgaccttacagcctgggcacccagtggtaacacggaagaggaaaaagtccttcatctttacattgctaccatatgtagcaaaatcaaactattctaacagtttggggacagaggatataggcatcacatcaatgtaagtagattaatttttagcgtattcaatgtataatgtatttttaaaacaaaaccactaaaggtgctccttgtgaagaaaaggacaaatcccctatgtctgacaatggaatgctaagtataatattgcaagtctaggctcgtgctaaagttagaatatcagagctaaaaatagaaatgttacactcctttttccacctcaaactcactttgaaagttgggcttcttggttttaaacttccttttttttttctgtgttatgctcttcaaaaaaaaaaaggagaacatagctatatagagatataattcatgtgctatataattcacccacctaaaggataccagttaatggtttttagtatattcacagagttgtgcagccatcaccactatctaattttagagcattttaatcacccctgaaagaaaactatacccattagcagtcattccttattccttctacccccagccctaggcaatcactaatttactttctgtctcatagatttgcctattctggacatttcatataaatggaatcttacaatgtgtggtcttttgtaactggcttctttcatttatcacagtgttttcaacgttcatgcgtgttgtaccatttatcactacttcttttttttttgtaactgaataatattccactgtataaataaactaaattttatttatccattcatcagttgatggaaatttgggttgtttccaccttttgtctattatgga

SEQ ID NO: 689069 - DNA, 608 bp, Homo sapiens
gttggtgccaaacacaaagctcagctactgattggaatgtgctttgtcacctgtcaagcggtaatgcttgtttatggaatttttatttttttcaaataaaaataaaagatatcaattattttcactatgacactccccgtatttaatattgataaaatatttcaaattcatattgacgattttaatttaaasataatataattagttctcctattattctattcctttgaaactgaaagaaaatgagaagaatgaaaaagaacttcgtcttcaattcaattagaatgcagtttcaattgcaatccttgatgtctaagaaaggaagcatatatcagactcatttatctgcaggggtcttgggtgcgaatatcttccaaaaaaggatgcctagtgtacagagtccagtaagcaatgcattacttaggatgcaaaagtccaggtctacaggggaatgcttggttcgctgtaggaggaagggtcacggagacatgaattctcaatgcaccatttttgctcttagtttgacagagtaaataaaggagaaaacactgagcagcatcaaatcaggcagccagcgatcctcaccacctgaagttactgtgtaatca

SEQ ID NO: 689070 - DNA, 608 bp, Homo sapiens
gttggtgccaaacacaaagctcagctactgattggaatgtgctttgtcacctgtcaagcggtaatgcttgtttatggaatttttatttttttcaaataaaaataaaagatatcaattattttcactatgacactccccgtatttaatattgataaaatatttcaaattcatattgacgattttaatttaaacataatataattagttctcctattattctattcctttgaaactgaaagaaaatgagaagaatgaaaaagaacttcgtcttcaattcaattagaatgcagtttcaattgcaatccttgatgtctaagaaaggaagcatatatcagactcatttatctgcaggggtcttgggtgcgaatatcttccaaaaaaggatgcctagtgtacagagtccagtaagcaatgcattacttaggatgcaaaagtccaggtctacaggggaatgcttggttcgctgtaggaggaagggtcacggagacatgaattctcaatgcaccatttttgctcttagtttgacagagtaaataaaggagaaaacactgagcagcatcaaatcaggcmgccagcgatcctcaccacctgaagttactgtgtaatca

SEQ ID NO: 689071 - DNA, 652 bp, Homo sapiens
ctgtcgattcaaatgtttatctcatctagaaacagcctcacagaaatattcagattaacatttgaccacatatctggacactgtagcccagccaaattgacacataacattaactatcacagaaacaatgtatttaataggcaagaaaagaaaaaggagataaaggagaatcataaaaaagataaaatgaaactaaaaacaagcaaacatcatttattaactcagatatcaataagagaaatcaagcaaaagataatcttttttgcacctgtattagtggccttgaggatcacatgacttaatatttcatgcccacagagcaaaaatayaaagtgaatgaaatcatgagattgctgggagatgcagatgattgtaagtcgttgaagttccggtaagagaaaaagaaacacatgtaggatagattaagaattatataaaaaacagaggaaaacgctcatgagttaaataaatatctacaattgtaaatgtaaagaatgtacctaaatctagacagaattgatatgaaaaagaacatactttggctcattctggttaaaaccaattccaatcttttagaccaaaagaacttattttcttcaaaggaaaaaatattagactgacatcaggcttcttttatgcaactctcaaaagt

SEQ ID NO: 689072 - DNA, 663 bp, Homo sapiens
aaatgtattgcaatgatctcagcctcattaataacatgttctaacctagtagttcccaaacagctatattagaatcatctagggagtttaaaaaggaaaaaaaccaaaacagattcctggttccaaccctggctttatgaagtcaaactttctatatggtatcaaggaatctatgttttaaatcattaggtgtttccaaagaatactttgatttagaaactacttctttgatcaaattaatttcttaaacaaataaagggccacttatttggtttgtgaatgtctccaatgaacatctgtactatttttagagacaataaaagtcacagawgacaggtagagttagtaactaattagtaactacagttcttttaaatgataattttttctcttatgtgggcaattaccaaataaaattcattactatttagctatatctccatttagcctgtataataataatgatctattagtttgtctttcaatagtgcttattagtgggttcgatatatataggtcagtgtgtcgaacaaattaccctcagaagcaattatcagttctttatgttcttgcttaaggaattgttggatatgactggtgtgattgagggatgtgaaatagaggtgatgaaggagcttcttcaagattccaggaaattcagaa

SEQ ID NO: 689073 - DNA, 607 bp, Homo sapiens
ctcagcctcccaggttcaagcgattcttctgcctcagcctcccgagtagctgggattacaggcgcctgccaccacgtctggctaatttttgtatttttagtagagatgggggtttcactatgtggctaggctggtctggaactcctgacctcaggtgatccgccacctcagcctcccaaatgggattacaggcatgagccaccacgcctggccctctttttcttttttatgaacaattagctgtgaaaatgctaacctttaatgagtccctaccatgagccatatttaaagttaagaatttgcaccatgaccctgtgaggagggtattgttatactcactttataaatgagaaaactaaagactcagaggtgaaactgattctaaaagactatttaaaatacaggtcatctgtytgggttaggccaagggaacagtctcaaagttaaaacaaaagagggcagctaccatgatgcaagccagggaagctgggaggaaaaatactttaagccagtgaagaggtgagaattcttgtaccaaatgtgaactacttgttcccagaaaattcactggcttaagactagaatgagaccattttagtcttgatac

SEQ ID NO: 689074 - DNA, 587 bp, Homo sapiens
tgtttgttagatgaatgaccattcctgagactggaggaggggtgagcggagaaccaagcatcaggaagtggggtggttaacccagagagtgcacattgctggctagggaatagcaagcattctctataatggtgggttagtgtgtgaattatcctcattctcaatttaattttgaaagtagcatccgtttaacagtggtcccacagttgaatcagttgaatgataatccactattttgatgagccaatgatttaaaaactatgccataaaagcaatatcgaaaaatttcaaataccacctatttttaaaaaaacttcattgaatatgttaatgggttatcaaaaragacttttcctgatttgttggaatttcattagaggactaaaggctaagaacactctcacatcctagagatgctagaacatctgtgccagacttgtggagaggttctcctggcaccaggtcataacccacctctaacctttagaagagcaagttgaagaggtcatctggaaggactgttttggagacagttgtaggtatgctgatttttgcctttcctacctgtggtactttacccttacatt

SEQ ID NO: 689075 - DNA, 607 bp, Homo sapiens
aggtttaaacattctttggaatagtctttagaatgctatctgtaaatttaaaatgacaattataatacaaattcaagcaaaccgcaagaatatattttcttagccctctcatagtttgtctgaacagaacttagcataagattgaatttgtgcaattttagattaatttttattaaaagtggttgtatcccatttaaccatgtgaaaacctattttgaactttataaaattatttttatactaatgaaatacttaaaatttaaaatagattaacttttttctgtattacagtgaatcatagcaagaatcatcgttactaactttttgattataataagttgggaaatatttcttccacagcactttctgtgcaattcatttattatgaaagcaggatgaatatattcacacattcattttgctttatatctaacccacraacagcaccttgatatcacatagggacaaatgacatttcaaaaaagataaaagtaagatttcatgtaatacatataaaacatggtatctttttaaactcattttttatttaagaaatttctgttgcctttaactaaataggtatgattgtgtaaggatgatttcaccc

SEQ ID NO: 689076 - DNA, 424 bp, Homo sapiens
tttttaaaaaacattatgagattttttgcaattttttttttttagctcattagctatcattagtattagagtatttcaygtgtggcccaagatatttcttgttccaatgtggtccagagaagccaaaagattggacgcccctgggaagtatttacatataacgtacacacatcctcctatgtacttaaaccatctctagattactaatacctaatacaatgtaaatagctgttatactataatgtttagggaatgatgacattttaaaagtatgcacctggaaaaagttctgcttccaaatctattgtacacccatgtgcatgggcaaactatggataaaaattctctgacattctctttctctggagattgagcactattttctttcctgcccatgtctatgatgactatacctaagaagtat

SEQ ID NO: 689077 - DNA, 424 bp, Homo sapiens
tttttaaaaaacattatgagattttttgcaattttttttttttagctcattagctatcattagtattagagtatttcatgtgtggcccaagatatttcttgttccaatgtggtccagagaagccaaaagattggacgcccctgggaagtatttacatataaygtacacacatcctcctatgtacttaaaccatctctagattactaatacctaatacaatgtaaatagctgttatactataatgtttagggaatgatgacattttaaaagtatgcacctggaaaaagttctgcttccaaatctattgtacacccatgtgcatgggcaaactatggataaaaattctctgacattctctttctctggagattgagcactattttctttcctgcccatgtctatgatgactatacctaagaagtat

SEQ ID NO: 689078 - DNA, 634 bp, Homo sapiens
tcactgcaacctctgtctcctgggttcaagcaattttcctgcctcagcctcccaagtagctggggctacasgtgtgcgccaccacaactggctaattttagtagagacggggtttcgccatgttggctaggctggtctcaaactcctcacctcaagtaatctgcccgcctctgcctcccaaagtgctgggattacaggcatgagcaacacacccagcctttactactcttattataacagttttgcttgctatgcagagtaactgtattgaatttgaaatctgcaaaatgaagtaagagattcatgtctttagaagaaaacaaataatgtcctgctttttatctcatttttttccccttgagttctgtcaagctattgagaagcaatatatatgaaaattaacacatgacacaagtccttttgccaggcaaacgccctaatttacctgttaatatgatgcctataaacatccagacacagagaaaaatgttccctgccttaggaccatagtctgatgtgagctttccttgagccaatgtgaacaaaattccaaatatctaaaatacaataagaaaaatcattcgttattaagttaaattatttaaagcaagtataaagttttcaccagaacttt

SEQ ID NO: 689079 - DNA, 634 bp, Homo sapiens
tcactgcaacctctgtctcctgggttcaagcaattttcctgcctcagcctcccaagtagctggggctacacgtgtgcgccaccacaactggctaattttagtagagacggggtttygccatgttggctaggctggtctcaaactcctcacctcaagtaatctgcccgcctctgcctcccaaagtgctgggattacaggcatgagcaacacacccagcctttactactcttattataacagttttgcttgctatgcagagtaactgtattgaatttgaaatctgcaaaatgaagtaagagattcatgtctttagaagaaaacaaataatgtcctgctttttatctcatttttttccccttgagttctgtcaagctattgagaagcaatatatatgaaaattaacacatgacacaagtccttttgccaggcaaacgccctaatttacctgttaatatgatgcctataaacatccagacacagagaaaaatgttccctgccttaggaccatagtctgatgtgagctttccttgagccaatgtgaacaaaattccaaatatctaaaatacaataagaaaaatcattcgttattaagttaaattatttaaagcaagtataaagttttcaccagaacttt

SEQ ID NO: 689080 - DNA, 634 bp, Homo sapiens
tcactgcaacctctgtctcctgggttcaagcaattttcctgcctcagcctcccaagtagctggggctacacgtgtgcgccaccacaactggctaattttagtagagacggggtttcgccatgttggctaggctggtctcaaactcctcacctcaagtaatctgcccgcctctgcctcccaaagtgctgggattacaggcatgagcaacacacccagcctttactactcttattataacagttttgctygctatgcagagtaactgtattgaatttgaaatctgcaaaatgaagtaagagattcatgtctttagaagaaaacaaataatgtcctgctttttatctcatttttttccccttgagttctgtcaagctattgagaagcaatatatatgaaaattaacacatgacacaagtccttttgccaggcaaacgccctaatttacctgttaatatgatgcctataaacatccagacacagagaaaaatgttccctgccttaggaccatagtctgatgtgagctttccttgagccaatgtgaacaaaattccaaatatctaaaatacaataagaaaaatcattcgttattaagttaaattatttaaagcaagtataaagttttcaccagaacttt

SEQ ID NO: 689081 - DNA, 652 bp, Homo sapiens
ttcttttttctttctgtttctttttgtttgttttgttttttgagatagtctcactccgttgccccggctggagtgcagtagcacaatctcagctcactgcaacctccacctcctgggtttgagcaattcctgcctcagcctcctaagtagctgtaactacaggcatgtgccaccattaatgcctggctaatttttgtaattttttgtagagacggggtttcaccatgttggccaggctggtctcgaactcctgacctcamatgatccacctgcctcggcctcccaaagtgctgggattacaggtgtgagccactgtgccgggcttcttttttctttttgaatttaccctgtttcatcaatcttgaggtatacctttttcatgaaatctctgaaatcaagatgcctttaataatcagtggcatctaacatttgtggtaattgagatatggttatgtgaaaaccttctattgatacctggcaagatcattgactgcaagtattagagtatcttagattcaatgaagtacagtattttccttctattgtaattaacaattttgagagagtttaaagttttgagtcaatacaaagtctagattttaatttctgctgtaccatattttagcagttcagcccttctgtaaatagtttt

SEQ ID NO: 689082 - DNA, 605 bp, Homo sapiens
tcagacaccatataccaccacacttytatgtctcttagctctacccctgtactttccatatgaagctcaagtgagttagcaagacctagctctgcttccatgaatctacctggagtttttcaatcccagaggtgcagttggatcagatgataaactttatatcacatttcagaagaaaatggttactaactcaagtcttttaaaagttcaatagtatattggcttcctcatatctgattttttatttcttttattttcctttttttttgttttgagacagggtcctgctctgttgcccaggctggagtgcaatggcgcagtcacagctcactgcagccttgacctcccaggctcaagggttcttcccccttcaacctcccaaagagctgggattacaggcatgagccactgtgcccagccttcatgtttatctctaattacaaattgaactgaatttaaaagtagaattgttgaatatttaatgtagtaaaaattagtctttcttaggtaaaaatagaataatcagtaggcaaggttgtggcatattattgatggttttgcagttcacttatatgaattggccatatctctgagttttagtcagt

SEQ ID NO: 689083 - DNA, 605 bp, Homo sapiens
tcagacaccatataccaccacacttctatgtctcttagctctacccctgtactttccatatgaagctcaagtgagttagcaagacctagctctgcttccatgaatctacctggagtttttcaatcccagaggtgcagttggatcagatgataaactttatatcacatttcagaagaaaatggttactaactcaagtcttttaaaagttcaatagtatattggcttcctcatatctgattttttatttcttttattttcctttttttttgttttgagacagggtcctgctctgttgcccaggctggagtgcaatggcgcartcacagctcactgcagccttgacctcccaggctcaagggttcttcccccttcaacctcccaaagagctgggattacaggcatgagccactgtgcccagccttcatgtttatctctaattacaaattgaactgaatttaaaagtagaattgttgaatatttaatgtagtaaaaattagtctttcttaggtaaaaatagaataatcagtaggcaaggttgtggcatattattgatggttttgcagttcacttatatgaattggccatatctctgagttttagtcagt

SEQ ID NO: 689084 - DNA, 1585 bp, Homo sapiens
ggaaatcaagaggtttccacaggggcgggagaaggggagatgctggcaataaatagacaagagggcagggagaggaatgtggctaatttctttttcctgcttttatagttttgaagggtacagccagccagattttccagcttagtccattttccttctaaataaaaggcagcactgcgggataagcatgaccagagcatagccagagagcatgggatgcttatagtgataataaaagagggggtgactgagttgtttacactgagcagacaaacttcactggaattgaatacaggtgggcctcctgcattcgatgcacctgttgactttaatttgcttcatctgtctgctgcttgcctccatacctctacttcctaagtgcctttaccccgcctgtgtttgcaacagtggtgggaagaggtgtcagccgttctaattgttctgttaataaaaacaaaatgaaggcccctctctgcaatagacccatgactaaccaggacgccagagagtgcagctgcctcttcaagtccactctcagcaagcagctacctctcccaaattcgccttttcgggcctgctctccatgtgaccaaggagagtgggctagagaagaaaatcaagccaggggatctgagtcagtaaatcccaactcaccaaactctcgctccacaggatgtgtgttggagccggctcacacaagctggagagagggccattgtgcacatctcttccctgttccaattggtgaccccacgttggtcatgtggcatctgttgtggtgggagtatttagaagtcagcaaatctcacaaatcagcatgctcattcttctcaggtagccccttgttaaacaccagcacgtcattgctttcaactctaatatttaactgatgccttcaaatgtctagctgctctaatggctatttctgacagcaggatcccaaatattagataatgcagaaaagcataaaggatgtaaatctctactataagtgtactgcttagagagaaacactgctgatatttgtgatgtatatctttccagacataaatatgtgtgtgtttctaaccacatcttcctagtgcaattattattttaatgtttttatttataaaacaaataacagatttgttcatggacacaattttcaaacaatatatgtctgaagtaaaaagtgaaaaacccaaccctcatyccctctcaccctccctctaaactcctacttcctgggagtagcttctgtccatagtttgtggcatattcttctagatcttcagatagctagactccttttttttttttttaactaaaactagcattatatatgcatactgccccacaactgctttcccacagaaggatgattgcaagctccatgttcccgtacttcattaggctgactcccctgcagcttcatggtcagaaaatagccaaagctgggagctttgggcaaaacacacttttattctaattgttctttccttgatctctgttgtgaacaccagtattaactcagttccatatattcatcaggccccaacatccatctgagaagcgctctcctctccaggcaaacccgtcattt

SEQ ID NO: 689085 - DNA, 905 bp, Homo sapiens
agctgatttgtcacaggaaggcaaacagctcctgatgtaggaggtggggttgagagctagattggagggcaatgttctgtgtcagctggagttggcagtcctctgcccaggcaggggaaggtttgtgattgatcccaatggaccaccgcaccacaggcctcatcatctcactgaagctctgatggacacacagtctttggttgccctcagccctgccaaggcacaaaatagcaaacaggatttagggccaggtattatctcctaagaagatagagaagatggctacctacagtcatgatgttagagacaaaagaaaagcccctataaatgccaagactggccactctccatgttaatctgcttccagtcattagtcatgacatccccaaatagcaggggtttaaaaacactttaataataaatgctggcctatggtcaaagggatcaaagttccttactttatttttctggaaaacaagaacatattttcttctgtgatcataaaccaatcatcgtgggaagtatgattcctcaatagtaaatggtcaacttgtcaagaactataaagagtctgagattatattctacttggcaaattaacatattagcctattactgttgcatgaatgctgacagaaggcaccagacttctggctcagagacaaaggactttatcacccagagcacagaaaggagcakgagctacacgttcatattagttccccttcccccgacacacccaccaaattccacaaagcaactgcatggatgctccacacacatggacttacatcacagctaaagaaaacccaagtttaaggaacctcaatcatttataatgggctgcaagaaaaccttcccaaactttgctcccaaacagacattatctttatcatattggacag

SEQ ID NO: 689086 - DNA, 615 bp, Homo sapiens
tctcaccccaacctttccagctctaggtgttttatatattttaagcattttttcctgtcgttattaattattagtttagttgcatttattctattattagtgagagtaagcatttgattttatatatcttgacctacacttatttgcattaccttttcatgatctcttacccctcctatggtttctactattttttgacattttaatcagtaatttggatgacagttgacaggcttattggtttatttatttagagacrtggtctctctctgttacccaggctggagtgcagcagcatgatcatggctcactgcagccttgacctcccaggctcaagcaatcctcccatttcagccaccccagtagctggtgtgtgccatcacacccacctaatttttatatgttttgtaaagacagggtttcatcatattgcccaagctgcttttgaactcctgggcacaagcgatacacctgctttgacctcccaacacgttgggattacaggcatgagccaccatgcccgttaggtttatcagatttagagttcccatggagcgataagggagagctaatatctccttctaaactacctgaaataatgaaccaattctacaa

SEQ ID NO: 689087 - DNA, 588 bp, Homo sapiens
taataaaaaaagattggcttcattattgaaataaaaatcagaggcgactactcataggaaatccaatctgctcagaggtaataaaataaaacagttaagttatattagatttaatttcccccttacctctggatgccgtagttttatttatctgagtgcctatcctgtatatatgagttcaaatgtttgaataaaatttacaagtgatcacctttgcgactgtcttctgctctttacatgggcatgtagcgttagcaacaccagccatcaacaaaaactggcattgtcacgactccaatgccaaaaatagtttgtttcatttttaaaattaatattattttaaatttacaagttatamtttcatacattcagaggatacagtagccatcacttatcttttttttggtgagacatttgaaatttacttagttatttttaaatgtacattatcattgactatagtcattccgctgtgcagtagatctcaaaacgaatgcctcctgcctaactgaaaatttgaaccctttgaccagtaacttccccccacctccccacaccctgcacccctaccactttttgccttcaacc

SEQ ID NO: 689088 - DNA, 563 bp, Homo sapiens
cctcacataaacttcctggtgcacagaccagaccccagtcccagacagaggtgctcgctccccggagcacagcaactgcctcactgctgtgtccctccccaggaaggcccctgccagaggktcggccttgctaagggatcagaaaggtagaaccaaggcctgacctgttgcaccaatcagggacgactctgaaggacaacgccagcttccaggaccccctgtggggtcagctgaggcctctgacctgactatagagccactgggccctgcttccctccctcccagacagggctgtatccaagagcactcctgataaacctcctgctctcaaatcactgccttggacatagtgtttccccaggaacatgtctcatggcacttaggaaatggagtccatggacttgaaaggtgactaagatactacatgtatcagaaccaattgcaatgttggggacagtaggatgtcttctaaacccgactaagaaaataaccactgttcacagtgaaacaagaatgctttaagtaagagaataatagcttcttgaaaatgatttattaactgc

SEQ ID NO: 689089 - DNA, 563 bp, Homo sapiens
cctcacataaacttcctggtgcacagaccagaccccagtcccagacagaggtgctcgctccccggagcacagcaactgcctcactgctgtgtccctccccaggaaggcccctgccagagggtcggccttgctaagggatcagaaaggtagaaccaaggcctgacctgttgcaccaatcagggacgactctgaaggacaacgccagcttccaggaccccctgtggggtcagctgaggcctctgacctgactatagagccactgggccctgcttccctccctcccagacagggctgtatccaagagcactcctgataaacctcctgctctcaaatcactgccttggacatagtgtttccccaggaacatgtctcatggcacttaggaaatggagtccatggasttgaaaggtgactaagatactacatgtatcagaaccaattgcaatgttggggacagtaggatgtcttctaaacccgactaagaaaataaccactgttcacagtgaaacaagaatgctttaagtaagagaataatagcttcttgaaaatgatttattaactgc

SEQ ID NO: 689090 - DNA, 2382 bp, Homo sapiens
tttgagactgtggttctacagaaaagtagacatttcaaaagagaatgagtggcttactatggcacatacaactgaaaatttgtgtaagatacaggtggaaaattacctgttaaatttggtaacaggaggtcattagttaccctgacaaatgcacttttttatgaagtgatgaggtgaaaataatacaagttgtttgaagagtgagcaagagagaaagaaataaagacaacacttaaaaaagtttggctatgaagaggagcagataaaaatgttttgtggtatgggtctctcctaaatgcctgcatattaccctataatttatccattgtgatccagagtacgctatgtggtaaatgcctgtatccatttgttcattcactcactcactcattcactcattcaacaaaaatatattggccagacactattctacacactgagtgtccagttaaactgtgaacctggatttatgcctagcagtttcacagatgcatctcaagttctcagcatagtacctctcatgtagtgatgctcagtaggttttcttggcttggcagttggaattttgaacagaactacccagccactggggatcattgtgttcagcatggtgtcaatggtgtgctcaggaaagtcagtttcctgctgctgagacccctcaggaaggtctgcttcctattcctcttcaggttaggttgttcaacattccctccaattcgctgagataatcccataacttcccttttgatctaaattggcccaaatcagattgtcttatttaaaaccaaaggacctcgactaatgcaatttcccccattatcattgtgaaactacttaggctttctccacctggggttcataatagtctacaaaggactagatcaggaaagagagccataggacttaagaagccttctcaaggttaccaaattagtgaggggccaggccaggattcacctaggcagtctagtcacagactcctgtttttttaaccactagctcttctgagaaaagagctcttagtttcttctgcaaaaccaaagagctgatgtggtatatgcaacatgtgtcttcgagctcactccaaagaaccattcttgaaagttggttcctgagagaacaatatgaagaccaaactttagccatgagggcttgaccaggcgtagtttacagtatttggaagtgaattcttgaaataatccttctgagtatttgttctatattagtgcttttaataaacattgagtaatgatctgttctaagttgtattcaatgtcagaagcctggaacgtgaccsttttcttattgctagctaaacatacagtcatatgccttcaaagacatttatgcaggagctttattttgaggagaaagtgaaaaaaaaatctaagcgaatgcctgtagacaactcaaagagtctcctttgaaaggtgttttgaatctgcttttgtgaacaaatgaatgggcttaaattctattccatgcagcatggctgcaaaaccgaagcacatctgcaggtggtgttgaactcagaggttggtcatatctattctgagatctcaaatctacacccaaagctctgaccatatattctccaaagctatgttggaaatactccataccaattcactattaagaaatggaaaaaaaattcagaatgctgatactttgggattaatattgcttttatgtacagtaagctaaaaggcaataaacccaggcaatatctgtgatttgacaaaacatgttttgaagcaggtcaccttgcttgctgtgatagtgtaaatgaaatatttgtctacttattatagaaacaaaatagttagtatccatgttgtaatagcagtagagaaagtagggaggtggagcttgcactatgaattggtgggaaaggacactcaggaagaaaggaatatcccactttgccttttttctctctgtgccctacatctgactcataaggcttcttctaatgcttttcctcctaattttaacaatcaccatttcacatagtactgcgaaattttgttgactcagcacaagttctgcaaatattttcagaagaagcaactgcccatcttcccccactcccatgctttcgtgtaacagtagctttgcattttatgaggcttggatacaacacattttaaatacattccaagccaattcaaatttgattctacttgtaagtatcttctgggatggtgatgaaaaaaaaattcaaaaaaatcatggaaatggaggccgtttttacatggaagatattttctacaagttaccttgcagtttttttcttttttcttccgtgtgtgtttttctttttttctctgcctggtattggtgctcatagtgaaaaagtaacaagcacagaaggaaatgtta

SEQ ID NO: 689091 - DNA, 1637 bp, Homo sapiens
ttatgtactccctcatattaatgaagataatcagatcttatgtttcttatgtaatattgctttattcacaattttctttgtttgtttaaaaaccacattgggcataggtgcaagagtaacagaaaatctaagacaagaaataagttaaaaaatattatatgtcagcaaagaaataagtattgcttcagcatttttataagtacataaatatttacttttttaaatcatccctaagccactgtaacatattacacttctgtaatattttacacaaattcactcatcaattgtgaaaagagacgaaccaccactgaagaaacatgaaacaatgttgtcttcattgtaaaaaatgcaggtactgagagatcaccaatactagagaacagatgggtggatagcaaaagtctgaacattctgaacaaaattttctcttggctaaatataatgctcctttttagagaatgagagaaaagtgtattcttaagaaataatatacgaaaagatttttagtggctaagaatagttaactggctttccatttatgaagcgagtgtattgaattagatatcaggttacttaatatacatatatatacacaaaaatgcatatattatgatttatattactgtcttagttcaggctgatgtaacaaaatgtcacaaactgagtggtttaaagaacagaagtttatttctcatagttctggaggctggaagtccaaaatcagggtgggatatatggttaggatccggtgagagcccattcctcgttagagagcaagcaagttatttttatcgtattaaagccttgatgacaaagaagtggtgggagtgtgttttatttcagtttttgttttctggtttcagactagctttaaataccaaaggttgcataatttttttctacagtrgagattagcactgtacttctactgttttcagagaccacagaggaaagcatcattacctaattattcacatgccgctgaagatggaaacttgttagcttgagatctggcctctctctgtcctggcatccagaaccccctacactcacacacaacctgtttgttagttttcggtcagtgtacgagtcaccagtctttagagtcatgttgttgctgaaggaaatggcagagtggttggaaaagtctatcaaagtttccatgacttcatctaaagattctagtaaatctactccactaaggtgattaaacatgtaacgctagatagagtgagttgctgggaggtttctagagtctggcattattttttaataacaggtcttcgttagcaaagtttccaatccactatcaaaattttactctcttttatccactggtctaactcctagtcattgcaatgggacccccacctatggattcattatcatctaccactgagtatcagagctaagcagaaaaactgaactcattctctattagagacatgcaactatattgtagtcattcttaacagctttcacggttagttaaaaaagggggaacgctaacaagatgttcagcaaaaacccatcttgtaaacacagacatcttcaatttcctctttgctatgagttcttggggtttttcttaatgtaaagagcaatttaaaaatatttctgggcagaggaaaata

SEQ ID NO: 689092 - DNA, 1145 bp, Homo sapiens
tgaagggctgtggagcttatgtattttgagttcagggagacggagatcaggttgtgaggtaaagagcccagcagagggcaaaggactcagccctaattgctattcaggtgtactccagctgtctgcagagggcctctgctcctcagtacctaagtgagatggccttagacttctgaatcccatggactggagattcaacaccctccccagtacatctgctggtcccctgggaggactcgtrgtctcctggtctttttacctctcaaaactctggcctcctctcacatcccttctgtccccatagtacgttctccccaacataaaattcagtcacttcgttcatttccacaacaaaaagttgaccaccgcaagcatttacacaggctttgcagaaaaatggggtggaggtggggttcctggaaaagggccatataataccacacctcgcttttgccatctgctgagtccttctgccttctctccatacttttgtctcttttctcctctttttcaggagcaactcaaaaagttcctaaagctttagtgtgagaggacactgagggctggggtgggagtgaggtggggggtgtgtgagtggggggaactaccctccttgcaagcccttatcaaggcatctttccaaaacacacagactgattgctccaagaggaatttggcaataaaaatctctccatgccacttatattggttagctgaaaagacaaaatccactctggccagattaagcaagagaggatttatgacagagtattaagtgtcttacaaaactactaggagggatttagaagagactttaagttgagatttcagcaaggcttacccaaatgaaacctgggtcacgtgccaataagggggctgctaggtcgcctctgaccaggaccggcccccagcagaatggatgcccctcgcctcccaacgtcatgaggacggtgacagggctgcagtgccagtcccctcacggcagtgcccgcagaaacagcgggagcagcaggcaagggtcttcgttggcttccgcccaaatctcacacagtgcgtctgattcgctgagccttaacgccctcggacccctgaccgcatgggaatctgggaaacgtagtttttagctttccagccttcgcactacc

SEQ ID NO: 689093 - DNA, 592 bp, Homo sapiens
ttatataattaattatatttatataattatatatttatatagtatattatatatttatataattatatataatatatattatatatttatataattatatataatatwttatatattatatataatatatttatatatttatataatatatattatatattatatataatatatattatataaaatatatttatattatatataaaatataatatttatattatatataatatatatataatatatacacacataattatatataacaaattatatgtatatttaatttgttaagatcaactttcttcactcctttttaataattagcatatttcgccagatgtggtagtgtctgcttataatcccagctgcttgggaggctgaagcaggaaattgcttgagcccaggagtttgaggctgcaatgagctgtgatggtgccaccgtactccatcctgcatgacagagtgagaccctgcctcaaaaataataaattaattattagcatattttatcaacatataaaataacttactcttcagattggctaaatgtatatatttaccaacattacagacaactgcaataccaaca

SEQ ID NO: 689094 - DNA, 592 bp, Homo sapiens
ttatataattaattatatttatataattatatatttatatagtatattatatatttatataattatatataatatatattatatatttatataattatatataatattttatatattatatataatatatwtatatatttatataatatatattatatattatatataatatatattatataaaatatatttatattatatataaaatataatatttatattatatataatatatatataatatatacacacataattatatataacaaattatatgtatatttaatttgttaagatcaactttcttcactcctttttaataattagcatatttcgccagatgtggtagtgtctgcttataatcccagctgcttgggaggctgaagcaggaaattgcttgagcccaggagtttgaggctgcaatgagctgtgatggtgccaccgtactccatcctgcatgacagagtgagaccctgcctcaaaaataataaattaattattagcatattttatcaacatataaaataacttactcttcagattggctaaatgtatatatttaccaacattacagacaactgcaataccaaca

SEQ ID NO: 689095 - DNA, 592 bp, Homo sapiens
ttatataattaattatatttatataattatatatttatatagtatattatatatttatataattatatataatatatattatatatttatataattatatataatattttatatattatatataatatatttatatatttatataatatatattatatattatatawaatatatattatataaaatatatttatattatatataaaatataatatttatattatatataatatatatataatatatacacacataattatatataacaaattatatgtatatttaatttgttaagatcaactttcttcactcctttttaataattagcatatttcgccagatgtggtagtgtctgcttataatcccagctgcttgggaggctgaagcaggaaattgcttgagcccaggagtttgaggctgcaatgagctgtgatggtgccaccgtactccatcctgcatgacagagtgagaccctgcctcaaaaataataaattaattattagcatattttatcaacatataaaataacttactcttcagattggctaaatgtatatatttaccaacattacagacaactgcaataccaaca

SEQ ID NO: 689096 - DNA, 592 bp, Homo sapiens
ttatataattaattatatttatataattatatatttatatagtatattatatatttatataattatatataatatatattatatatttatataattatatataatattttatatattatatataatatatttatatatttatataatatatattatatattatatataatatatattatataaaatatatttatattatatataaaatataatatwtatattatatataatatatatataatatatacacacataattatatataacaaattatatgtatatttaatttgttaagatcaactttcttcactcctttttaataattagcatatttcgccagatgtggtagtgtctgcttataatcccagctgcttgggaggctgaagcaggaaattgcttgagcccaggagtttgaggctgcaatgagctgtgatggtgccaccgtactccatcctgcatgacagagtgagaccctgcctcaaaaataataaattaattattagcatattttatcaacatataaaataacttactcttcagattggctaaatgtatatatttaccaacattacagacaactgcaataccaaca

SEQ ID NO: 689097 - DNA, 667 bp, Homo sapiens
gcaattatgtgataaatatttgataccctagttttatatattcataacatttatctaaaaagttatataaaaataaatgcatgcttccaaaagcatatcacttacagtttaaaagccatccaaatgtccatttattaatcataatagttacaagcacactactctgatttttgtgtcttgatggtaagtgctagcataaatgactttagatgcttaaaaaatttctagaagttaaatcacttaagattttttttcttgaaaacttgtgaaagtatctgtaaagtaagattgattatctgtagttaaaacgtgtgggttattgtggagaaatggcatccactgacactcgtaaaatttgcggggggcattaagactgctagctgcacaagggaggtgtgagcctctccaaatgcatatcactgatgtcactcatgatttctacaaagaaaggagttgtgacagccgtctatggagmcttgaagatgtggaaaaagtcactgtgtcagcgagctctgctctacgacttctcccactgtaggacgctcttcctccaggcgatgctgctggtcctcagacactgaacctcattgtgctggaaatgaagaggcactgggaacaaacctggtggattttgacactttggggaccagtggaaagcaaaacttac

SEQ ID NO: 689098 - DNA, 734 bp, Homo sapiens
ttttttacaacaaaaaaatgctattaatgttcatgtacacatctaagacaatttcaggtttgatgactagtaatggaactgccaggatgttaagatatatgcatttttattagaaagtacaaaactgcattatacaaagtggctgtacctattcacacttcctacacattacagcattcgacagggaagaacaccagcacagctttatttatttwttttttttaaaagaaacactagagtatgtcaacctttgaagacccggactttgaaaactgccaagttatgcaacctaatcgccaacagatcaagctatttagaaatctgaatcaagctttctgggaataatactattctgaagatcctcccctgactcctgcctaccacctttctcttcatcctctctatcaaccctactacaacactgctcccacttcaagagactgccgatccagtccccttccattttcactatcactcacccacacctgtctttccatacatccccctacccaatgcagcacagatttcatgatccatcactatcattgacttttttttttgagatagagtcttgctctgtcgctcaggctggagtgcagtggtgcaatctcatctcactgcaacctccactgcccaggttcaagcgattctcctgcctcaccctcctgagtagctgggcttacaggtgtgcgccaccaagtctggctaatttttgtttgtttgtttttttgaga

SEQ ID NO: 689099 - DNA, 3062 bp, Homo sapiens
taatttctgatcccaaagtatttaactgtttctttccttgcctagaaactcttttagtgtttgtggcaaatattctagactcagataaaataaatgataccctttctgatgtttcccctctttttcacaaataaagttaataaatacatatagagaaaatattttaaaatgcttaaaattaatgtacttgtattaacctctttcataacagaaatggaagaacctatgattcagagttgagagcaaatcaattccatgacttcaccggagtgtcacaggttgggttggatttaccaatggaagacttagttgagactgtggaagtttaacaagaaatattttcaacaacaattagatattgagcaataattaggtacaatttagttgcttcctttggattatttgcctaaaggatggagtaaatagacctcgaataaattttttaaatgccaaatgtggaaacgtaactcttcacttgtcatttcacaaggatattgaagctcatttttttttatcaacccctctgttttcaaactggagatactatttttttttctgatagacaaaagaaattgactttagcttaaatttttgtaagccacaaaatctagagcttgatatttatgtttctctcactagtttttaaaacacaataagaatgtaaaaaccaaaacctttcattcgctttttgacatctagcattgtacagctctaataaaatttaataatatttttcaatacatgtcatttcctatgaatttctgaagtattctgttttctatgtgatgtgttgaatgaagatttaatttcctctgcaggcatattattcttagtgtaacaaaggacagctttaattttgtcttttcataagaatttctcaaaatgtattcacattctaattgattggatagaaacttaatagttggtaaattacaacatttctaggataatatataattgagagaaaccaatataattcaacaaatatttattgaatgctctttgtaaattctgagatttcaagcaacttgagagagacaaataatgcacataagtaactgactcaggagcatatgaagtttttctctttgatattttttaaataacttgcgcatactgtgagaagtgtcatcatataggcctagaattaaatatagtatgtactgagaatttctgtcaggcacttagctaaatattttatgtgttattttaattattatattacataaaaaaaaggattcatgacttttcacaagaacgtaggttttgaccaataggagttttattccttggcacaagtaaggacagtaagagtcatctccaaagcagtgtctccccaaaggaaagtgatgggagagttttatgggatgatggagaggggagaggctgcatcactgcatatagaagatgggtcccaattgtgcagacacagtgagtcattatgccagcacataggtcatatgttatggtaatgaagctatagctcctcccatggtggaggtgttagcatgataatgaggaaagttcacttgggttcatctgtaagttgcagggggtctgtcagaagctagttccaaccaacaagatgactacattccacactgtttggggaaagatcaggatggatgtatggcaggaggttgtaaaacagactgattgctcaagttgactaaatttctataatccctgtagaccctccctgtctgcttatactttcagaagctgtgattactcactttataaatcaagaatttgaggcataagaaggatgactaattaaagtcatattgctgaattttaattcaggcttctttgattttaaatccatatttaacattgaaatataaatagaaatgtacatattttgtgggtcaggactgtcttaataaaggacaatataagccataaataataataaagtgtttttcaattaaatttggaatgggaagagaagttggtaggcaaggatgagtaaagaggagagaggatattctaggcaaaacatttgatatttgttgatagctgaggtttccaatagaatacttttgaaagagaggaaaacataattttctctctcctcttttaagttctcactggggccactgtaacaaaagacagattaacaagagaaaaatagaagtttgttagcatgtatatctcatatacatggaaaatacacagaaaaataattcttaaagaggtggtttagattctggccagaatatcattccagctaaaaacaaaaaagaagagtatgccagaggcaagttatgggggtgatcaggaaaaaacatgatgttttatgcagatttaagtggtttccttctttattgatgagtcttttgtgagtagagtcattcttctattcctagtatagagagggagacagtcttatgaatggagattttctttataaatttctgttacaaagggtaacttctttcttcagagcttctgtcatatctgctcttcctcaaaataattagttcaaaataatccttcggccaaagaagcatattttgtggtcacatattctggtctcctacattttgaacagaatacatatgkaaacatgggaagtcaagcagaagacaaaccacgtgggcctctataccatgctgtggagtgtaaactgtatctttccatgaccagcaagtcttagcaaatttaccaagttaagtgattgaatttaaattttacaaagacaactttgacaacaatgtgaaacaatgtaaacaatgtaatgatgagaaggggacaagaatagatcttaaaaattttgaaaatcctctattgtaaaccaaactaaaattctaagtcccccaactgaatgaatggatgcttctctctgccaagagcattccagagtaaatatgaaaaattagttcaggccatgatgggaggtagggatcagacatgactcattgcatcctcctccctttggaaatcaggcacaactgagtagcattaatatcagtacagagatcataagactgacaaaacagactgtagcaataaaataccaaatttcaacctacctctagtacagcatcacatggcag

SEQ ID NO: 689100 - DNA, 724 bp, Homo sapiens
ataattcatgatcctatcatcaagatgtatacctccaattacagtagaatgacttagacataatggtatatacatgaataagctggtattgtaacactaagcgggtgtactccacccagattgtagaggcaagaaaaatatttgtgctgagtttaagttttaaaaagggcctatgtgaaggtatgaaatgtataggtataaaaagttatcctattgcaagaattgtgtacrtattgaatgtaactagtatatatacatgtaagtgtggtgtgtatgcatgtatgtgtatgtgtcagagaaatagttggaataaggctagatacatttgcaggggcccttaccatgatggatcttcccatgaagtttgactttgttgtgaaggatttgtgtggagactgaaagattgcaagcaggtaagtgttatcataggatttgcattttagacagtggcatatcaaatatcccttcaacaaatggtccagctctccaggtaccattaaaaatatacagaaaaaacacaaactcaagctaatgacaatctaaagagcttctggagagcaaaagaaactaccaatagagtaaacagacaacctgcagaatgggagaaaatttttgaaaactatgcatctgacaaaggtctaatatccagtatctataaggaacttaaacaaatttacaagtaaaaagccattaaaaagcgggcaaagaacatgagcagacgctt

SEQ ID NO: 689101 - DNA, 675 bp, Homo sapiens
ctcacacctgtaatccagcactttgggaggcagaggtgggcgtatcacctgaggtagggagttcgagaccagcctgaccaatacagagaaaccccgtctctactaaaaayataaaattagtcaggcatggtggcgcatgcctgtactcccaactactcagggggctgagacaggagaatcgcttgaacctgggaggtggaggttacgttgagctgagatcacgcgccactgcactccagcctgggcaacaaaagcgaaactccaactcaaaacaaaacaaaaaaagagtccataatggccaggcacagtggctcacacctgcaatcatggcactttgggaggccaaggcaagaggatcacttgagagcccaggagttggagaccagcctggccaacatggcaaaaccccatctctactaaaaatacaaaaattagccaggcatggtggcatgcgcgtgtactctcagctattcgggaggctgaggcatgagaattgcttgaaccagggaaggctgcagtgagacaagattgtgccactgcactccagcctgagcgatagagcaagactctatctcaaaaaataaaaaaaagtccataatgagaagagttttttaaatggaaaaactaaagttcaggaaaattaagtggcatccacactcaggactccagttttga

SEQ ID NO: 689102 - DNA, 675 bp, Homo sapiens
ctcacacctgtaatccagcactttgggaggcagaggtgggcgtatcacctgaggtagggagttcgagaccagcctgaccaatacagagaaaccccgtctctactaaaaatataaaattagtcaggcatggtggcgcatgcctgtactyccaactactcagggggctgagacaggagaatcgcttgaacctgggaggtggaggttacgttgagctgagatcacgcgccactgcactccagcctgggcaacaaaagcgaaactccaactcaaaacaaaacaaaaaaagagtccataatggccaggcacagtggctcacacctgcaatcatggcactttgggaggccaaggcaagaggatcacttgagagcccaggagttggagaccagcctggccaacatggcaaaaccccatctctactaaaaatacaaaaattagccaggcatggtggcatgcgcgtgtactctcagctattcgggaggctgaggcatgagaattgcttgaaccagggaaggctgcagtgagacaagattgtgccactgcactccagcctgagcgatagagcaagactctatctcaaaaaataaaaaaaagtccataatgagaagagttttttaaatggaaaaactaaagttcaggaaaattaagtggcatccacactcaggactccagttttga

SEQ ID NO: 689103 - DNA, 915 bp, Homo sapiens
gtatttcccctagtatctccgctttacagatgacaaaattgaggctgaaaggttaagcacttttccaaggtcacacaactaagaagctgcaattacacaggtaatgaaacccagatctacaagattttaaagctaaaaggagcatttggaaatgcaaatgattttatgacaatgtccattgttaagattaaatggggccagaagcagtggctcatgcccataatcctagcactttgggaggccaaggcaggtggatcacctgaggtcaggagttcgagaccagcctggccaacatggtgaaaccctgtctctcccaaaaatacaaaaattagctgggcatggtggcaggcgcctgtaatcccagctactcgggagactgaggcaggagaactgcttgaacctgaaaggcagaggtcgcagtgagctgagatagtaccactgcactccagcctgggtgacagagcaagactccaactcaaaaaaaaaaaaaaaaaaaaaaaaagattaaatggtatatgtcaaccatttggtctccagggtttacattaraatagcatttttttgtgtgtgccaggggcagtgacacacacctgtaatctcagcactttgggaggctgaagtgggaggactgcttgagcccaggagtacaagaccagcctgggcaacaaagcaagaccccatctctactacaaataatgttttaaaattagcagggggccgggcacagtggctcacgcctgtaatcccagcactttgggaggctgaggtgggtggatcacttgaggtcaggagctcgagaccagcctggccaacatggtgaaaccccgtctctactaaaaatacgaaaattagctgggcgtggtggtgcacgcctgtaatcccagctactcaggaggctgaaataggagaatctgc

SEQ ID NO: 689104 - DNA, 624 bp, Homo sapiens
tatrtttctaggtttggttacaatttgttaagaaaagtagatttgcaaactcactacttttgaaatattaaaaatacatgccatgaatttctacttcagcacagatttggacaaccaccttatgtatggaaagaaaatttactgaatttagtgctaggcatagatgagaatttctacttgaaaaaagcccttaaaacttttcctgctgtactgttcaattattaatatatttaatgcacagacgcagttcacaatgtggactgatgtgaacttgtgttgcattggctttataaattaggacagttgattttacttatcctcctgatttgcccagatatgatctctataaaaaatcacagaaatttttgtaaaataatcttgcagttcttgtttttgctctttttcttatttttttctcaacaaaaaattatttctgatgttctattttcacttaaatgaaaacattccatggaagaagtacaaagaagtaatgctttgaaatgacagtccctgaattttcaagaaagccagattcttccacatccatagtcttcctttgtcctgttaataatcctcatgatgagaggaaagttactgcctagtgttttatgactgggagaatgg

SEQ ID NO: 689105 - DNA, 2590 bp, Homo sapiens
attcccaatagaaaagacatggacccaayctaaatgcccatcaatggtagacgggataaagaaaatatggtacatatacgccatgggatactatgcagccacaaaggaagaatgagatcatgttctctgcagcaacatggatgaatttggaggccattatcctaaatgaactaatgtaggaacagaaaaccaaataccacatgttcttacttataagtggacgttaaacattgagtacacatggacgcaaagaagggaacaacacacactggggcctacttaagggtggagggtaggaagagggtgaagactgaaaaactacctgttggacactatgcttattaccggggtgatgaaataatctgtacgtccaacacctgtgacactcaatttacctgtataacaaacctgcacatgtacccctgaacctaaaatagaagtttttaaaaagtatatccacctatttcaagaggctttggcttcaagtaatagacaatccaaagtagtttaggggaaaaggttatcttctgaatcgtttatctgaaagttcagtgacggaactgcactagattgatttatttcatcagggcaggattcgttttacttcaagttgctaggctatattttcctctaaatactgtcttcaccttcgggctggtttctcggagtgcaaaactgatgttgctgtgctagcttcatggcatattgtgaatacattcctgagaaagaaagaacacctcttatgggtcctctagagattccctcctaaagtcagggaatctccccttggagctcctcccaggaaaccttcttgcactcatccttggcctgcccagggtgatgcccccaccaatcacccattcctggggtacaatcaatatcacgtgggtgctctgaacaatcacctcctggagcgaggctgtatcaacctgtcctgagcaacacgggttgcctggcagaggggaggccactgaatgaaaattggcatatatttgggggagtgaagagggcaatgggtactgagtgggaaaccaataattatattactgcctcacagaaaaaaatgcatgcaaagagcaaataaatgtttagaaagaaagacaagagagatttacattcctaaataacaaaacaacatataaaactatagtgataaaaatgttgcctcttgctacaggattggacagagacatcagtgaaagatagcagagccccatacagaccccgatacagtggacaagtttagtacatgatggacagggcatctcaaaccagtagataacaaacggaccattcagtgaatggcatcatctgatcatctatccattcaggagaaaattaagctagtgcccagcttcccaacagacacaaaaataatctccaaatacaaataaagggcttaggataaaatatgtgtcttaattcgaacagaaatgagaaagtatgtttacaatgttttggtgaggaaaagcatttctaagtaagtcacaaagcccagcaagcacaaaagaaaaggctgtctaagatatgaaaattgaaaaaaaaattggatgacaaagatgacattccaggtttaaaagataaccttggaaaaaaatattggcacttacggggaaataagttattagttatttaactgatactcaaaatacagaaagagggtctatgtacttttaagtcaaaggccttcaaactaagagaagtccctgctcatagctgaccttttctgggaggctttggagaatgtcctcagttgatagaagcccctcagaaatcccctagagacagcaggcaaaggaccagaatctgcctcaaagaggaccactctgtggtgtcattcagaaactcccaccttcaaaccagggccagttgtggctgaacaccccctgttgcttcatcttgctcagctccttcccttccctgtcctgctattctcttttgctcgctgaagagccggctctcaatagttccatgcacctgcatcccatggtttccaccctcagaacctccctccccctactgcctcctgcatccttcctccttcaaataaaagtcactccaaagggcatccccctgaccctccagactaacacagctccctccgttatgagccccatagcttcctgaacattttaggtgagacactagcaggataagctgagtagagggccgcagaaaataatgccccatgccagcagctcccttcagaggggaggcagggaggccaggggttggggcaggagaggcattggagaaagtccatttctctctttatgtctatatatctatatagacacacacacatacatgcacacacacatatatagatacacacacacatatagatacacacacatatatatgtttttatatatatttaactcaagcacttcaaaactgattcagaaatgtcactgctttaagatataatgtattgttgcttacttctttcagttaagactatgttgcttctataagatacaaaaatcttttataaagccttggcttaatcgttgaatgtgtttgaattaaaaaggaaatgtcagatactgcatgtttgcacttacaggtggaagctacacaatgtgca

SEQ ID NO: 689106 - DNA, 2590 bp, Homo sapiens
attcccaatagaaaagacatggacccaatctaaatgcccatcaatggtagacgggataaagaaaatatggtacrtatacgccatgggatactatgcagccacaaaggaagaatgagatcatgttctctgcagcaacatggatgaatttggaggccattatcctaaatgaactaatgtaggaacagaaaaccaaataccacatgttcttacttataagtggacgttaaacattgagtacacatggacgcaaagaagggaacaacacacactggggcctacttaagggtggagggtaggaagagggtgaagactgaaaaactacctgttggacactatgcttattaccggggtgatgaaataatctgtacgtccaacacctgtgacactcaatttacctgtataacaaacctgcacatgtacccctgaacctaaaatagaagtttttaaaaagtatatccacctatttcaagaggctttggcttcaagtaatagacaatccaaagtagtttaggggaaaaggttatcttctgaatcgtttatctgaaagttcagtgacggaactgcactagattgatttatttcatcagggcaggattcgttttacttcaagttgctaggctatattttcctctaaatactgtcttcaccttcgggctggtttctcggagtgcaaaactgatgttgctgtgctagcttcatggcatattgtgaatacattcctgagaaagaaagaacacctcttatgggtcctctagagattccctcctaaagtcagggaatctccccttggagctcctcccaggaaaccttcttgcactcatccttggcctgcccagggtgatgcccccaccaatcacccattcctggggtacaatcaatatcacgtgggtgctctgaacaatcacctcctggagcgaggctgtatcaacctgtcctgagcaacacgggttgcctggcagaggggaggccactgaatgaaaattggcatatatttgggggagtgaagagggcaatgggtactgagtgggaaaccaataattatattactgcctcacagaaaaaaatgcatgcaaagagcaaataaatgtttagaaagaaagacaagagagatttacattcctaaataacaaaacaacatataaaactatagtgataaaaatgttgcctcttgctacaggattggacagagacatcagtgaaagatagcagagccccatacagaccccgatacagtggacaagtttagtacatgatggacagggcatctcaaaccagtagataacaaacggaccattcagtgaatggcatcatctgatcatctatccattcaggagaaaattaagctagtgcccagcttcccaacagacacaaaaataatctccaaatacaaataaagggcttaggataaaatatgtgtcttaattcgaacagaaatgagaaagtatgtttacaatgttttggtgaggaaaagcatttctaagtaagtcacaaagcccagcaagcacaaaagaaaaggctgtctaagatatgaaaattgaaaaaaaaattggatgacaaagatgacattccaggtttaaaagataaccttggaaaaaaatattggcacttacggggaaataagttattagttatttaactgatactcaaaatacagaaagagggtctatgtacttttaagtcaaaggccttcaaactaagagaagtccctgctcatagctgaccttttctgggaggctttggagaatgtcctcagttgatagaagcccctcagaaatcccctagagacagcaggcaaaggaccagaatctgcctcaaagaggaccactctgtggtgtcattcagaaactcccaccttcaaaccagggccagttgtggctgaacaccccctgttgcttcatcttgctcagctccttcccttccctgtcctgctattctcttttgctcgctgaagagccggctctcaatagttccatgcacctgcatcccatggtttccaccctcagaacctccctccccctactgcctcctgcatccttcctccttcaaataaaagtcactccaaagggcatccccctgaccctccagactaacacagctccctccgttatgagccccatagcttcctgaacattttaggtgagacactagcaggataagctgagtagagggccgcagaaaataatgccccatgccagcagctcccttcagaggggaggcagggaggccaggggttggggcaggagaggcattggagaaagtccatttctctctttatgtctatatatctatatagacacacacacatacatgcacacacacatatatagatacacacacacatatagatacacacacatatatatgtttttatatatatttaactcaagcacttcaaaactgattcagaaatgtcactgctttaagatataatgtattgttgcttacttctttcagttaagactatgttgcttctataagatacaaaaatcttttataaagccttggcttaatcgttgaatgtgtttgaattaaaaaggaaatgtcagatactgcatgtttgcacttacaggtggaagctacacaatgtgca

SEQ ID NO: 689107 - DNA, 2590 bp, Homo sapiens
attcccaatagaaaagacatggacccaatctaaatgcccatcaatggtagacgggataaagaaaatatggtacatatacgccatgggatactatgcagccacaaaggaagaatgagatcatgttctctgcagcaacatggatgaatttggaggccattatcctaaatgaactaatgtaggaacagaaaaccaaataccacatgttcttacttataagtggacgttaaacattgagtacacatggacgcaaagaagggaacaacacacactggggcctacttaagggtggagggtaggaagagggtgaagactgaaaaactacctgttggacactatgcttattaccggggtgatgaaataatctgtacgtccaacacctgtgacactcaatttacctgtataacaaacctgcacatgtacccctgaacctaaaatagaagtttttaaaaagtatatccacctatttcaagaggctttggcttcaagtaatagacaatccaaagtagtttaggggaaaaggttatcttctgaatcgtttatctgaaagttcagtgacggaactgcactagattgatttatttcatcagggcaggattcgttttacttcaagttgctaggctatattttcctctaaatactgtcttcaccttcgggctggtttctcggagtgcaaaactgatgttgctgtsctagcttcatggcatattgtgaatacattcctgagaaagaaagaacacctcttatgggtcctctagagattccctcctaaagtcagggaatctccccttggagctcctcccaggaaaccttcttgcactcatccttggcctgcccagggtgatgcccccaccaatcacccattcctggggtacaatcaatatcacgtgggtgctctgaacaatcacctcctggagcgaggctgtatcaacctgtcctgagcaacacgggttgcctggcagaggggaggccactgaatgaaaattggcatatatttgggggagtgaagagggcaatgggtactgagtgggaaaccaataattatattactgcctcacagaaaaaaatgcatgcaaagagcaaataaatgtttagaaagaaagacaagagagatttacattcctaaataacaaaacaacatataaaactatagtgataaaaatgttgcctcttgctacaggattggacagagacatcagtgaaagatagcagagccccatacagaccccgatacagtggacaagtttagtacatgatggacagggcatctcaaaccagtagataacaaacggaccattcagtgaatggcatcatctgatcatctatccattcaggagaaaattaagctagtgcccagcttcccaacagacacaaaaataatctccaaatacaaataaagggcttaggataaaatatgtgtcttaattcgaacagaaatgagaaagtatgtttacaatgttttggtgaggaaaagcatttctaagtaagtcacaaagcccagcaagcacaaaagaaaaggctgtctaagatatgaaaattgaaaaaaaaattggatgacaaagatgacattccaggtttaaaagataaccttggaaaaaaatattggcacttacggggaaataagttattagttatttaactgatactcaaaatacagaaagagggtctatgtacttttaagtcaaaggccttcaaactaagagaagtccctgctcatagctgaccttttctgggaggctttggagaatgtcctcagttgatagaagcccctcagaaatcccctagagacagcaggcaaaggaccagaatctgcctcaaagaggaccactctgtggtgtcattcagaaactcccaccttcaaaccagggccagttgtggctgaacaccccctgttgcttcatcttgctcagctccttcccttccctgtcctgctattctcttttgctcgctgaagagccggctctcaatagttccatgcacctgcatcccatggtttccaccctcagaacctccctccccctactgcctcctgcatccttcctccttcaaataaaagtcactccaaagggcatccccctgaccctccagactaacacagctccctccgttatgagccccatagcttcctgaacattttaggtgagacactagcaggataagctgagtagagggccgcagaaaataatgccccatgccagcagctcccttcagaggggaggcagggaggccaggggttggggcaggagaggcattggagaaagtccatttctctctttatgtctatatatctatatagacacacacacatacatgcacacacacatatatagatacacacacacatatagatacacacacatatatatgtttttatatatatttaactcaagcacttcaaaactgattcagaaatgtcactgctttaagatataatgtattgttgcttacttctttcagttaagactatgttgcttctataagatacaaaaatcttttataaagccttggcttaatcgttgaatgtgtttgaattaaaaaggaaatgtcagatactgcatgtttgcacttacaggtggaagctacacaatgtgca

SEQ ID NO: 689108 - DNA, 2590 bp, Homo sapiens
attcccaatagaaaagacatggacccaatctaaatgcccatcaatggtagacgggataaagaaaatatggtacatatacgccatgggatactatgcagccacaaaggaagaatgagatcatgttctctgcagcaacatggatgaatttggaggccattatcctaaatgaactaatgtaggaacagaaaaccaaataccacatgttcttacttataagtggacgttaaacattgagtacacatggacgcaaagaagggaacaacacacactggggcctacttaagggtggagggtaggaagagggtgaagactgaaaaactacctgttggacactatgcttattaccggggtgatgaaataatctgtacgtccaacacctgtgacactcaatttacctgtataacaaacctgcacatgtacccctgaacctaaaatagaagtttttaaaaagtatatccacctatttcaagaggctttggcttcaagtaatagacaatccaaagtagtttaggggaaaaggttatcttctgaatcgtttatctgaaagttcagtgacggaactgcactagattgatttatttcatcagggcaggattcgttttacttcaagttgctaggctatattttcctctaaatactgtcttcaccttcgggctggtttctcggagtgcaaaactgatgttgctgtgctagcttcatggcatattgtgaatacattcctgagaaagaaagaacacctcttatgggtcctctagagattccctcctaaagtcagggaatctccccttggagctcctcccaggaaaccttcttgcaytcatccttggcctgcccagggtgatgcccccaccaatcacccattcctggggtacaatcaatatcacgtgggtgctctgaacaatcacctcctggagcgaggctgtatcaacctgtcctgagcaacacgggttgcctggcagaggggaggccactgaatgaaaattggcatatatttgggggagtgaagagggcaatgggtactgagtgggaaaccaataattatattactgcctcacagaaaaaaatgcatgcaaagagcaaataaatgtttagaaagaaagacaagagagatttacattcctaaataacaaaacaacatataaaactatagtgataaaaatgttgcctcttgctacaggattggacagagacatcagtgaaagatagcagagccccatacagaccccgatacagtggacaagtttagtacatgatggacagggcatctcaaaccagtagataacaaacggaccattcagtgaatggcatcatctgatcatctatccattcaggagaaaattaagctagtgcccagcttcccaacagacacaaaaataatctccaaatacaaataaagggcttaggataaaatatgtgtcttaattcgaacagaaatgagaaagtatgtttacaatgttttggtgaggaaaagcatttctaagtaagtcacaaagcccagcaagcacaaaagaaaaggctgtctaagatatgaaaattgaaaaaaaaattggatgacaaagatgacattccaggtttaaaagataaccttggaaaaaaatattggcacttacggggaaataagttattagttatttaactgatactcaaaatacagaaagagggtctatgtacttttaagtcaaaggccttcaaactaagagaagtccctgctcatagctgaccttttctgggaggctttggagaatgtcctcagttgatagaagcccctcagaaatcccctagagacagcaggcaaaggaccagaatctgcctcaaagaggaccactctgtggtgtcattcagaaactcccaccttcaaaccagggccagttgtggctgaacaccccctgttgcttcatcttgctcagctccttcccttccctgtcctgctattctcttttgctcgctgaagagccggctctcaatagttccatgcacctgcatcccatggtttccaccctcagaacctccctccccctactgcctcctgcatccttcctccttcaaataaaagtcactccaaagggcatccccctgaccctccagactaacacagctccctccgttatgagccccatagcttcctgaacattttaggtgagacactagcaggataagctgagtagagggccgcagaaaataatgccccatgccagcagctcccttcagaggggaggcagggaggccaggggttggggcaggagaggcattggagaaagtccatttctctctttatgtctatatatctatatagacacacacacatacatgcacacacacatatatagatacacacacacatatagatacacacacatatatatgtttttatatatatttaactcaagcacttcaaaactgattcagaaatgtcactgctttaagatataatgtattgttgcttacttctttcagttaagactatgttgcttctataagatacaaaaatcttttataaagccttggcttaatcgttgaatgtgtttgaattaaaaaggaaatgtcagatactgcatgtttgcacttacaggtggaagctacacaatgtgca

SEQ ID NO: 689109 - DNA, 2590 bp, Homo sapiens
attcccaatagaaaagacatggacccaatctaaatgcccatcaatggtagacgggataaagaaaatatggtacatatacgccatgggatactatgcagccacaaaggaagaatgagatcatgttctctgcagcaacatggatgaatttggaggccattatcctaaatgaactaatgtaggaacagaaaaccaaataccacatgttcttacttataagtggacgttaaacattgagtacacatggacgcaaagaagggaacaacacacactggggcctacttaagggtggagggtaggaagagggtgaagactgaaaaactacctgttggacactatgcttattaccggggtgatgaaataatctgtacgtccaacacctgtgacactcaatttacctgtataacaaacctgcacatgtacccctgaacctaaaatagaagtttttaaaaagtatatccacctatttcaagaggctttggcttcaagtaatagacaatccaaagtagtttaggggaaaaggttatcttctgaatcgtttatctgaaagttcagtgacggaactgcactagattgatttatttcatcagggcaggattcgttttacttcaagttgctaggctatattttcctctaaatactgtcttcaccttcgggctggtttctcggagtgcaaaactgatgttgctgtgctagcttcatggcatattgtgaatacattcctgagaaagaaagaacacctcttatgggtcctctagagattccctcctaaagtcagggaatctccccttggagctcctcccaggaaaccttcttgcactcatccttggcctgcccagggtgatgcmcccaccaatcacccattcctggggtacaatcaatatcacgtgggtgctctgaacaatcacctcctggagcgaggctgtatcaacctgtcctgagcaacacgggttgcctggcagaggggaggccactgaatgaaaattggcatatatttgggggagtgaagagggcaatgggtactgagtgggaaaccaataattatattactgcctcacagaaaaaaatgcatgcaaagagcaaataaatgtttagaaagaaagacaagagagatttacattcctaaataacaaaacaacatataaaactatagtgataaaaatgttgcctcttgctacaggattggacagagacatcagtgaaagatagcagagccccatacagaccccgatacagtggacaagtttagtacatgatggacagggcatctcaaaccagtagataacaaacggaccattcagtgaatggcatcatctgatcatctatccattcaggagaaaattaagctagtgcccagcttcccaacagacacaaaaataatctccaaatacaaataaagggcttaggataaaatatgtgtcttaattcgaacagaaatgagaaagtatgtttacaatgttttggtgaggaaaagcatttctaagtaagtcacaaagcccagcaagcacaaaagaaaaggctgtctaagatatgaaaattgaaaaaaaaattggatgacaaagatgacattccaggtttaaaagataaccttggaaaaaaatattggcacttacggggaaataagttattagttatttaactgatactcaaaatacagaaagagggtctatgtacttttaagtcaaaggccttcaaactaagagaagtccctgctcatagctgaccttttctgggaggctttggagaatgtcctcagttgatagaagcccctcagaaatcccctagagacagcaggcaaaggaccagaatctgcctcaaagaggaccactctgtggtgtcattcagaaactcccaccttcaaaccagggccagttgtggctgaacaccccctgttgcttcatcttgctcagctccttcccttccctgtcctgctattctcttttgctcgctgaagagccggctctcaatagttccatgcacctgcatcccatggtttccaccctcagaacctccctccccctactgcctcctgcatccttcctccttcaaataaaagtcactccaaagggcatccccctgaccctccagactaacacagctccctccgttatgagccccatagcttcctgaacattttaggtgagacactagcaggataagctgagtagagggccgcagaaaataatgccccatgccagcagctcccttcagaggggaggcagggaggccaggggttggggcaggagaggcattggagaaagtccatttctctctttatgtctatatatctatatagacacacacacatacatgcacacacacatatatagatacacacacacatatagatacacacacatatatatgtttttatatatatttaactcaagcacttcaaaactgattcagaaatgtcactgctttaagatataatgtattgttgcttacttctttcagttaagactatgttgcttctataagatacaaaaatcttttataaagccttggcttaatcgttgaatgtgtttgaattaaaaaggaaatgtcagatactgcatgtttgcacttacaggtggaagctacacaatgtgca

SEQ ID NO: 689110 - DNA, 2590 bp, Homo sapiens
attcccaatagaaaagacatggacccaatctaaatgcccatcaatggtagacgggataaagaaaatatggtacatatacgccatgggatactatgcagccacaaaggaagaatgagatcatgttctctgcagcaacatggatgaatttggaggccattatcctaaatgaactaatgtaggaacagaaaaccaaataccacatgttcttacttataagtggacgttaaacattgagtacacatggacgcaaagaagggaacaacacacactggggcctacttaagggtggagggtaggaagagggtgaagactgaaaaactacctgttggacactatgcttattaccggggtgatgaaataatctgtacgtccaacacctgtgacactcaatttacctgtataacaaacctgcacatgtacccctgaacctaaaatagaagtttttaaaaagtatatccacctatttcaagaggctttggcttcaagtaatagacaatccaaagtagtttaggggaaaaggttatcttctgaatcgtttatctgaaagttcagtgacggaactgcactagattgatttatttcatcagggcaggattcgttttacttcaagttgctaggctatattttcctctaaatactgtcttcaccttcgggctggtttctcggagtgcaaaactgatgttgctgtgctagcttcatggcatattgtgaatacattcctgagaaagaaagaacacctcttatgggtcctctagagattccctcctaaagtcagggaatctccccttggagctcctcccaggaaaccttcttgcactcatccttggcctgcccagggtgatgcccccaccaatcacccattcctggggtacaatcaatatcacgtgggtgctctgaacaatcacctcctggagcgaggctgtatcaacctgtcctgagcaacacgggttgcctggcagaggggaggscactgaatgaaaattggcatatatttgggggagtgaagagggcaatgggtactgagtgggaaaccaataattatattactgcctcacagaaaaaaatgcatgcaaagagcaaataaatgtttagaaagaaagacaagagagatttacattcctaaataacaaaacaacatataaaactatagtgataaaaatgttgcctcttgctacaggattggacagagacatcagtgaaagatagcagagccccatacagaccccgatacagtggacaagtttagtacatgatggacagggcatctcaaaccagtagataacaaacggaccattcagtgaatggcatcatctgatcatctatccattcaggagaaaattaagctagtgcccagcttcccaacagacacaaaaataatctccaaatacaaataaagggcttaggataaaatatgtgtcttaattcgaacagaaatgagaaagtatgtttacaatgttttggtgaggaaaagcatttctaagtaagtcacaaagcccagcaagcacaaaagaaaaggctgtctaagatatgaaaattgaaaaaaaaattggatgacaaagatgacattccaggtttaaaagataaccttggaaaaaaatattggcacttacggggaaataagttattagttatttaactgatactcaaaatacagaaagagggtctatgtacttttaagtcaaaggccttcaaactaagagaagtccctgctcatagctgaccttttctgggaggctttggagaatgtcctcagttgatagaagcccctcagaaatcccctagagacagcaggcaaaggaccagaatctgcctcaaagaggaccactctgtggtgtcattcagaaactcccaccttcaaaccagggccagttgtggctgaacaccccctgttgcttcatcttgctcagctccttcccttccctgtcctgctattctcttttgctcgctgaagagccggctctcaatagttccatgcacctgcatcccatggtttccaccctcagaacctccctccccctactgcctcctgcatccttcctccttcaaataaaagtcactccaaagggcatccccctgaccctccagactaacacagctccctccgttatgagccccatagcttcctgaacattttaggtgagacactagcaggataagctgagtagagggccgcagaaaataatgccccatgccagcagctcccttcagaggggaggcagggaggccaggggttggggcaggagaggcattggagaaagtccatttctctctttatgtctatatatctatatagacacacacacatacatgcacacacacatatatagatacacacacacatatagatacacacacatatatatgtttttatatatatttaactcaagcacttcaaaactgattcagaaatgtcactgctttaagatataatgtattgttgcttacttctttcagttaagactatgttgcttctataagatacaaaaatcttttataaagccttggcttaatcgttgaatgtgtttgaattaaaaaggaaatgtcagatactgcatgtttgcacttacaggtggaagctacacaatgtgca

SEQ ID NO: 689111 - DNA, 657 bp, Homo sapiens
gacactaacctcattcctgagggctgcaccctcacaccctaatcacctcccaaaggtcccatctcctaatgccattacattgagggttaagatttcaacatatgaacttgtggggaggcaccagcattcagtctatagcagaacagatcatgaaaatggagccaacacacttakctgacagacttaaaatgtggggtgtcaaaatactgagccaaagctgttggcctaagtaactgaagtcccctttcattgagataagcaatcgtagcttcttgggaggaaatcaaaattttttaaaaggcatgttaagtttgagatgtgtaatagccatccaagctgagatcacaggtcagctgttggatctataagcccaaagttcagacaacaaggtaggagctggagataaaaatttggaaaccatcattatataaatggggttgaatgagaccacctgaagaatagatgtatagagagtaaatcatgaatcacatggagataaatcttgtccacagagagaaaattagtattgtaaatgtcacttctcttcaaacttacctataaatttgatgttactccaatcaaaatcccaaaggaatttctatggaacataagccactaattctgaaaagtatatgctggtgaggttgcagagaaagg

SEQ ID NO: 689112 - DNA, 603 bp, Homo sapiens
tcttcaaggattgtgaacgtagtgctatcagctatgtactaacctcaggtagagttaatatagtagaataaagaatgtccatagcaaatacagaattttactcatgataaataccttattacttaagtattaatctcactaactgaaatgaaccaatggtaaggtcagagaaatgtgcaacatggcatagcggccacagagctgtttatgttggtgggtgttatctaaaaagtcttacaagcataataaaaatgtaaaaaataagagtacatgaaatcaaaagcaaagctaaatattttaaatgttcacatagaaagaacttcactgatgattacagatgcaaattgaagtaataagactacctgggatattaaatgtgttactcaggggagatgttcgttttaaaygctgtagagatttctttgttggtggatgctaaaaataaagtcttaaagagcaagataataatttttaaatacaggagtttgcagagaatgcgatacttacagtattcaaatataattctaaatgtaaatttttcaatggatgtaaaaaactatctaaatctcccaacaaatttgtaatgcactgtggaataccatg

SEQ ID NO: 689113 - DNA, 976 bp, Homo sapiens
ggccgggcacggtggctcacgtctgtaatcctagcactttgggaggccaaggccagtggatcatttgaggtcaggagtttaagaccagcctggccaaaccccatctctactaaaaatacaaaaattagccaggcgtggtggtacatgcctgtaatcccagctactcaggagactgaggcaagagaattgcttgaacccgggaggcggaggttgcagtgagcctgggcaacagagcaaaactccatctcaaaaaataaataaataacaaatgctgaacttttcagtaaatctgcaatgatatacaaatgtaagaaataaagagaggataaatgataaaacaaagttaacagaaatcctgaaataattcaacaaatatttatttagagaagagattaactgagggatccaaaaatttactagttgtatagatggtcttcaagatactaagaaacactgggaactgtatataaattgtacaaaattctttatatctgtgtacattttggagaatagtgtttaagctttcattccattcttaaaggagtctataaccacaaggagattttgatcaaatgatcaactagagaaacagagaaaaaaagcaatgaaccaaaaaacataaagaaaagaaaagcaacgaatcagagggctttatgaaactaccaaagaatgggcactgtgggagtatgggagggagagaaatgaaatactgcataagttcgagcaggtttcaaggtcttcattacygatgcacatggctgaagtgatgtataagtacaggcctatctcagagttgttgcacggtcagttccagaccactgcaataaagtgaataatactaaaaagtgggtcacacaaatgctttggtctccctatgcatataaaagttatgtttacactatactatagtctaattaagtgttatagcatcatatctttaaaaatgtacatgccttgctaggtgcagtggctcacg

SEQ ID NO: 689114 - DNA, 632 bp, Homo sapiens
tattgagtgttttgtccattaatagccactttatattttaattgcattatatgaaatggtaataagaagggattcagaagaaattgtgaccttttgagaaattcttggctgtttaaaacattagctgtggttctcagagcaaatgtgtacaaaagattatccatcagctatgatacaccaatgaaggaagtgatgaattgtgattttaaatgatgctctaggattactaaatatgtatttaccagaagtggagataatcacttatctttaattcttcagtatttaaattaaatttcccatattcttccatatttttcttattttgttgtctgcctttatatagatgctagcaattgttttcttattcatccatccactcattccttcatgtattttggtttttaaagatgtgccctaaacaccagaaaaggagagcagtttaatagagaaaagccacccattttatcacttgtcggccttttggctaagatcaagtgtgagaaaagscacccattttatagaaaatggtagttgactgcaactactaatagtatttatcaacattttagctcagctcaccgagtgatgactgtttgaacatggccttttttatcctctctacccacctccct

SEQ ID NO: 689115 - DNA, 632 bp, Homo sapiens
tattgagtgttttgtccattaatagccactttatattttaattgcattatatgaaatggtaataagaagggattcagaagaaattgtgaccttttgagaaattcttggctgtttaaaacattagctgtggttctcagagcaaatgtgtacaaaagattatccatcagctatgatacaccaatgaaggaagtgatgaattgtgattttaaatgatgctctaggattactaaatatgtatttaccagaagtggagataatcacttatctttaattcttcagtatttaaattaaatttcccatattcttccatatttttcttattttgttgtctgcctttatatagatgctagcaattgttttcttattcatccatccactcattccttcatgtattttggtttttaaagatgtgccctaaacaccagaaaaggagagcagtttaatagagaaaagccacccattttatcacttgtcggccttttggctaagatcaagtgtgagaaaaggcacccattttatagaaaatggtagttgactgcaactactaatagtatttatcarcattttagctcagctcaccgagtgatgactgtttgaacatggccttttttatcctctctacccacctccct

SEQ ID NO: 689116 - DNA, 601 bp, Homo sapiens
tctaatactgtcgaatttgctggctgtatttcagctgtattggcctccttgttcattcatgaacatagtaagaacacacaaaaatatcatctgaataaagaaatatgtatgtaacacttctgagttattacatgtcatacaccttttaaamacttttaatatgtacctgttatgcatatagttcatattttccaaggaatagagatttatttaattcactaaggagaaaaccaccaggatagtaaaagttattcaaatagaattttaaaaagtatgagcattgaagaaagaatgttgacataagatcacatggtcagatccaaagatatttagtatactgcaaggcaataataatcttaaaattatttgaagtttattttttaactgaatagcttgtatctctagtgaacacgttttaatacacctttacagagtaaatagttaacaaagtacatcctctagagaatttaataatcctgaagttcatcagtaagtcaaggctccagtcggatacttgaaatgtcactcaactacccttttgcattattttcaagttattgaaatatttcttaacaatgaatacacttttaatgcacacttt

SEQ ID NO: 689117 - DNA, 803 bp, Homo sapiens
tattactataattataaaccaaatcttcctagaatctaacagactaacaggtattcacagagtatgagctaaaaagcaatacatcaaaataattgttaatttgaccatttttttgtcatcttcattaaagaataacttttattaggatgtattcttcatacgttgtaccaacacctatgaaatataaattaaatagtattgtggtaagcagaataatgggctcccccttgtcctaatcacgagaacatgtgagtatgttactttatatgaaataaaggtctttgcagatatgattaaaattaagaaccttgagatatggggcttatcctaaattacatgggtaggcctaatttaattacacacatccttaaaaatagagaaccttattggccatggtcagagtcaaaagcagatgtgactatggaagaagggaaaaaatgatgtcatcttgcaggctttgaagatgaaagaagggaatcagagccaaggaaaatagatggcctctagaarggtggaaaacagcaaggaaacagattctccctgtcagccctgctgacatcttgattttagcccagtgaaacccattttggacttctaatctacagacttttactataagaaagtaacgttgttttaagccactaagtttgtgataatttgttacagcagcaatagacaggaatccagattttggtacctggaagtaggatgctgctataacaaatccttgaaatgtgaaagtggctctagaattgggcagtaggcagaagctggaagaattttcatgagtgttacagaaaaag

SEQ ID NO: 689118 - DNA, 1110 bp, Homo sapiens
gaatttacttatgaaaaagtaaatggatctaaatatgaaaggaaattacacggacaatggaatttgtccatttatatcaaagaaaatagtggcaggaaagaaggaattcccaactrtaagtggtgttgggttgcttttggatctttgaacactgattcttctgaggaaaagagagataattaacatttactgagcatcttttcagcctcatacaacaggttttacaaagttatttcagtcagttctcactgacatcctttgtggctatgactgctctagaattgaacaggtgggaagagtgaggctcagagcaatgatgagacttctttaaagtcacgtggacagtcagtattgaacactggatttcagcccagatctgtcttgagttcattttgagctttttactttaacccagcagccactaatggaaagatttcccaagaaggtttgattactatattctctttgtgcagaaagatatgttacataatgactatggacccttctaacacctttaaatgacttaaaaatcttcacagtgtgaagtttaaatgagttatctctggcctagaatatcgaggtgcattagaaactttttagaagagcagtgactgtgacgtaaaaacactcactcatttcctctgcaactcattgtctccaaggattcacatctgcaattgattatttgggtcatgttttcaaatggtagctgttctgtgcatgtaggcaatttccatgtctataattatccaaggatgctcaataccacacttgaaccaaccgcccactcccacctacttgggtctttgttatttagaaataccagacaaattttaagagaatattcaaagcttttatatttgtttttgagacagggtctcactctgtcacccagcctggagtgcagtggtgtcatcatggttcactgaagacttgagctccctgcgctcaggtgaacctcccacatcagcctcccaagtaactgggactgcaggtgcatgccactgtgcctgcctaattttttttgttttgtttttgtagagagggggttctcactatgttgcccatgctggtctcaaactcctgggcttaagtgatcctcctggctca

SEQ ID NO: 689119 - DNA, 1022 bp, Homo sapiens
gacaatcaggacttgcaaatagaaagtgaatttatagagagaattgaggtaaggataagaaacgtaaaacaacaggaactatattgtattatttcaaatgaaattgatattttaaaggtgaggtaacactaacttaaaataatgctttgagagaacagggagtatataaagaatcacaatcagaatagaagttctttggcatacttttgttcatagtattcaagtttcgagtgagggaaacaaaacccattcaataatttaaagagaaatgttaaaaatagtttgtttttttttctgacatctttttcataactcaaaagaactaaaggcaatttatctttttgacaaattgtttccataaatgatcatctttcattttttatttttcttcaaggagaaaaaaatgattattttaattgttaatgtctaacaggtgtgggtttactgctggccaggctctttaccgtgctattggatgtagaattccttatatgccatattcaccatacttcattatgtctcaaaaactcatcttcaaagaagacatactcccaatacaaaggcccattttgttcccygtctttccttagcacttgtttctggattttgaaaatgtgtcatttcagcacagatcatctctacaagcactacatgagtagattttgatttctctagcccatttaattgagagcattttttttttcctgagatggagtctcattctgtcgcccaggctggagtacagtggccatgatcttggctcactgtcacctctgcttcccatgttcaagcaattctcctgcctcggcctcccaagtagctgagattacaggtgcatgccactatgtgcagataattttttgtatttttggtagagacgggcttttgccatgttggccagggtggtctggaactcctgacctgaactccacttgcctcggcctctgaaagtgctgggattacaggcatgagccactgcttctggcctaattgacagcatcttaatagctactggtgatcat

SEQ ID NO: 689120 - DNA, 1080 bp, Homo sapiens
ttgaacttttatagttgttaaaactttttatatgggatgtatgtatttcaagggatgcactaaagtttgaccttgtcctctgtattttttttgagagagaatccttcactctgtcacccaggttggagtgcggtgacatgatctcggttcactgcaacatccaccacccggggttcaagtgattctcttgccttagactccaggagtagctgggattacatgtgcccacgaccacacccagctaatttttgtatttttttggtagagatggggttttaccatgtaggtcaggctggtctcggactccttgtctcaagagatccgcccgcattggcctcccaaagtgctgggattacaggcatgagtcactgcgccggccaatcttgtcttctgtattttaacaaagtctgcatttggctttagtgttggcttttagaaagtaaatagtcaaaaaggccaggtgcagtacctgtcataaaagtactcaatctagggaggtcagtaggggctgaatccaacccatactttgttggcccagccatgtgtccctgcagggctgttgccatagagaaaaagatgcctttttccaatccttacaaaagtagcatcagttacacagtgtatatccaagagttatggatcctccagaagggggtgcccttttctaatcatacaaggtgctataagggctagctgtgagtcaggaggacaacgaggtgagagggaggctaacgcctcattatataccctttcataccttatgaattttgcaccaagtttmaattaaaaatttgattaatatggcaatacatgtaagtattatatgtgttcatatcctgtgggtgaccatttctccttctacaaattgtaataagaaaatagatacgaatatgtctaaatattttactataaaaacctttattgtactattacttaacagaaagaagtcagtttaaaagttataacatattcataaaattgaatagcatacaggccctaagtattattttatagaagcaaatttattgacatggaaaaattcatggtatagcacattgaaaaaagcaggtcacaagacaa

SEQ ID NO: 689121 - DNA, 1080 bp, Homo sapiens
ttgaacttttatagttgttaaaactttttatatgggatgtatgtatttcaagggatgcactaaagtttgaccttgtcctctgtattttttttgagagagaatccttcactctgtcacccaggttggagtgcggtgacatgatctcggttcactgcaacatccaccacccggggttcaagtgattctcttgccttagactccaggagtagctgggattacatgtgcccacgaccacacccagctaatttttgtatttttttggtagagatggggttttaccatgtaggtcaggctggtctcggactccttgtctcaagagatccgcccgcattggcctcccaaagtgctgggattacaggcatgagtcactgcgccggccaatcttgtcttctgtattttaacaaagtctgcatttggctttagtgttggcttttagaaagtaaatagtcaaaaaggccaggtgcagtacctgtcataaaagtactcaatctagggaggtcagtaggggctgaatccaacccatactttgttggcccagccatgtgtccctgcagggctgttgccatagagaaaaagatgcctttttccaatccttacaaaagtagcatcagttacacagtgtatatccaagagttatggatcctccagaagggggtgcccttttctaatcatacaaggtgctataagggctagctgtgagtcaggaggacaacgaggtgagagggaggctaacgcctcattatataccctttcataccttatgaattttgcaccaagtttcaattaaaaatttgattaatatggcaatacatgtaagtattatatgtgttcatatcctgtgggtgamcatttctccttctacaaattgtaataagaaaatagatacgaatatgtctaaatattttactataaaaacctttattgtactattacttaacagaaagaagtcagtttaaaagttataacatattcataaaattgaatagcatacaggccctaagtattattttatagaagcaaatttattgacatggaaaaattcatggtatagcacattgaaaaaagcaggtcacaagacaa

SEQ ID NO: 689122 - DNA, 3017 bp, Homo sapiens
ggctatatttacctaatacctgtacctccattatatctagsaagttactaacttgcttttgattttacaggctcacaggcagaaggcatttgccttgtcttaggtgggactttttggacttttgggttaatgctgaagtaagttaagactcggaggactgttgggaaggcataactggttttgaaatgtgaagacatgagatttggaaggggccagggatggaatgacatgatttgtctgtgtccccacccaaatctcatctttaattgtaactcccacaattcccatgtgttgtggaggggacccagtgggatatagttgaatcacggggatgagtctttcttgtcctgttctcctgctagtaaataagtctcaggagatctaatgattttataaagaggagttctcccgcacaagttctctctctctctttgcctgctgccatccatgtaagacatgatttgctcctctttgctttctgccgtgattgtgaggcttcctcagccatgtggaactgtaagtccattaaatgtctttttcttcccagtctcagttatgtctttatcaggagcatgaaaatggactaatacaatgagttactttctattttctcctgaagcatgccctacaatcatcaacatttaccattttatccatgaatttttagttgtatgtatattgcctgaaagtataaattttataatgatgcctttgttcttgtctaaataaaggcatatatctggatatataacttagagactgtttttgttgaatgtgaacatataacagtttatctatctgacttatattcagcaacatgctttgttaccacctgccatatatatatacacatatatataaatggaaatatatgtgtatatataaaataaatataaataaatatatataaatatatataaatatacacaaatatatataaatataaacaaatatataaatatatataaatatatacaaatatatatatataaatatatatatatttccatttaactatcttttaacaccaaagtttgtaagcaagcacatgctacttacttttccataaggcttggctttactgtagacaattgtagacaaatttatatttaacctaaataacattgttgtatattttagtcaaaatttttatgtgaatggatcatttaaaaattaccattttggctacagtctactaagctttttggctttttatccaaataggattagggatggcaataaaaaaattgcaaccaaactggatgcaaatgcgtatactatggaaaactatacaaaaataaggacctgagcctactgaaacttactcagtcctgagcttgagtgttgagtgatgtatgtgtgggttacagtatctatgaactatggattgctaaaagtatatgataatttagcgtgttctctggataccatagcatacatgtatacaatgatggttggataattataaaatatgtagtttttcaataaaattataaaatgagttataaactataccataaaatggaaatatatgtgtgtacctgtttaattcccaatagttctgagacactcctgtattttctctctgcaatttaaaataaggcaagagtgacagaaccattcttaaatatgtctcaaataatagtaaatctaattatacaggtgaactgatcttatttgatttttcttagttttcaacatcctgtcttgacagacattgtgacaatgctcaaattatctaatataattttaattatataaaaatatgtgtgactatatatagaaaatgtctataaaaatgtgtaccaccagattaatgatagtttaatgcaggtcatgatttattatcctattgcgtatccttaacctttcttttgttttattggtttgagactcttggtttatgtgggttaaaattatattaacaactttaaagtaagaaaaattgaaaaattataattattttagtattttctaaacagtcttctaaatttctaatttctaattgagtatggacaatacctacactccagccatttctggaaataaaattgccacatgattaaattgtgacaaggtttaatgataaatactaaaaaaattatttgttttgtctcattttctagactaatctaaatttcaaagcagcacccagtagaattagaattatttccaatatgtcagccatgcattgggaaagcactaacacttggcagttccagattattttaataatttaactgggcagatggaggtcatgcaagttagacagtcacgatgtgctgtatataattgatatctccaaacaagtaggcattaacatataatttactagcccgcataaaaccaatcccttagctaataaaatcccattgtttatcttctgctttcattgtcacttgaagacattatatgagatgtgaagacattatatgaagtacaaatgatatagagcattagtgtgtttcccttcagaaatatctaatttataaagacgctcaattattcactataggaaaatatctttataaaatgactttggcaccccaagaatattatatgtcacaaaacagaactacttttaagataagtgagtgttgaatactatctactgtcttgtgcaaatatgtctttctataaggtattcttttataaaaacaccaggaaatatatgtctcgctatgtgtttcgagagtgtgtatttaattttctaaagtgaattggcattcaataaatattcttgggtttaaagtcagattttaagatttcctctcactcttcaatttaaactcttaggactgaatttttttgtatctgaaagaagatttgagttgtgaaagtaaactccctctcagaaatgtaccaaataatttatctattacaagtaggagaaggtaacatttttattacttattatttacagaaaaataaatcagagatgtgtatacaatttttgacacagatacacgtgtgtgtttttttaaagtttataagcctgttttatctgtcctttagaa

SEQ ID NO: 689123 - DNA, 2896 bp, Homo sapiens
ggcttccattgggttaaattgagatgcttttcaaagttttctcccctaaagggttttctctccccttctccctcttgtacatctacaaagtttgaccatgtctgttgccacggggccaagctgagagagggtgtcagctcacaagatggcctgagctccaagggtgacagagcacacatctctgcggggctctttttcagtcttaaacaacctcgcacctttcttggctccagcaataccagggaatagtcctgttttttaggggtccaggtggcttctcacagcccccttgcatggatgatccccagtggatgcagtagcttcttgagctgaaagctccttctgagaatggggagtctcaactcgctttgctgcctctgggtggctgggatcctagctcgttttctagctctctgtggtgccctctgatgacacatcgggacaggtttcttgctgtgccagatttggcttcactggtgtctgtgccctcccatccagttacgcctcttctcacctccgtgctgtcctcagctcgcctgggcattgctgagtatgtttgtagggtctaccactcacggacctccagacataggtgagaatcagttctttttcttaatttttttaaattttattattaaaattttttttattatactttaagttctaaggtgcatgtaacgtgcaggtttgttacatatgtatacatgtgccatgttggtgtgctgcatccattaactcatcatttacattaggtgtatctcctaatgctatccctcctccctccctccaccccaggacaggcctcaatgtgtgatgttccccttcctgtgtccaggtgttctcattgttcagttcctacctatgagagagagcatgcggtgtttggttttctgtccttgtgatagtttgctcagaatgatggtttccagcttcatctatgtccctacaaaggacatgaactcatccttttttatggctgcatagtattccatggtgtgtctatgtgccacattttcttaatccagtctgtcattgatggacatttgggttggttccaagtctttgcaattgtgaatagtgccgcaataaacatacgtgcgcatgtgtctttatagcagcatgatttatcatcctttgggtatatacccagtaatgggatggctgggtcaaatggtatttctagttctagatccttgaggaattgccacactgtcttctgagaatcagttctttatttccaaatccatgtctatcctcctgagctatttgtgtgtatgtgtgtgcattatttgtgtgtttgtacatcatgcaaagtaatgagatgtttagaggcaatggcaaaaaggaacaaactgtcttgcttattttattccccccaagtctcttcttcccccttccagcctgtttttatgtataatcttctggtggggttgggaagtgtggacagtgaagggaaagcaccttgcaaattcttgtcaattttctctaactaggagggtctcatgcttgtgtcagtgccacaagctgaaggccaccaagaggatatctaaaggttaacaagctgggtttattactcattttgacaagaaagaacacacatggtgaagaacaataaggcgtctcagtaggagaaggaggtataggatttgggctttggttgggtgattgggagagggtgtaaggcagcaggtgtttgctgtggattggttgytgtcagaaagcagggaagatcctatgattgcgtctcccccatgtgtcttagtctcatctgtagggagggcaagctgcggtgaagataagcctgcaggggataagaagcagctgtcactcactctaatcaggaggtggtacagcgaccttgtttttgtctgtgcttagacaaaattataaagctccttggtttgtctcacttactcctgctctgagtaagctcaccgggggagctgttctgtgagaatgtttatgtccaagagaaaaataacctgacccccctgtgagcgtcaggggctgctttgatttcttccttcctcacctggcgacctccttactgaacccagtggtttctcatatgtttgtccttgactctgtgtgtgcacatgtgattgtgtgcatacatgtgtgtctatggggcagaaaggggaaaggaaagtagaactcatttcaggcctcatgtaaacaaccagaaggtaaaacttcgcatctcaccccgctccacttgtatttgatcgctgtttaatggcaggcggctctggacagagctaattttcctctgagtcaacctcacaaatcttgttttctttattctctcatcacctccctccctcttctgcctgatgttgccggcccccttgtggaataatctcaacagcatgggctattttgctgttttgctgcgctctctatttaggggcactgatttgttccaaagttacttgaagaatcatctgtgatgggtggtcccataagggcgtggctcatcagtttttctggaagcaattgaaagcccagaaatgtattagggctcaagcattgcaataaagcccagaactgaaattcctgtgtgggaactgcaggattatatgagaaataaaacaaaacaaaccaacaaaaaacccaaagacaaaacaaacaaacaaaagaatggggaaaaaaaggtgatatgaggaaggatcactgggaggtgctgtttctccactgaggctaacggggttgagcagtgggctctgagctttgtttaacttctctcctctgtattccgaagtgtgctgcgtggcttgcggtctgtgaagaattgtcgcagctcttgcctggcagcttatcactgtcggttatgcttctttccagtcacaccttgctccaaatgacttagctgatgtcttcctctcagaagtgtacc

SEQ ID NO: 689124 - DNA, 2896 bp, Homo sapiens
ggcttccattgggttaaattgagatgcttttcaaagttttctcccctaaagggttttctctccccttctccctcttgtacatctacaaagtttgaccatgtctgttgccacggggccaagctgagagagggtgtcagctcacaagatggcctgagctccaagggtgacagagcacacatctctgcggggctctttttcagtcttaaacaacctcgcacctttcttggctccagcaataccagggaatagtcctgttttttaggggtccaggtggcttctcacagcccccttgcatggatgatccccagtggatgcagtagcttcttgagctgaaagctccttctgagaatggggagtctcaactcgctttgctgcctctgggtggctgggatcctagctcgttttctagctctctgtggtgccctctgatgacacatcgggacaggtttcttgctgtgccagatttggcttcactggtgtctgtgccctcccatccagttacgcctcttctcacctccgtgctgtcctcagctcgcctgggcattgctgagtatgtttgtagggtctaccactcacggacctccagacataggtgagaatcagttctttttcttaatttttttaaattttattattaaaattttttttattatactttaagttctaaggtgcatgtaacgtgcaggtttgttacatatgtatacatgtgccatgttggtgtgctgcatccattaactcatcatttacattaggtgtatctcctaatgctatccctcctccctccctccaccccaggacaggcctcaatgtgtgatgttccccttcctgtgtccaggtgttctcattgttcagttcctacctatgagagagagcatgcggtgtttggttttctgtccttgtgatagtttgctcagaatgatggtttccagcttcatctatgtccctacaaaggacatgaactcatccttttttatggctgcatagtattccatggtgtgtctatgtgccacattttcttaatccagtctgtcattgatggacatttgggttggttccaagtctttgcaattgtgaatagtgccgcaataaacatacgtgcgcatgtgtctttatagcagcatgatttatcatcctttgggtatatacccagtaatgggatggctgggtcaaatggtatttctagttctagatccttgaggaattgccacactgtcttctgagaatcagttctttatttccaaatccatgtctatcctcctgagctatttgtgtgtatgtgtgtgcattatttgtgtgtttgtacatcatgcaaagtaatgagatgtttagaggcaatggcaaaaaggaacaaactgtcttgcttattttattccccccaagtctcttcttcccccttccagcctgtttttatgtataatcttctggtggggttgggaagtgtggacagtgaagggaaagcaccttgcaaattcttgtcaattttctctaactaggagggtctcatgcttgtgtcagtgccacaagctgaaggccaccaagaggatatctaaaggttaacaagctgggtttattactcattttgacaagaaagaacacacatggtgaagaacaataaggcgtctcagtaggagaaggaggtataggatttgggctttggttgggtgattgggagagggtgtaaggcagcaggtgtttgctgtggattggttgctgtcagaaagcagggaagatcctatgattgcrtctcccccatgtgtcttagtctcatctgtagggagggcaagctgcggtgaagataagcctgcaggggataagaagcagctgtcactcactctaatcaggaggtggtacagcgaccttgtttttgtctgtgcttagacaaaattataaagctccttggtttgtctcacttactcctgctctgagtaagctcaccgggggagctgttctgtgagaatgtttatgtccaagagaaaaataacctgacccccctgtgagcgtcaggggctgctttgatttcttccttcctcacctggcgacctccttactgaacccagtggtttctcatatgtttgtccttgactctgtgtgtgcacatgtgattgtgtgcatacatgtgtgtctatggggcagaaaggggaaaggaaagtagaactcatttcaggcctcatgtaaacaaccagaaggtaaaacttcgcatctcaccccgctccacttgtatttgatcgctgtttaatggcaggcggctctggacagagctaattttcctctgagtcaacctcacaaatcttgttttctttattctctcatcacctccctccctcttctgcctgatgttgccggcccccttgtggaataatctcaacagcatgggctattttgctgttttgctgcgctctctatttaggggcactgatttgttccaaagttacttgaagaatcatctgtgatgggtggtcccataagggcgtggctcatcagtttttctggaagcaattgaaagcccagaaatgtattagggctcaagcattgcaataaagcccagaactgaaattcctgtgtgggaactgcaggattatatgagaaataaaacaaaacaaaccaacaaaaaacccaaagacaaaacaaacaaacaaaagaatggggaaaaaaaggtgatatgaggaaggatcactgggaggtgctgtttctccactgaggctaacggggttgagcagtgggctctgagctttgtttaacttctctcctctgtattccgaagtgtgctgcgtggcttgcggtctgtgaagaattgtcgcagctcttgcctggcagcttatcactgtcggttatgcttctttccagtcacaccttgctccaaatgacttagctgatgtcttcctctcagaagtgtacc

SEQ ID NO: 689125 - DNA, 1074 bp, Homo sapiens
gaccttgagggtagcaggagcagctctcaaggcagagaaccactcatacttctgaccccactgaggtataaggtgcacctagcccacaaagcaccttccagtcccaacatcctccactcagacaggattcatgtccaagccattccctcttgtcatttctcaatgtttcacaaggcaaagttggaatgcaagacacagaagggcagccctcctgccacttcctctcattgcatttttctcyctacccctcccagatcattccttgaacattacccttctctttaactggcatgattgtttcccaaacccaccatcatagtgggaaatctgccttcctggaagtagatggaaactcacgcagctccttgggaaaacagactgattgcctcattggcagggctttgcccacctagccatgggtatctcctaaacttgcaagttgaaggtgggggcatctaccagccagaccagattggcctgcctagattgcaactccaacctcacactctcactcagagtcacgtggaaaagagtaaaaagggatcatcctccacgtgtgggttccctggcaatcttctgctccccaccattatttcttccttaaagaggagcacagataccagccttctcaggtttctcatagattttgttttatgttttcagctgggctttcttttctgtcaatctcttcctctctcttgctgtggctcctgagatgggtatctgagaagcccatgcccatgcatcattacctagtctttttccacaattaacataaataaaactcccctggaaaattaggtaagtattgattttcatggccaaaaaataaaagtagtgttgatgatgtgacaccgatatatttaagatgtagggctactgatttgatttgtgtaagcataaacacatccacctagtaatctttgtgcagtgggcattcatgatggcatctctgtggatgactgcctctgcgtttgcatcagggcgtctgtatagaccaggttttgtcacccaaagagtaagaacataaaaagtgtgcttcattctatcaagtttctgaatatctaattggca

SEQ ID NO: 689126 - DNA, 1074 bp, Homo sapiens
gaccttgagggtagcaggagcagctctcaaggcagagaaccactcatacttctgaccccactgaggtataaggtgcacctagcccacaaagcaccttccagtcccaacatcctccactcagacaggattcatgtccaagccattccctcttgtcatttctcaatgtttcacaaggcaaagttggaatgcaagacacagaagggcagccctcctgccacttcctctcattgcatttttctctctacccctcccagatcattccttgaacattacccttctctttaactggcatgattgtttcccaaacccaccatcatagtgggaaatctgccttcctggaagtagatggaaactcacgcagctccttgggaaaacagactgattgcctcattggcagggctttgcccacctagccatgggtatctcctaaacttgcaagttgaaggtgggggcatctaccagccagaccagattggcctgcctagattgcaactccaacctcacactctcactcagagtcacgtggaaaagagtaaaaagggatcatcctccacgtgtgggttccctggcaatcttctgctccccaccattatttcttccttaaagaggagcacagataccagccttctcaggtttctcatagattttgttttatgttttcagctgggctttcttttctgtcaatctcttcctctctcttgctgtggctcctgagatgggtatctgagaagcccatgcccatgcatcattacctagtctttttccacaattaacataaataaaactcccctggaaaattaggtaagtattgattttcatggccaaaaaataaaagtagtgttgatgatgtgacaccgatatatttaagatgtagggctactgatttgatttgtgtaagcataaacacatccacctagtaatctttgtgcagtgggcattcatgatggcatctctgtggatgactgcctctgcgtttgcatcagggcgtctgtatagaccaggttttgtcacccaaagagtragaacataaaaagtgtgcttcattctatcaagtttctgaatatctaattggca

SEQ ID NO: 689127 - DNA, 1256 bp, Homo sapiens
gttctttcttaaagacttcggacaagccttggcttagtaactctacccaaaagtattaagtgttcaggtttgtgagaataatgtcttgttaattattaactcctctaaaacattctcaccccctagaactattccctccttaatccacacacatgcaccagaagcaaaagcaagctcaaaygttcatcatcaaatcagctcacttcaacttgacttctatagtcaaatattgtggtcttctgtagcaactgaaagaggctgtcttgttaattctgagagtttttgttaacaaaaatgctggctgggcacagcagctcatgcctgtaatcctagcactttgggaggccaaggtgggtagatcacttgaggtcaggagttcgagaccagcctggccaacatggtgaaaccccgtctctattaaataaaatacaaaaatgagctgagtgtggcggtgcgtgcctgtaatcccatttacttgggaggccgaggcaggagaatagcttggagtttgcagtgagctgagatcacatcactatactccagttcgggtgacagagcaagactttgtctcaaaaaaaaacaagaaaacaaccaaccaaaaaaacatgctgtgttatgactacctggctaaaaaattccatctcaggtacaatatgtgccatacgcaaggaatctgagaatgctaatggtatcaataaagtcattgagtgtttcttactttggtgctttgaaggattaagtgtgtatctctaaacgatctcatattttaaaaacccacaataccgcaaaccatgatgagacccagagaaccccagccacgcgctgccctttcctacaagacagaggcgctcaggccatgccagctgggatgtgatcagtgcacaatggggccaatcacaaaaccgctgcccactaggctaactgttggagccccagttcccagtctctcctgtgctctagaaagcccaggtgatctcctgtctggttggcagctgttctcatcctgcccaacactgcccaagttcagttctcttgtacctccagcttccagtcttgtcttcaaaaggccacaagccatggcactccatccagaccccatgtccccagctgactgccccatactggctcctgatgctgtggccaggcctctcttggcttcagagatggctcttccccgtgacatcacctccaagtgtcacagatagaagccgggtctctcctttactttccaaggtagacctgatcaatctttggcc

SEQ ID NO: 689128 - DNA, 654 bp, Homo sapiens
aaaaatctcattgattttttaaaattcctagaattgtattctttgaagaatttctgcttctagttgtggtgtctctgctctcctggggcctgaggcctacgcttacctgagcccttcccatttcttcatcacctaagccaggtgatgggcaagacaggtcaggatgaaggatcggccacaagaagggcccagccaggtggccactgttcacagggtggtgtggagacacctggggaccatggggctgacacaccctggggaccagcccaggtgacaatctgtgtccacctgtagccccrctcttctcctttcccatccaggccaacccagtcccatgcaccgtgccctctttgctcttcttctcttgctgtgttctcaagaccttctctacatccctgagcctagagtaagcttttgtacacccctgccccttttcagcctttccaagtggtataggaaggcacaaaaataacaacaaaagccaaaacaactcagaaacttcatgtctatctcttctctgtgtatagttcataattctgaagttcacatgacatttcacattattcaaattgagtgccacagcaataagagcttatgaatatggccttctgtagcctcatgtacatgttcgacaagtttcttcctggtgtgatg

SEQ ID NO: 689129 - DNA, 654 bp, Homo sapiens
aaaaatctcattgattttttaaaattcctagaattgtattctttgaagaatttctgcttctagttgtggtgtctctgctctcctggggcctgaggcctacgcttacctgagcccttcccatttcttcatcacctaagccaggtgatgggcaagacaggtcaggatgaaggatcggccacaagaagggcccagccaggtggccactgttcacagggtggtgtggagacacctggggaccatggggctgacacaccctggggaccagcccaggtgacaatctgtgtccacctgtagccccactcttctcctttcccatccaggccaacccagtcccatgcaccgtgccctctttgctcttcttctcttgctgtgttctcaagaccttctctacatccctgagcctagagtaagcttttgtacacccctgccccttttcagcctttccaagtggtataggaaggcacaaaaataacaacaaaagccaaaacaactcagaaayttcatgtctatctcttctctgtgtatagttcataattctgaagttcacatgacatttcacattattcaaattgagtgccacagcaataagagcttatgaatatggccttctgtagcctcatgtacatgttcgacaagtttcttcctggtgtgatg

SEQ ID NO: 689130 - DNA, 639 bp, Homo sapiens
tacaaataattaaaaaaatccccctcccccaaaagaaagaagttccaggggccaatttgaatcaaatcagggatagacatcaagctgccaaatccccctgcttagtctaccactactgggccaaagtcagcatgacacaaacccaacctccagacaggtgattatgcaagataacattcagaacaagacacgcagagctgcgccctcttgccccacccctgtatattccccacaccaaattttacttcctaaaccccttcactcagcccagaaggctgagatggttccttygaggcttgaggccagccattctcccatctgctggcatttggttgataaaagctgctttcctttaccacacctagcttctcatgttttgactctgagcaccaaacagctggacttgagctggtacattaagtgcaatcatctcttttttttttccaaataatatatcttttattttaaaaattttcttatggtgttgcattgtattgtctttatttgtcttgtattgtattgtattgccctgtattgtactggtgttggtggaaatttttggccttcttgtctggctgtgccccagttctgtagaatgatttgtagtatacacgatatcaggcatccttgtctcatgca

SEQ ID NO: 689131 - DNA, 814 bp, Homo sapiens
tttctcctgctcaggacttggagatggagggcagcaggttcccagacctaaagaataaaatgcaatccccagacagcccctcagagccaagagattctgtgctgacactgagctactgcttttctcctctctcggccaccatttattccactcttgcttccacctggttccattctccttgccggcccagacttggcacagcactggaagaggacttgttcctgagggcatcagtactgcaggggatgtgtcccttacggggaaaaccctcagtgtcccaaaatagatcacaggcccacctgcccccatcaccacctccctgctctcaaaatgcagtcccttagacaggttcagtggcactcagagggggtccaggcatgttctgacatccctaggaatcctccccccaattctcaaagcactgttgttggttttactttgctttaacttctgaaaagagccatgagcataaaaatgagycacatagaccttttcagatgaaagggcagaaacagccgaattaggtgttgtccttcttaactgcaccaatatttgggaagggccagcttagactcacctctgacctgggaagtggggaagggaccaagtggatgttcctctaaatggctccccttggccccagacatggttaggtttttctgtgctaaggcatctcctgtgttttcttggggccatcgtgcctcatccccaggacctgctgggggagggatatctgctttactttcctgaactcttgttcttactcattctgggaaatgtgggtgccaactcccttaagggatgtgggatttgg

SEQ ID NO: 689132 - DNA, 660 bp, Homo sapiens
tgcctcttgttgagtttttcatagctcctctgccagatgagaagctttttgagggcagaactcttgctcttgtttcacccatggggcctggcacaggacttggcatgtgtaggtatacatgatggatacatgtatgcgtgtataaatggataggtaatggatagatgggtgatgaacgggtggatgataggtggatggatggatggatgatagatgggtaggtgatggatggataatgagcagatgaatagrtgaatgaatgagaaatgggtgggtgagtggatggatggatggataatgtttttattggttgcatagaagggcagatgattgtttttcatgttgtttttagaaagccagggatcccaaagtggaggaacttggagtttcagagttagaagagatttgaagccatgtgattcactccctcatattctctagcccaagtttttaaataaaaaattaagagaaatcattgtcaggctcacacatctgggaccataagggaaagtaagccaaggtcttccagttaacccaagggtaatgatcccctctcatcctccatcttcataagagaacaaattctacagaaagcccagaaagtgtctcggagctgaatgaggataatggtgtcacagggagcttaggcctccatggtca

SEQ ID NO: 689133 - DNA, 617 bp, Homo sapiens
caacctctctcaacaccccactctgagttcttccaggaacatccttcaggcattcactcactcattcatttcttcartcagtgataactgagcacctactatgaacttgaggttggaaaaacagcatttaacactgtacaaagtcaagttacctctgtttcccccaacagccttgctcaagcagttccttgtgtctggaatgctcttttctggctaactctcacctaccctcaggtaccatctcccctaggaaggacacctccccaccactatcccccaggtgtggccagtaactgaaagcaaatctgtagtagtttaaccacagacctgtaagcaacaagtaactgctactgtaagctgctaggatttggggggctatttgttacacagcatcatcacagcaaaagctgaccaacacaaacaggcaagttctatcttcaagcttcaggactgtgacattgtgaatcaacacttaaggttttaaccaggttgggccagtgctaagcagatgttctcagaagaagcaaagcctgagattgagggagacctggatgtgaatccttgctttgtcatgaagggatagtgtagagggtagcaattaaaaaacacattctctg

SEQ ID NO: 689134 - DNA, 1273 bp, Homo sapiens
tttagtaaactccttctttgggtttgttccctctgaaaggacagaaagaggctgggcccttctaggcttacagcttctatgatcatagataaattcatagaaaatccttatgaatctaaaagacggtagggttattagaaagcagaaaacattttctttttctttcaaagcaaactaatgattgctrtaagtaagtaagtaaaacgacatttgaaaatacgtggttatcttggttttaagattttattattattttcaaaataggcaattttatttttgtgcactagaacaactgatggaagcaagtgaggcaggaggatcgtttgagtctgggaggtcgagggtttagtgagctgagattgcaccactgcactgtaacctgggtgacagagcaagaccctgtctaagaaaaaaaaattcattgtaaaattggacagactaagactatttatttgcatgcaaagtgaaattgagaattgaggcaatttgttttctggatgtttccagtaaaagcaatttttgatgtacaaaattctgaaaattgctttagtgatccctctaactttctatacaaagagaacatctaaggtatttaaaaatggattttaacttatttattctaattttatcctctctctctctctctttttttttttttttttttttttaagatggagtcttgctgtcacccaggctggagtgcagcggcatgatctcggctcactacaacctgtgcctcctaggttcaagcgattcttttgcctcagccttcctagtagctgggattacaggcatgcgccaccatgcccggcttattttcgtatttttagtagagaccgggtttctccatgtaggccaggctggtcttgaactcctgacctcatgtgatctgtccccctcaacctcccaaagtgtagggattaatggcgtgagccaccacgccctgccctaattttatcttttaaataaaagtatagaatatctctattattactatagcccagggcatcttcaacttgtaaaatgaattcatgtgcagaaacaggtgggcatttggtcattttcagattcaaaaatggaattgggcaaagaactgtaaaaaacagaattagattaggacagctgatgcaaaccagggaagtctcctgccctactcctatgtcttcccccaaatcttttcatttcacttagatacatggtctgaccttcctttgattagagaataatttgggttaataagtagcctcatttacaatatgtttttttcctatta

SEQ ID NO: 689135 - DNA, 1273 bp, Homo sapiens
tttagtaaactccttctttgggtttgttccctctgaaaggacagaaagaggctgggcccttctaggcttacagcttctatgatcatagataaattcatagaaaatccttatgaatctaaaagacggtagggttattagaaagcagaaaacattttctttttctttcaaagcaaactaatgattgctgtaagtaagtaagtaaaamgacatttgaaaatacgtggttatcttggttttaagattttattattattttcaaaataggcaattttatttttgtgcactagaacaactgatggaagcaagtgaggcaggaggatcgtttgagtctgggaggtcgagggtttagtgagctgagattgcaccactgcactgtaacctgggtgacagagcaagaccctgtctaagaaaaaaaaattcattgtaaaattggacagactaagactatttatttgcatgcaaagtgaaattgagaattgaggcaatttgttttctggatgtttccagtaaaagcaatttttgatgtacaaaattctgaaaattgctttagtgatccctctaactttctatacaaagagaacatctaaggtatttaaaaatggattttaacttatttattctaattttatcctctctctctctctctttttttttttttttttttttttaagatggagtcttgctgtcacccaggctggagtgcagcggcatgatctcggctcactacaacctgtgcctcctaggttcaagcgattcttttgcctcagccttcctagtagctgggattacaggcatgcgccaccatgcccggcttattttcgtatttttagtagagaccgggtttctccatgtaggccaggctggtcttgaactcctgacctcatgtgatctgtccccctcaacctcccaaagtgtagggattaatggcgtgagccaccacgccctgccctaattttatcttttaaataaaagtatagaatatctctattattactatagcccagggcatcttcaacttgtaaaatgaattcatgtgcagaaacaggtgggcatttggtcattttcagattcaaaaatggaattgggcaaagaactgtaaaaaacagaattagattaggacagctgatgcaaaccagggaagtctcctgccctactcctatgtcttcccccaaatcttttcatttcacttagatacatggtctgaccttcctttgattagagaataatttgggttaataagtagcctcatttacaatatgtttttttcctatta

SEQ ID NO: 689136 - DNA, 1273 bp, Homo sapiens
tttagtaaactccttctttgggtttgttccctctgaaaggacagaaagaggctgggcccttctaggcttacagcttctatgatcatagataaattcatagaaaatccttatgaatctaaaagacggtagggttattagaaagcagaaaacattttctttttctttcaaagcaaactaatgattgctgtaagtaagtaagtaaaacgacatttgaaaatacgtggttatcttggttttaagattttattattattttcaaaataggcaattttatttttgtgcactagaacaactgatggaagcaagtgaggcaggaggatcgtttgagtctgggaggtcgagggtttagtgagctgagattgcaccactgcactgtaacctgggtgacagagcaagaccctgtctaagaaaaaaaaattmattgtaaaattggacagactaagactatttatttgcatgcaaagtgaaattgagaattgaggcaatttgttttctggatgtttccagtaaaagcaatttttgatgtacaaaattctgaaaattgctttagtgatccctctaactttctatacaaagagaacatctaaggtatttaaaaatggattttaacttatttattctaattttatcctctctctctctctctttttttttttttttttttttttaagatggagtcttgctgtcacccaggctggagtgcagcggcatgatctcggctcactacaacctgtgcctcctaggttcaagcgattcttttgcctcagccttcctagtagctgggattacaggcatgcgccaccatgcccggcttattttcgtatttttagtagagaccgggtttctccatgtaggccaggctggtcttgaactcctgacctcatgtgatctgtccccctcaacctcccaaagtgtagggattaatggcgtgagccaccacgccctgccctaattttatcttttaaataaaagtatagaatatctctattattactatagcccagggcatcttcaacttgtaaaatgaattcatgtgcagaaacaggtgggcatttggtcattttcagattcaaaaatggaattgggcaaagaactgtaaaaaacagaattagattaggacagctgatgcaaaccagggaagtctcctgccctactcctatgtcttcccccaaatcttttcatttcacttagatacatggtctgaccttcctttgattagagaataatttgggttaataagtagcctcatttacaatatgtttttttcctatta

SEQ ID NO: 689137 - DNA, 1273 bp, Homo sapiens
tttagtaaactccttctttgggtttgttccctctgaaaggacagaaagaggctgggcccttctaggcttacagcttctatgatcatagataaattcatagaaaatccttatgaatctaaaagacggtagggttattagaaagcagaaaacattttctttttctttcaaagcaaactaatgattgctgtaagtaagtaagtaaaacgacatttgaaaatacgtggttatcttggttttaagattttattattattttcaaaataggcaattttatttttgtgcactagaacaactgatggaagcaagtgaggcaggaggatcgtttgagtctgggaggtcgagggtttagtgagctgagattgcaccactgcactgtaacctgggtgacagagcaagaccctgtctaagaaaaaaaaattcawtgtaaaattggacagactaagactatttatttgcatgcaaagtgaaattgagaattgaggcaatttgttttctggatgtttccagtaaaagcaatttttgatgtacaaaattctgaaaattgctttagtgatccctctaactttctatacaaagagaacatctaaggtatttaaaaatggattttaacttatttattctaattttatcctctctctctctctctttttttttttttttttttttttaagatggagtcttgctgtcacccaggctggagtgcagcggcatgatctcggctcactacaacctgtgcctcctaggttcaagcgattcttttgcctcagccttcctagtagctgggattacaggcatgcgccaccatgcccggcttattttcgtatttttagtagagaccgggtttctccatgtaggccaggctggtcttgaactcctgacctcatgtgatctgtccccctcaacctcccaaagtgtagggattaatggcgtgagccaccacgccctgccctaattttatcttttaaataaaagtatagaatatctctattattactatagcccagggcatcttcaacttgtaaaatgaattcatgtgcagaaacaggtgggcatttggtcattttcagattcaaaaatggaattgggcaaagaactgtaaaaaacagaattagattaggacagctgatgcaaaccagggaagtctcctgccctactcctatgtcttcccccaaatcttttcatttcacttagatacatggtctgaccttcctttgattagagaataatttgggttaataagtagcctcatttacaatatgtttttttcctatta

SEQ ID NO: 689138 - DNA, 1006 bp, Homo sapiens
tgtctatgtcttctgaaagtgaaaaaatatattaatcaaatcagggttrcaaacttcaggcatttcaaccaggtctctctcttttttcctcattaactctatgagtggtttgattttatgttcaaggtagctttaaaataataaaatatgaggttggtgcatctcatcattggtgcatttcatcttctaatgaaaatgatgaaaagtgatcataaaaattctttaattttgctaaagaataggagaaaattcagcactagtaagtgttctaaacatgcattttagatttatcacattttacagtgtttcgcccatttatgtgactatgtccccaactatatagtaaactcctagaaagcagggatctttgatatccccagctcatagttgtgagttctcaatatctgttggttgaataaatggaagaaaagcacaaatattggaataattgtaaatattcgtgttttttactgaagacaaaactatgcaagagagacaatagaaaaatatcagatcttattgtaaaagagagcctaagtcttctgaatttgaattcagggttctagaaactaaaaaaaaaataatactaggtctactcaggagtgatattgaaagttctatataaaagcattgtttggattaggcttgactgataagtggaaatatttgtaattcgtttaatatctgaacccaaatttctgattacttttgtaaaattgacattattttgacaaagtgctttctgtgaataccattgagtgttcacttttgaatctctaggcctttgagatttctctctgtcgcctttcaccactcacatacacatgtgctcactcctctttcttcctttagctcttggcctatactccttcctgatggccctgttcacaaaaacatctttgccactttattatctaccccttattctgctctccttttatataatgttacccctctgtaaatattaacctgggagtaaaagtcaaaatatgtaacaatcagcatg

SEQ ID NO: 689139 - DNA, 1269 bp, Homo sapiens
tatctggtctcattttcctttggtttgaagaacttcctttaatgtagatctcccagcagtgaatttgctcagctttttctaaatctgaaaaagtttatatttcacgcttatttttgaaagatagttttgtgatataaaattttgaagtgacaattactcttttttagcactttagaggtattgttctgttgcctctgaatttatcttttgcagatgagaagtcagtggaaatacttattgttccttggtatgtaacatatcattttttatctagttgctttaaaaatatttttatctttcttagtatttcctggcattattttatattttgatttattgttagctctcttactttctagaatctaagccctctgaggaaaggaaacttgtgtttccatcctccttgcctagaatagcaagtatgcaattactattttctgattaaatgaaggaatgagtgcaaactgtggcctctgcttctctgtttccctttatcttcactcttagaaaacaaaaatgagaaactcactgatttcaccaaaatctcttttatacaaaacatttgtaaagataatagactttaactaccatatagtacacacacacacacacatacacacacacagggtcatacatacacatattggaatggggagagagagtgggaagctttaaatcaaagaagcaatttaaatgataacaattaacattagaaaatttcattcttaaaatgttcttcagtagctccaccatagtaaaattttcactggccacttcctcttagaattccctcttgctgattcttctctcctcctctgttttcagcattctcatccatgttttctttccttcaagtttcttactaacaggaattgtagcactctgtttaaacaacacattctttacctccttccaaatataagtggttaacatttccttgtgtgattcactggatcccctcaagtccagattcatagtaattataatgcatttgtttatttggatgataaaataattttyttatttttagcaaaataaatcattttgtaccattattccaagaagaatttgggttttttattttgttacgggttttttattttgttatggaaactgaaatgagaatatctgcatcaaattcaagaaaatgggcaaggtaatcctaatctggaaaaaaaaaaaactcctttggttactaccagcatagactattttctcattagattaaagcaaaatggaaacctggataaaatcagaatggatttcctc

SEQ ID NO: 689140 - DNA, 1269 bp, Homo sapiens
tatctggtctcattttcctttggtttgaagaacttcctttaatgtagatctcccagcagtgaatttgctcagctttttctaaatctgaaaaagtttatatttcacgcttatttttgaaagatagttttgtgatataaaattttgaagtgacaattactcttttttagcactttagaggtattgttctgttgcctctgaatttatcttttgcagatgagaagtcagtggaaatacttattgttccttggtatgtaacatatcattttttatctagttgctttaaaaatatttttatctttcttagtatttcctggcattattttatattttgatttattgttagctctcttactttctagaatctaagccctctgaggaaaggaaacttgtgtttccatcctccttgcctagaatagcaagtatgcaattactattttctgattaaatgaaggaatgagtgcaaactgtggcctctgcttctctgtttccctttatcttcactcttagaaaacaaaaatgagaaactcactgatttcaccaaaatctcttttatacaaaacatttgtaaagataatagactttaactaccatatagtacacacacacacacacatacacacacacagggtcatacatacacatattggaatggggagagagagtgggaagctttaaatcaaagaagcaatttaaatgataacaattaacattagaaaatttcattcttaaaatgttcttcagtagctccaccatagtaaaattttcactggccacttcctcttagaattccctcttgctgattcttctctcctcctctgttttcagcattctcatccatgttttctttccttcaagtttcttactaacaggaattgtagcactctgtttaaacaacacattctttacctccttccaaatataagtggttaacatttccttgtgtgattcactggatcccctcaagtccagattcatagtaattataatgcatttgtttatttggatgataaaataattttcttatttttagcaaaataaatcattttgtaccattattccaagaagaatttgggttttttattttgttacgggttttttattttgttatggaaactgaaatgagaatatctgcatcaaattcaagaaaatgggcaaggtaatcctaatctggaaaaaaaaaaaactcctttggttactaccagcatagactattttytcattagattaaagcaaaatggaaacctggataaaatcagaatggatttcctc

SEQ ID NO: 689141 - DNA, 1925 bp, Homo sapiens
aataaacatggtttataatagaagaaagagctaaatgctattgagtcacagactgtagagggatgaatgataaaagaaagttcaggaaaggtttcccagaagaggcaaaatgtggacttcaatagtgagtagaactttaaaagtcaaagaaagggatttctacaatgagcaaagatctagggcatcagtcacagccagcaacttggtatggtgacaataaaacctgaatggatagatgccagggtcagtgaggcaggtcattaggttaataagaaagggtgctgggccccatgctaaggagccaagaatccaaggagtaaatgtaatcaaaaagttttgcagaggagtcatagaaacaaatctacattttcaaaagaaaactctttagcatagagctgaattggagaggaaagagcttggaagaatagggaatgttaggtgtgaatacctagaaaaagagacaagccagtgaagctgggaattatggtgtgcattagcaggtagaaattaagaactcttagcaatttggttggctgtgggctggagaagctgaagggtggagtgattcagggattccagcctgaatgtggccattacccagggaaactgaaaaggaagagcaggtttgggaaaagggaaatcaccaaggttggctttagacattgaagacaaaaggatagaagaaaaagaaagaggaagaaaaggaaagagaaaggaggaggacagaaagaaaaggaaaatagcaaaacaaagatagattaaacagagaaggagactcatgtcccaaaacagagtcagtgtttcaaaaagccaaattctttgatatcataaagagaggaaaaccaggtgatttaattcatcaattgtatttaatttgtcaattataggatttatcacactttcttgcagttttattgatccatcactaaactacttaaatttcagattactcattcaaaactataatgtaatgggtcaactataaatgcattcattcatttatttatccaacaaatattaattgagtgtctactatacgccaggcactgttgtagtaaatcaaaaatctttgctttcacagattctatcattctatcaaatgggattttgaatcctttgaaaagcaagttcctrgaaaatagagttgtcaaattaaggccttatttctcattttcacatgaaaggaaatgagacgcactcattaatatttacaatgtaagttcagggacaagagattttatggctgcaggaatcttcaatccttttaaggaatgttgtcttttgtcagtcatggctctgtgcctcgccttcacagtctctgtactcattcatgaaaaatgagatcatttagattaaaatgagtggtttgcaactggctgctcattaggatcatcgggggagtttgaaacaaacaggcaccggaccccaccccagaccagttaaagcagaaatctttgggggtggggagttcttatttcaaacctctcccaggtgattctaatggtcattgccatggttgagaaccaccagttggactataaattcttagtttcacagaaaggagaagagagacccacacccctacctaccatgttctataattccacagctctacatgactaattttcagcctgttaggtttggatacactctttctttgaaggtgcacttcattttacattagtgagctgttcattcctagaaggcaacatgagcaatacaagctgaagtggagagctggaaattctccaggaattttggataattgtacagccaaactggtataaatcagaataaaagtacatcacacatctactgacaatatatatattttgttaaccctttaaaaatgaggaaatacagatttttaatcgttaaatatttgaagaagccatttacctaaatatttgtttggcaggagaaca

SEQ ID NO: 689142 - DNA, 1925 bp, Homo sapiens
aataaacatggtttataatagaagaaagagctaaatgctattgagtcacagactgtagagggatgaatgataaaagaaagttcaggaaaggtttcccagaagaggcaaaatgtggacttcaatagtgagtagaactttaaaagtcaaagaaagggatttctacaatgagcaaagatctagggcatcagtcacagccagcaacttggtatggtgacaataaaacctgaatggatagatgccagggtcagtgaggcaggtcattaggttaataagaaagggtgctgggccccatgctaaggagccaagaatccaaggagtaaatgtaatcaaaaagttttgcagaggagtcatagaaacaaatctacattttcaaaagaaaactctttagcatagagctgaattggagaggaaagagcttggaagaatagggaatgttaggtgtgaatacctagaaaaagagacaagccagtgaagctgggaattatggtgtgcattagcaggtagaaattaagaactcttagcaatttggttggctgtgggctggagaagctgaagggtggagtgattcagggattccagcctgaatgtggccattacccagggaaactgaaaaggaagagcaggtttgggaaaagggaaatcaccaaggttggctttagacattgaagacaaaaggatagaagaaaaagaaagaggaagaaaaggaaagagaaaggaggaggacagaaagaaaaggaaaatagcaaaacaaagatagattaaacagagaaggagactcatgtcccaaaacagagtcagtgtttcaaaaagccaaattctttgatatcataaagagaggaaaaccaggtgatttaattcatcaattgtatttaatttgtcaattataggatttatcacactttcttgcagttttattgatccatcactaaactacttaaatttcagattactcattcaaaactataatgtaatgggtcaactataaatgcattcattcatttatttatccaacaaatattaattgagtgtctactatacgccaggcactgttgtagtaaatcaaaaatctttgctttcacagattctatcattctatcaaatgggattttgaatcctttgaaaagcaagttcctggaaaatagagttgtcaaattaaggccttatttctcattttcacatgaaaggaaatgagacgcactcattaatatttacaatgtaagttcagggacaagagattttatggctgcaggaatcttcaatccttttaaggaatgttgtcttttgtcagtcatggctctgtgcctcgccttcacagtctctgtactcattcatgaaaaatgagatcatttagattaaaatgagtggtttgcaactggctgctcattaggatcatcgggggagtttgaaacaaacaggcaccrgaccccaccccagaccagttaaagcagaaatctttgggggtggggagttcttatttcaaacctctcccaggtgattctaatggtcattgccatggttgagaaccaccagttggactataaattcttagtttcacagaaaggagaagagagacccacacccctacctaccatgttctataattccacagctctacatgactaattttcagcctgttaggtttggatacactctttctttgaaggtgcacttcattttacattagtgagctgttcattcctagaaggcaacatgagcaatacaagctgaagtggagagctggaaattctccaggaattttggataattgtacagccaaactggtataaatcagaataaaagtacatcacacatctactgacaatatatatattttgttaaccctttaaaaatgaggaaatacagatttttaatcgttaaatatttgaagaagccatttacctaaatatttgtttggcaggagaaca

SEQ ID NO: 689143 - DNA, 1121 bp, Homo sapiens
acactggttttacagccacctccactgggctccagactagatgttgttgtccttataggaaaagatgctgcactgttccttctttacacattagttccccgttactgtccaaagtggatgtgtttygttggccttgcctaaggggtatattcctgccattgctgccaaggcaggttaagaaactaggtatctgtccttttcggtgtctatcatgggatacaggatctgccttccatcaattctcgaaatgtgaaatatttctttttctttttctttttctttttcttttttttttttgagaccaagtcttgctttgtcacccaggctggagttcggtggcacaatcttggctcactgcaacttctgcctcccaggttcaaagacgaagtgtttctcgtgcctcagcctccagagtagctgggattacaggcacccgccatcatgcccagctattttttttatttttatttttatttttcgtagagagaggatttcaccatgttggccagactggtctgaaactcccaacctcaagtgattcacccacctaggactcccgaggtgctgtgctgggatcacaggcatgagccactgtacctggccaaaatgtggaatatttcttaatagaaatattaagaaaataaacaatagtttcagcacgattagaatattcagaatataatataaacttaatagtttaattcagaatatattataaacttaatagtttcagaacttcagctttctgagtgataagggtcaccatgattcaacaccttgaatatctgtcttccaaaaaaatgttcaaatctaatataccttttcttcaaataaacaaaaatgccctctctcttttccaatgctaatgtttatcagttattcctaatgcaaatttccattccccgttatgatctcacctcaatatatggtaatctatgagctactgtgccaacttatccataacattaaatgtaaaactggagaagagggtattttagcataaatactaaatatgttaaaatacagttatattgctaacacatcatagataaaaaatatggataactatcatcactgttcttactacccttattttccggacaatattggatataatgact

SEQ ID NO: 689144 - DNA, 648 bp, Homo sapiens
aaatgtaaaactaaaaaggaattcaataaggatagcacatagttcaaaatccctgtatcacctagtgaatattttgagatagtttatttttatttatttctcaagttatacacttgatttgtctgaataatcgaaagctgtatttcacaaaaatcatgtaaattattaataaaaatgagcwacttataaagactccattgacatagattttaaaagaataatagtgaaattaatgattaaagtattttatttgtcacagtacagatttttaaaaattattaagactcacagttataattatgcttatttatagaacttagtataatttcccattttaggtaactctgtaattttttagtttagaagctggaccttgaaggaccctagttaaggaatttgaaccatttaattcatgagagggaaaatcacataatttgcaactgtcattattaggtcctgactaataataggtcatatttatttgaattttagtttattaaaagcagaatcaaatgcatattttaaaagtacatgtctatacttgtataaatgtatgaactattgaaacacaggcataagaataaatgactatggcaaagtgtggaaatattgtcctagtgttattgctgattttttaaataacttaca

SEQ ID NO: 689145 - DNA, 625 bp, Homo sapiens
taaacaaacttcagttatatatcagcaatatatttttttcttttatatggtaaaaactataaattttagctattttaactttattatgatttgctcctgtataaaatgtraagtgacagaattatatttttttcccaaataattaatttctgaagagtctttacttagtgttcatttagagtatggtttattttactaaatctctatatttattaaattaggacagacaatgctaataagtctttatcttgagtgccaattttaatcagaaggcaatggctgtgaataagcagtacgatgaaagaaattggagttcatgttaggacttagaaggaaaatatgccaagatggattatccaaatttctcattgatgaagaagagaaaattgctggcatatttacctatatttaactacatgagttcaagggttttatttctgtttattttttctgaacctttgattaatttcaaatctcatgccagtggtaccatactgattgttaaatgtttctattttattttactattattaaatttatttcaccattctgccctttttctcaacatttcgtttcagctctcacattttatacttctaattaaaccttagaatgataaaattta

SEQ ID NO: 689146 - DNA, 625 bp, Homo sapiens
taaacaaacttcagttatatatcagcaatatatttttttcttttatatggtaaaaactataaattttagctattttaactttattatgatttgctcctgtataaaatgtgaagtgacagaattatatttttttcccaaataattaatttctgaagagtctttacttagtgttcatttagagtatggtttattttactaaatctctatatttattaaattaggacagacaatgctaataagtctttatcttgagtgccaattttaatcagaaggcaatggctgtgaataagcagtacgatgaaagmaattggagttcatgttaggacttagaaggaaaatatgccaagatggattatccaaatttctcattgatgaagaagagaaaattgctggcatatttacctatatttaactacatgagttcaagggttttatttctgtttattttttctgaacctttgattaatttcaaatctcatgccagtggtaccatactgattgttaaatgtttctattttattttactattattaaatttatttcaccattctgccctttttctcaacatttcgtttcagctctcacattttatacttctaattaaaccttagaatgataaaattta

SEQ ID NO: 689147 - DNA, 625 bp, Homo sapiens
taaacaaacttcagttatatatcagcaatatatttttttcttttatatggtaaaaactataaattttagctattttaactttattatgatttgctcctgtataaaatgtgaagtgacagaattatatttttttcccaaataattaatttctgaagagtctttacttagtgttcatttagagtatggtttattttactaaatctctatatttattaaattaggacagacaatgctaataagtctttatcttgagtgccaattttaatcagaaggcaatggctgtgaataagcagtacgatgaaagaaattggagttcatgttaggacttagaaggaaaatatgccaagatggattatccaaatttctcattgatgaagaagagaaaattgctggcatatttacctatatttaactacatgagttcaagggttttatttctgtttattttttctgaacctttgattaatttcaaatctcatgccagtggtaccatactgattgttaaatgtttctattttattttactattattaaatttatttcaccattctgccctttttctcaacatttcgtttcagctctcacrttttatacttctaattaaaccttagaatgataaaattta

SEQ ID NO: 689148 - DNA, 1473 bp, Homo sapiens
taaaacaaggggaatccaccaaaattttcttttataatattttcatttaaaaactttatttgattcaccagctttctatcaagaaaagacattgtgctcaakagctggaggtgataaagtccaatgtgaatttcttaaatggcaaattaccagccaggatgaacacacaaaggcttcagcttttatgtacggcctagaagccccagggcccctgttccccctgagcacccaagagcagcttctgaacactgcaatgtgctggctggaggcctctggagaagaggaggccagacctgtgaattatggcaaattctactgcaccctgacttcagcaacctcctaaatcagaaaagggggcattaaaaatgtttttccttcatgcaaatgctgccattcatttagaagtgaggccatgttacttcaggtgcccatagagcatgatcatttgagcatcccgaatggcattataggaagcctggccccagagtcagcctcagacggtggagatgtgacaatctctttgaagtcccagggaatgaaaggagtggtctgcaaacaagcctagggggataagctgaatatatttcccccagccttggcagagacgctgcaatccatagctggctcacattgccacacacatctcagcctgtcacattgcccaacagtcttggtgcatttcgttcaccaacccttttaccacagcaacatgttcaacgcatcttatggcctcaaaccccaatcttggcatacagccttgtcctgcactttatggaaaaatgagaagccatcgtataggaacaggagcatctctttcttgcatgacagaatctatcggcccatctgcacctccccatcctcccccaccttccttcagttacaaaggtgaagttcgcccttctccttcctgaggggccttttccctcctgccttctgacagtttccatcaacagatatctattcctttgcttacagtttccactagtctcccagtcttaaaattcatttcctttgctctcactcattttcctcctgctgttgccttatctccttacccttcccaatctggcttaaaagcggtgtgtcagctgggcacggtggctcatgcccgtaaccccagcactttgggaagccaaggtaggtggattgcttgaggacaggggtttgagaccatcctggctaacatggtgaaaccctgcctttactaaaaatacaaaaatgagcagggtgtgttaatgggcacctgtaatcccagctacttgggaagctgaggcaggagaatcactggaatcgggagatggaggttgcagtgagccaacctcatgccactgcacttcaccctgggcaacagagcaagactccatcttaaaaaaaaaaaaaaagcaatgtgtccatatgatgctgtccccaattcctcacctcctttcaatcttcaacccactctttcgactccttcaattccacttcttccca

SEQ ID NO: 689149 - DNA, 655 bp, Homo sapiens
cattattcacaataaccaaagtggaagcaactcaagtgttcattggtagatgaataaatgaataaataggcaaaatgccatagagacaaagtagaacagcactcccaagggctgagaagaagggggaatggagaattactgtttaattcagggttactggtacagggttccagctggggaagatgaaaggattctggagatggatggcagtaatgattatacaacaatatgaatgcacttaataccactgagttgtacacttaaaaatggttaaaatggcaaatttcttattatgtgtgttctaccacaatgaaaaaaaaggaggtttgtgtctggtcctggagacacagactccctgagtctgtgccgcagcaacaccgagcaatgctgtgatcttccagaatgccaktaagggtgagcccttggccatgtgtcctttgagcgatgtgcaaagttccaaagacagaaggaatatctgggatttggttatgaggatatatgctgccctagaattgtcccaggttttcatgccagggtggagacctcacacaccatggtggcaggggatttctgcagggagaagtctgctgacaaacccatcttatgggttctggcatcttggccacagacagcagtcagctgtttttcatctgca

SEQ ID NO: 689150 - DNA, 1015 bp, Homo sapiens
gatgtgtattttagtaccrctagttctatcttggtgaatgttccagatgcactaaaaaaaatgtgtattataaagttgttgggtgtcacattctgtaaatgtcaactaggccaagttggttaatattgttcttaaaatctacttactctatcaattactgaggaagaagtattggaatctccagccataactgtgaatttatctatttctctttttagttccttaagtttctcctttgtgtttggaaacgttgttgttgtgtcaagatattgttagtattgctattcttctttttaaattacccatttatcatcaaaaaatgaccttcttaatacaagtaatagccttttctctaaatctctgtgtctaatattaatagagccatgctagatttcttatgcttacagtaagcatagtataaaggaagagtgtttttcttgaagtagcatatagttacattttgctctgttaccaagtctcactatctatgccttttaattggattaaagtttgggaaagcttaaatggctggaacttaaaagacaggtcattaaagaggaacttcacagggaagtaacccaagcaatctacgtagatgttccctggagtttttggcagaattctaagacaggcatgcacatggtatcactttacaagaccttggaggggggaaagaaagctacaagacagaatgtgaactgaatgacaattccagaggatatatagcactgggagtcataggagatttattcagccaggacagagaaacccctctaaatattccaggaattcagttgagaccccatacaggccacatcttcaaagcagtatatttcaatctcggaaaaggaacaacttctctcccactctaacaaagcctaaaaacaaatcctaacatgatcaaactgatttcccaataattatctataaataaaactcaacactctttagaccaagatggcaaaatatattctcaactatgtagcattcataatattcagcacacagttaaaaa

SEQ ID NO: 689151 - DNA, 1015 bp, Homo sapiens
gatgtgtattttagtaccactagttctatcttggtgaatgttccagatgcactaaaaaaaatgtgtattataaagttgttgggtgtcacattctgtaaatgtcaactaggccaagttggttaatattgttcttaaaatctacttactctatcaattactgaggaagaagtattggaatctccagccataaytgtgaatttatctatttctctttttagttccttaagtttctcctttgtgtttggaaacgttgttgttgtgtcaagatattgttagtattgctattcttctttttaaattacccatttatcatcaaaaaatgaccttcttaatacaagtaatagccttttctctaaatctctgtgtctaatattaatagagccatgctagatttcttatgcttacagtaagcatagtataaaggaagagtgtttttcttgaagtagcatatagttacattttgctctgttaccaagtctcactatctatgccttttaattggattaaagtttgggaaagcttaaatggctggaacttaaaagacaggtcattaaagaggaacttcacagggaagtaacccaagcaatctacgtagatgttccctggagtttttggcagaattctaagacaggcatgcacatggtatcactttacaagaccttggaggggggaaagaaagctacaagacagaatgtgaactgaatgacaattccagaggatatatagcactgggagtcataggagatttattcagccaggacagagaaacccctctaaatattccaggaattcagttgagaccccatacaggccacatcttcaaagcagtatatttcaatctcggaaaaggaacaacttctctcccactctaacaaagcctaaaaacaaatcctaacatgatcaaactgatttcccaataattatctataaataaaactcaacactctttagaccaagatggcaaaatatattctcaactatgtagcattcataatattcagcacacagttaaaaa

SEQ ID NO: 689152 - DNA, 1015 bp, Homo sapiens
gatgtgtattttagtaccactagttctatcttggtgaatgttccagatgcactaaaaaaaatgtgtattataaagttgttgggtgtcacattctgtaaatgtcaactaggccaagttggttaatattgttcttaaaatctacttactctatcaattactgaggaagaagtattggaatctccagccataactgtgaatttatctatttctctttttagttccttaagtttctcctttgtgtttggaaacgttgttgttgtgtcaagatattgttagtattgctattcttctttttaaattacccatttatcatcaaaaaatgaccttcttaatacaagtaatagccttttctctaaatctctgtgtctaatattaatagagccatgctagatttcttatgcttacagtaagcatagtataaaggaagagtgtttttcttgwagtagcatatagttacattttgctctgttaccaagtctcactatctatgccttttaattggattaaagtttgggaaagcttaaatggctggaacttaaaagacaggtcattaaagaggaacttcacagggaagtaacccaagcaatctacgtagatgttccctggagtttttggcagaattctaagacaggcatgcacatggtatcactttacaagaccttggaggggggaaagaaagctacaagacagaatgtgaactgaatgacaattccagaggatatatagcactgggagtcataggagatttattcagccaggacagagaaacccctctaaatattccaggaattcagttgagaccccatacaggccacatcttcaaagcagtatatttcaatctcggaaaaggaacaacttctctcccactctaacaaagcctaaaaacaaatcctaacatgatcaaactgatttcccaataattatctataaataaaactcaacactctttagaccaagatggcaaaatatattctcaactatgtagcattcataatattcagcacacagttaaaaa

SEQ ID NO: 689153 - DNA, 595 bp, Homo sapiens
tgacaactcatcatccactattagcttgaacaccactttccaggaacagaagaatttccaagcaaacatcctattctatttctagtctgctctaattgttaagtgtttccttgagtgaaaatctgcctgtctctgttctgccttctggaaatagaacaagtcaaatctgtcttccacctgataacccacaagtatttaaagcagctctctggtttcttcaaagcctttttctttgttccaacatagggctgaggactcagaagacagcatcacccaggtcacaaactgacagaaaagataatctattcttcagatatgcttgtttacctgctcagtttaaaaattttcataaagaaacatggaatcttggtttctcttgaaaaatagtagtcctggcracactggactggtgacagtaagctgcagctgggaagcagcagagtagattcttccttcagatggggcattctgctccagttgaccactttctctaccattcaagtgtcgtctctcaggaagaacttaacctgcccatgttatctaaaatagccaacttacctcctactctctatccccgtatttattattaatgctc

SEQ ID NO: 689154 - DNA, 679 bp, Homo sapiens
atctaggactctccccagtgttcaggttagtggttttacctgctggtctaattagttttccttggcagtcttcagttcttctttcagatcagaaatagtatccccaaatggaaaggccccataatagatgaatttttataaagggcctaagtatttgaatattactrtaagacatcattattatagcagagtgacacgatgttccaaagtattcccatagtcatccagaaaagttcagcatgtttatgctgtacagtaacaaaaagaagtgagtgctgtaacttagaaaaattcgttttaaaaaagtcagtgttaaaaaaaaagtgagtcctttctccctattaccttccttcctttgtgtaacaaagattaattttacttctgctgtgtgccagaacagtactgaatgctgtggatacaaagatgaataaaacatgttctttgtcctcaaagagcttgctatgtaattgttcaaatagacataagaaaataattagaatatgatgtagtattttgatggtagtgttcaaaatatttctggagagcatagaagaagagataataatgaaatcttcctgacatggtatgcgggggacctatcaggactagcttcaggttcatggtgaattttccagttaatacttcattttccagtggtgtcaaataaatgaggtacagc

SEQ ID NO: 689155 - DNA, 679 bp, Homo sapiens
atctaggactctccccagtgttcaggttagtggttttacctgctggtctaattagttttccttggcagtcttcagttcttctttcagatcagaaatagtatccccaaatggaaaggccccataatagatgaatttttataaagggcctaagtatttgaatattactgtaagacatcattattatagcagagtgacacgatgttccaaagtattcccatagtcatccagaaaagttcagcatgtttatgctgtacagtaacaaaaagaagtgagtgctgtaacttagaaaaattcgttttaaaaaagtcagtgttaaaaaaaaagtgagtcctttctccctattaccttccttcctttgtgtaacaaagattaattttacttctgctgtgtgccagaacagtactgaatgctgtggatacaaagatgaataaaacatgttctttgtcctcaaagagcttgctatgtaattgttcaaatagacataagaaaataattagaatatgatgtagtattttgatggtagtgttcaaaatatttctggagagcatagaagaagarataataatgaaatcttcctgacatggtatgcgggggacctatcaggactagcttcaggttcatggtgaattttccagttaatacttcattttccagtggtgtcaaataaatgaggtacagc

SEQ ID NO: 689156 - DNA, 596 bp, Homo sapiens
taccttaaggagtttttaaaaattatctcttttttatttcaactgtcttcagatygttaaggaaaaagttctatgtcaacacttgtaccaataacaaaagtgattacagaggcaatatgatgatggcattggtgttcctcaaaagaaatatggaaattgaaagatgaatatctaagcattttaatgttagagcattcttacacaaatgtgaggaagcaggttttattttataatggaaggctgaaatttcattcattcatttatttccaaatatccattgagtggttctaacctgccaggtactatgttaggctatagggtcataacaatggggaacacggaagcggtctattcactcataaagtcagcatcacagctatcaccttacacagcttaggttaggttaagaaaaaattgcgtattattttttcttaactaacaaacccttttatcaaatgacttttatgtagatccccaaaatataaaatccattagtgtgatatttacttttatagatattatatctaagtgcacatttctaatattggcttatagaggtgttcaataaaaccaatgagattttttgaaggaaaaaa

SEQ ID NO: 689157 - DNA, 596 bp, Homo sapiens
taccttaaggagtttttaaaaattatctcttttttatttcaactgtcttcagattgttaaggaaaaagttctatgtcaacacttgtaccaataacaaaagtgattacagaggcaatatgatgatggcattggtgttcctcaaaagaaatatggaaattgaaagatgaatatctaagcattttaatgttagagcattcttacacaaatgtgaggaagcaggttttattttataatggaaggctgaaatttcattcattcatttatttccaaatatccattgagtggttctaacctgccaggtactatgttaggctataggrtcataacaatggggaacacggaagcggtctattcactcataaagtcagcatcacagctatcaccttacacagcttaggttaggttaagaaaaaattgcgtattattttttcttaactaacaaacccttttatcaaatgacttttatgtagatccccaaaatataaaatccattagtgtgatatttacttttatagatattatatctaagtgcacatttctaatattggcttatagaggtgttcaataaaaccaatgagattttttgaaggaaaaaa

SEQ ID NO: 689158 - DNA, 603 bp, Homo sapiens
attgctaacttgtttatttctgtttgcatggatctgaagttctgttcagcatctctcttccttagatgcatctgtgtcctgcctctctattttgcttgttttacttttcctccataataatggaatggcattttaaaattcagctgtttttgtgccggggatactatttagaaactggatgaaagctgaaagccagtctcccatgtggttgccattatagtccttgtgtgatattgttaaatgttcttggccagagcaacacagggttttactatttattgttatwaaaaaaactctgctatggactacagattcaccaatgttatttcatagatgttttaacaattaattgtggtgttatcctcattgaatagctaaatatatctcaaagaagcttcatcacatttctagtaaagttacaaagccactatgtacaagatactgatatagagacaaagaagacatgatcccttcccttaaagaaccagtctttgagtgccgtcctgatctttctattatattataatcatgccaaaggaagagaaaaaatattatttgttgtctgaaaacacatgccaccatgtgataaatataaaatcctca

SEQ ID NO: 689159 - DNA, 2242 bp, Homo sapiens
gaggtctcctgtcaaagtcagggccagagaagaaggcacagggaacctactgcacgagactttcacttgcaacgagcaacccatgatgaggagggaggattcctgggggcattgagtcccccagacacaaggacccaagaccttcttgcttggaaagtgaattcctcagaattccgagatgatgccagtcttggaggaagatgacatgaggacccaaaaccttcttgcttggaaagtgaattcctgagaattccgagatgatgccagtcttggagaaagatgacatgaggacccaaaaccttcttgcttggaaagtgaattcctcaraactccacaaagactccagtcttggaggaagatgacatgaggacccaaaaccttcttgcttggaaagtgaattcctcagaactccacgaagactccagtcttggaggaagacgaggtgttgagagatagctgggatccctgaggaaggcagccccagtctccggtggagaattaagaggggcccaagcagatggttggtggtggaaacgtcacctcagtatagtactatggagtttcctttcacccccaacagccgacggtttccaggggcgaagagtgaaaattgaagcaaggtgtctactgtccaggtgagagccacatcctatggctgagggcctgggggcattggggaccaccaagaatgaatacttttccaattaagtgaagtcttttgcacaatattcctgaccaatagctaatgttctctgagagagtcagagcttcagcccgtgaaagggcgagggaacttgtaggaagatatatgtgagtacagatgtgaggagaacatgctgaagtagcccaggggctcagttgaagctgaggactggtggttctggtggctgtgctgggggtgggggtggcagtgtgagatggaagtgagtgagcaggttgggtgggaaagaggaagaaacctaggctgttgtgtttccggagagaccccgtatcaaggaagaatggggggatttatcagccggggggatatttattttgtggaaatgacccctaagtgggtagggctaaaaccctgctggcccgggggagaagagaagcctaatgcactttgtctaaacccacagcggtagacaaggaggcagtgcgcctgccacccccaaggaagagtcagttcagaagcacagcagctgctggaaacccaggaggtttccagttcgttcctgctgggacctggcaagaactgcactgtcaaggctgcaagaggtgagccccctagggcacagcggaaagggcatcatgaaaaggggagcctgctggctgttgaatggctggataagatgttgttctgcggccacgtggggctctaatgcctcttaattctctcagaggctgggcagcagctgccatgcattttgttgggacctgggctcttctgctaggagttcctgggggcaggaaggctgcaagttgaggttttcttttaggaattcattgttcatttggaaaatgtaaaacgactcaccatggctctttcttcttctcttgaggctcctgacggcttctgacatgtacagaatggaataagagaacctagcagaaatggaagcagaggcaagaggtaaggcttttggcctgaaagaagaatggggaagcagcctctaagaccttcttcctggtaaataagaagggaagtgctctggggagcccatcctagaagcttatgattcctggggagtctggggaagaagaggcccctgagtgactgatgagctcatctgtactaggccaggtttgtgcttcttagagagaccctggcgacctctctgtgttattgtgagaggaatgaagactagaccacgaaaatagaaagtacttcaggctctggagcaaggagagtccctaaaaatacatagtcagtccagcatttctgggagctggagaggacctggctgaaaaatcccagcagtcagcactgcattatcaagttacttctggtttaccggaaaccaagaacttaagacaaaattgaatccatttgtcttagtcaactgaagctgctacaacaaataccatagatcaggtagcttaaaatcaacagaaatttctttctcctagttctagaggctgtgagtctgagatcagggtgcctgcatgatcgggttctggtgagggctctcacagtttgcagactgctaacttcttgtatcctcacataatggggaaagggtgagggagctctctg

SEQ ID NO: 689160 - DNA, 2242 bp, Homo sapiens
gaggtctcctgtcaaagtcagggccagagaagaaggcacagggaacctactgcacgagactttcacttgcaacgagcaacccatgatgaggagggaggattcctgggggcattgagtcccccagacacaaggacccaagaccttcttgcttggaaagtgaattcctcagaattccgagatgatgccagtcttggaggaagatgacatgaggacccaaaaccttcttgcttggaaagtgaattcctgagaattccgagatgatgccagtcttggagaaagatgacatgaggacccaaaaccttcttgcttggaaagtgaattcctcaaaactccacaaagactccagtcttggaggaagatgacatgaggacccaaaaccttcttgcttggaaagtgaattcctcagaactccacraagactccagtcttggaggaagacgaggtgttgagagatagctgggatccctgaggaaggcagccccagtctccggtggagaattaagaggggcccaagcagatggttggtggtggaaacgtcacctcagtatagtactatggagtttcctttcacccccaacagccgacggtttccaggggcgaagagtgaaaattgaagcaaggtgtctactgtccaggtgagagccacatcctatggctgagggcctgggggcattggggaccaccaagaatgaatacttttccaattaagtgaagtcttttgcacaatattcctgaccaatagctaatgttctctgagagagtcagagcttcagcccgtgaaagggcgagggaacttgtaggaagatatatgtgagtacagatgtgaggagaacatgctgaagtagcccaggggctcagttgaagctgaggactggtggttctggtggctgtgctgggggtgggggtggcagtgtgagatggaagtgagtgagcaggttgggtgggaaagaggaagaaacctaggctgttgtgtttccggagagaccccgtatcaaggaagaatggggggatttatcagccggggggatatttattttgtggaaatgacccctaagtgggtagggctaaaaccctgctggcccgggggagaagagaagcctaatgcactttgtctaaacccacagcggtagacaaggaggcagtgcgcctgccacccccaaggaagagtcagttcagaagcacagcagctgctggaaacccaggaggtttccagttcgttcctgctgggacctggcaagaactgcactgtcaaggctgcaagaggtgagccccctagggcacagcggaaagggcatcatgaaaaggggagcctgctggctgttgaatggctggataagatgttgttctgcggccacgtggggctctaatgcctcttaattctctcagaggctgggcagcagctgccatgcattttgttgggacctgggctcttctgctaggagttcctgggggcaggaaggctgcaagttgaggttttcttttaggaattcattgttcatttggaaaatgtaaaacgactcaccatggctctttcttcttctcttgaggctcctgacggcttctgacatgtacagaatggaataagagaacctagcagaaatggaagcagaggcaagaggtaaggcttttggcctgaaagaagaatggggaagcagcctctaagaccttcttcctggtaaataagaagggaagtgctctggggagcccatcctagaagcttatgattcctggggagtctggggaagaagaggcccctgagtgactgatgagctcatctgtactaggccaggtttgtgcttcttagagagaccctggcgacctctctgtgttattgtgagaggaatgaagactagaccacgaaaatagaaagtacttcaggctctggagcaaggagagtccctaaaaatacatagtcagtccagcatttctgggagctggagaggacctggctgaaaaatcccagcagtcagcactgcattatcaagttacttctggtttaccggaaaccaagaacttaagacaaaattgaatccatttgtcttagtcaactgaagctgctacaacaaataccatagatcaggtagcttaaaatcaacagaaatttctttctcctagttctagaggctgtgagtctgagatcagggtgcctgcatgatcgggttctggtgagggctctcacagtttgcagactgctaacttcttgtatcctcacataatggggaaagggtgagggagctctctg

SEQ ID NO: 689161 - DNA, 2242 bp, Homo sapiens
gaggtctcctgtcaaagtcagggccagagaagaaggcacagggaacctactgcacgagactttcacttgcaacgagcaacccatgatgaggagggaggattcctgggggcattgagtcccccagacacaaggacccaagaccttcttgcttggaaagtgaattcctcagaattccgagatgatgccagtcttggaggaagatgacatgaggacccaaaaccttcttgcttggaaagtgaattcctgagaattccgagatgatgccagtcttggagaaagatgacatgaggacccaaaaccttcttgcttggaaagtgaattcctcaaaactccacaaagactccagtcttggaggaagatgacatgaggacccaaaaccttcttgcttggaaagtgaattcctcagaactccacgaagactccagtcttggaggaagacgaggtgttgagagatagctgggatccctgaggaaggcagccccagtctccggtggagaattaagaggggcccaagcagatggttggtggtggaaacgtcacctcagtatagtactatggagtttcctttcacccccaacagccgacggtttccaggggcgaagagtgaaaattgaagcaaggtgtctactgtccaggtgagagccacatcctatggctgagggcctgggggcattggggaccaccaagaatgaatacttttccaattaagtgaagtcttttgcacaatattcctgaccaatagctaatgttctctgagagagtcagagcttcagcccgtgaaagggcgagggaacttgtaggaagatatatgtgagtacagatgtgaggagaacatgctgaagtagcccaggggctcagttgaagctgaggactggtggttctggtggctgtgctgggggtgggggtggcagtgtgagatggaagtgagtgagcaggttgggtgggaaagaggaagaaacctaggctgttgtgtttccggagagaccccgtatcaaggaagaatggggggatttatcagccggggggatatttattttgtggaaatgacccctaagtgggtagggctaaaaccctgctggcccgggggagaagagaagcctaatgcactttgtctaaacccacagckgtagacaaggaggcagtgcgcctgccacccccaaggaagagtcagttcagaagcacagcagctgctggaaacccaggaggtttccagttcgttcctgctgggacctggcaagaactgcactgtcaaggctgcaagaggtgagccccctagggcacagcggaaagggcatcatgaaaaggggagcctgctggctgttgaatggctggataagatgttgttctgcggccacgtggggctctaatgcctcttaattctctcagaggctgggcagcagctgccatgcattttgttgggacctgggctcttctgctaggagttcctgggggcaggaaggctgcaagttgaggttttcttttaggaattcattgttcatttggaaaatgtaaaacgactcaccatggctctttcttcttctcttgaggctcctgacggcttctgacatgtacagaatggaataagagaacctagcagaaatggaagcagaggcaagaggtaaggcttttggcctgaaagaagaatggggaagcagcctctaagaccttcttcctggtaaataagaagggaagtgctctggggagcccatcctagaagcttatgattcctggggagtctggggaagaagaggcccctgagtgactgatgagctcatctgtactaggccaggtttgtgcttcttagagagaccctggcgacctctctgtgttattgtgagaggaatgaagactagaccacgaaaatagaaagtacttcaggctctggagcaaggagagtccctaaaaatacatagtcagtccagcatttctgggagctggagaggacctggctgaaaaatcccagcagtcagcactgcattatcaagttacttctggtttaccggaaaccaagaacttaagacaaaattgaatccatttgtcttagtcaactgaagctgctacaacaaataccatagatcaggtagcttaaaatcaacagaaatttctttctcctagttctagaggctgtgagtctgagatcagggtgcctgcatgatcgggttctggtgagggctctcacagtttgcagactgctaacttcttgtatcctcacataatggggaaagggtgagggagctctctg

SEQ ID NO: 689162 - DNA, 592 bp, Homo sapiens
cctcatgatccgctcacctcagcctcccaaagtgctgggattacaggtgtgagccaccgcccacaggcaaaggctagttgagtccaaaacctagaaagatggatgggaatttatagaataatttataacagttctagaaacacaaagaacttcacatgcaaataatggatggcaaatgctgagcagaaaaatcctaagactgatttaagaaatttcttattacataagaatttaaactggtttctaaaagatagacaatgtctttggagcctctttccaacttctttattgtgaaactagattatattttaatatagttctgccaacaaaatgatagttccttagcagacttcaggaacaggttatttaatacttttatgtaacaatcaggtgtraattctgaaacagatgttcccaacctttctcttcatggtgtgtgaccaaccttaagccagaaatagaaaattttaaatgcagcaatacctggaatgggaaataatcctcctgccaaatctccaattattttctgagtagtttgagagccttagaataaaaagagaataagacccaggaaaaatcgatgttgatgacc

SEQ ID NO: 689163 - DNA, 612 bp, Homo sapiens
caactggtgatgagacattaataaaaccaagtcaaaagcaaaatcaaaatcaaaagcaaatagttgcattgaggtcttcttcatctatctttacattttatccaaatagagacataaaataaaaacaactagatatgtatatttgattgcattttttagccataagttatcacagtcctttcttgatgactgtgccacacacagcctctgaaaaataatgacgtgcttacaattccccaggtccttttaatagaaaggaataactcaagaaccwttaacatggattaatgtttatgtgcataagcttctatgtatctataatcttctgtgatattatttgggtatataaagcatgtattgaaatggagtataatgagttatcattatattatttcccactaattgaatgctagggttccttaggggaagtacctaataaatgtggttaccctcaagaacaaagtaagctctcttaggtttggggtttgtaaaagtgggaagtaaggagcaataaaagaacaggattgagaaagagaggctatattttacaacatcctagctggccttttagggttcatgtaatagaactagaaggaaccatttaagaccacc

SEQ ID NO: 689164 - DNA, 240 bp, Homo sapiens
cgagaaggatggataagagaaaggtgaaaatggaggckaaagggaaatataggggtctattttagtaattgagacaagatatatttctaatttcagaacgcgagtcataggtagggtttcgatcagctcagaatggtattatagaccatgctatttaaaagaaaacacccaaaccttcagatgatcatcccatgctttacaatttttaccctatgtatctaattctattcacatccaagt

SEQ ID NO: 689165 - DNA, 625 bp, Homo sapiens
ctagacatatcttgctagatgttccacaaacacctcctacacatgtccaaaactgaacccataattggcctactcacaaccataccttctctactccctttctcaactgatggtgccagcacccactcaagctaaaaatctggtaatcatttcttccattcaagtggcaaccaaatcctgtgaattctttggctatactataattgaattatttctttttcatctaatgataattaagattttcccaatttttaattcttacaaatgatattgcaatagatatccttttacrtgttcttttttttacttttttaaaagtcataaaattgtgaccttgattttttaatttagttttttgaatatgtaatacattgacatgtctcagaggtccctcccactccatccatcatctacccaaaaaccactccacccatccccctggtaaccactcttagtaattacatacttatacttccagagtgttttttgcatttacaaaggaatattgttgtatattattggattcctttttatacaaaagattgcatgtttttgatgttaaaattaatttttaaattaaataatgtgttatcaaagttttgtgtgagtcaaccataacatcttg

SEQ ID NO: 689166 - DNA, 1469 bp, Homo sapiens
gattctgccttctctgagtaaaattctcataatgtctgctcatccaaagctttgataaactcacaatcatgtgttaaatctgtctaagcttgttacttagtttagctgccatgggattcaggaatctctattatcaatactctatactgtatcaacaaatttgtaactggaaaacagagtaggcatcaggaaaactcagacctgacagtgcactactgaaaacattgatggaacacgtagaattactaagataggtaggaggacaattcactgaagtagagttaagagtataattctcattctttccatgctgcaaaaaaatcacatcacctagcaagcctgggactcatcattcatcaaattttagaattgaccagtagtagacattataatttgccttagtcaatgcgattcccaatttttttgttcttttttttttcttttgttctttgttttgtttttgagatggagtcttgcccaagttggagtgcagtggcatgatatctgctcactgcaacctctgccccatgggttcaagtgattctcctgcctcagcctcccagagtaactgggactacagctgcacgccaccatacctggctgtttgtatttttagtagagacagggtttcgccatgttggtcaggctggtcttgaactcttgacctcaggtgatctgcctgcctcggcctcccaaagtgctgggattataggcgtgagccactgcaccaagccttctcctttgcttttactagagaagctttgtaatttgcttttctggcctcctctaaatttagtagtggctttacaacacagtgctgcccaaaggaaggtaagagaaactctgtttgagtggttttggagactgttacaaggtaaactgaggcacaacaaaatttttttttttttttaaagagtttattcgagcaaacagtgattcatgaatcaggaatctctgaactataagtggtttaggggcactaccaaggaggagaaagcttttatgggactaacatggaaataaagcaagaaaaatatttgattggttgcagttacacaattgccttagtgtgctggaaattctcttgtcatataagttagggaacagcttctgattgcttagccttaagtttgtttctttaatataagcatttacaaaaaatagcccaagttaaattacacctatgtttgcaaatcaaggaagattaaggtcacttatgaggacatattgggtttgtctactcaggattcttcaaatctggtctttattttaatttacttaaatgagaaactttaactttcctgaaaaaaaaaaggatccaactcctttgctctttctttcacctcttttttcttgccttgaatgaggtctccmtgtctggattgtgataaacactttttgatagcttgtaaatcaaattatacaaagcaaaaagtcataagctaggatgatggagtagaaatgttacc

SEQ ID NO: 689167 - DNA, 1436 bp, Homo sapiens
ttggatccattttacttacttgggtgaaatagcaatgtatgcttttaagtgaaagtcacttaaaaatttcagactgtccttagtaacgcaggaactcttgacacaaacttgtactattgacttaaggaaaaaatattctatttccttcctcttttgatcaccatggaatcttccttgaacagactgctttcacttctaaagctcaatgaactagaggtctaatgggcatgaatgtagaggatatttatcttgttgcaactgtagacagagtctttatcactgaaaggtgcatggcatgatggaggtaaaatcttggaatgttagaactagtccagaacattcggagtgtttttttaaagagtctcattttacatatgtaaaagctgagcctcaaatagacttagaagtacaccaaaaaacatactttcatgattcacaaaatatgtactagaatcaaataaggcaaaagtatcctctctagtgcacaacaaataaacaattttattatgagtaatatatcagtctctctacattttaataaatttctacagataatttgagccatggaatcttactttatggcatatagcacttttccccaccctactaaaaatgtcatgaaataatgaagaaggattcttccttccaccaagctgtctgaagatgttaaatccatgtaaatattttatggtatatttaccactcacgtgagtagattgcatgcatataccaagtgaggaaaaccaaccaacctcaaacacaaaacaaattatttcttccttatcccactttatttattcttttgagataaaaygtaatacctagtgatgcaattaatgttgaatctatctctcaggttcctaggactccaaatctcagaagagtctaaaaataatatttctgcttggtctcaattaaacacttacccctattctccatcacctcatctccagggcctctagcctcactttttttgttataaatctgtgctcttatggcttccactaaagagaagccaaaggtcagccatcaacagttgtcatcttacattgtgagagtgcactacacaggtgcgtataaaggaagatggcaatcacaggagccatcttggcgtctggctggcacaactcacaaagtaaaagaaaatacagagaggaattgatagattcaataaatatttgaggagtgtttttctagagacctgaaaaaaaaattgtggctggttttaaaacaagtggaaatgctcaatattacggagtctgcaccacattatattgtgaagtccagctaaaatgttgctccagcagatgaacacctgctttctagaacaagtttaacccaccaacatctgtgtctataccttgctgtcattggagtttatgagatgtagtgaccctccctgagcagaggccagcctgacccacacccaggtcaag

SEQ ID NO: 689168 - DNA, 640 bp, Homo sapiens
gccaaattaataatgataatgcttatatttatattagttttttctatgtcttataccactataggactacatttgtagctatttatagatcgtcacttcaacaaaatatagggaaacatggtcagaagttcctcatgaattatatcaagtgaacatatttaataggttcaaataaatgtttttgatattctaataagtgataaaagttttacaaagaaaaaactaaaattcacataaaaccataactttttacttaatttgcataatactgtctcaaaaaccatgaaaaaaatttaaycaaacttgttttaaaaagtatgtttaatcttaacacatgggaatttgttcatgctattatcattaataatgactactaaacacattcccaattcaagaggagattctttaaaaagatactgaacagattcatgacctttttagaacttaaacaaaaaatacaaaaaatgtttatagttcaggaaccataaaggaaaaaatccagagagtaaagagtctatattgtattttatttttttaataaaacagaagcaggaacaagaacgtattgccttacgttcattctggactagtcaaaagaatccaagttcaaggaaaactaagatgatttctaggtttttca

SEQ ID NO: 689169 - DNA, 1067 bp, Homo sapiens
agtcaaggagaagaccaaataagaagaaagataacatttcaaatcagagttgaagggtgaattgtttattataacaatttgttttgagacaactagatagccatttacatagccatttaaaataaaattaattaacttaaatccctaacatatgactttctctgaatacattttaggcagtttaaatatgtaagtgtaaaaaatgaaactaaggaaatgctagaccacaatattacatggctacatgtctgtttccatggtaaaaaatgcctttccaaggatgaaaatgaaatatcttccttaaaagagactaaggaaaagattgatattcatgactacagaaacatttaaacttttccataaaattaaaaaatttcaaaagctaacttaaaatgcaaataacaaactacaaaaagtattgtggataaagttttaaaatttcaaatatctaaagaattcttataaatcaatcaagtatagctaatgtacccagtggaaaaatgggcaaagaatagatagtcacttcaatagctagtaattttttaaaaaacaaaaacagcataatctcattattcatcaaacaaatgcaacaacaaaggaatttcattttatgcttatcccataagcaaacctagaaaacaatagctggtgtgttggctcatatctgtaatcccagctctttgggaagctgaggcaggaggattgcttgagcccagaagttcaagcccagcctgggcaacaaagtgagactttgtctctacaaaaaatmaaaaataaatcagccaggtgtggtggctctcgcctatggtcccagcgacttaggaggctgagctgggagaatcacttgcgcccgggaggttgaagttgcagtgagctgtgatggtaccactgaattccagctgaggtgatggagtgagacccggtctcaaaataataataatgataataataatatcctgttagtgagaacacacacgagtgcagcctttttggggatatttccataacacatatcaaagttcttcaaaatctgcaaatctctgacgtaggaattctacagtgaagaa

SEQ ID NO: 689170 - DNA, 1067 bp, Homo sapiens
agtcaaggagaagaccaaataagaagaaagataacatttcaaatcagagttgaagggtgaattgtttattataacaatttgttttgagacaactagatagccatttacatagccatttaaaataaaattaattaacttaaatccctaacatatgactttctctgaatacattttaggcagtttaaatatgtaagtgtaaaaaatgaaactaaggaaatgctagaccacaatattacatggctacatgtctgtttccatggtaaaaaatgcctttccaaggatgaaaatgaaatatcttccttaaaagagactaaggaaaagattgatattcatgactacagaaacatttaaacttttccataaaattaaaaaatttcaaaagctaacttaaaatgcaaataacaaactacaaaaagtattgtggataaagttttaaaatttcaaatatctaaagaattcttataaatcaatcaagtatagctaatgtacccagtggaaaaatgggcaaagaatagatagtcacttcaatagctagtaattttttaaaaaacaaaaacagcataatctcattattcatcaaacaaatgcaacaacaaaggaatttcattttatgcttatcccataagcaaacctagaaaacaatagctggtgtgttggctcatatctgtaatcccagctctttgggaagctgaggcaggaggattgcttgagcccagaagttcaagcccagcctgggcaacaaagtgagactttgtctctacaaaaaatcaaaaataaatcagccaggtgtggtggctctcgcctatggtcccagcgacttaggaggctgagctgggagaatcacttgcgcccgggaggttgaagttgcagtgagctgtgatggtaycactgaattccagctgaggtgatggagtgagacccggtctcaaaataataataatgataataataatatcctgttagtgagaacacacacgagtgcagcctttttggggatatttccataacacatatcaaagttcttcaaaatctgcaaatctctgacgtaggaattctacagtgaagaa

SEQ ID NO: 689171 - DNA, 601 bp, Homo sapiens
  misc_feature 595: n = A,T,C or G
gctcaataaatttattttaaaacgtctagccctttgcgaataatttatttttcgcaatcttgccaagatctttgtacaaaatatgtattttaataaaatcatttgtaggtcttggaatttcccacgagcttcagctcatattacggtcacttactacacaattgatttttttttaggttgggtcacttgtgtttattttcctgtggggtgtcctcagcaggaaaaggaggctctttttttggcactgtggtaaaatttcttcatgttatatttatagaaacataataaattcttttaaaataaatggtaatgtcacactggtctttgtttctttacccttttaaatatatcctagtatcctagctttttttttttttttttacctctcagcaatgacataaagtattttttgtttataaacatcaaagactctttttaaacaggagaattgcttgaatstgggaggcggaggttgcagtgagctgagatggcaccactgcactccatccagcctgggcaacagagtgagactctgtctcaaaaaaagaaaaaggctcttttaaaaaaaattttatgccatttgcatattgtaatntttttt

SEQ ID NO: 689172 - DNA, 1493 bp, Homo sapiens
tgttttgtggagacaagtgtaattcctaacagatacttgcaatatctgttggtagggctcagttttggacattcgtttgtttccccagtaccatagaaaaatcatttttttagaaaaacattaaaattttagacattgtcaacataaacctggaattatagaattgagttgtgctctttctaaagagaatccacagttcttttatttagtaatttaaatatctgcagtctcttagacttgataccaagatggtgctgattaaaacaaacactccatgctcaggagtctaattgcaaatgattttttttcttttatgagacaaagtctcattctgctgcccaggctatagttcagggatacaaacatggctcactgcagcctctgacttctgggctcaagtgatcctcctgcctcagcctcctgagtagctgggaccacagatgtgcaccactacacccagctttttaaatttttttgagggattgggggggtctcactatgttgcccagctggtctcgaactcctgagctcaagccatcctcctgccttagctcccagagtggtgggattgcaggtgtgagtcaccacacctggccgcaaaagttttttatgcaggagatatactgtaaaaagttacaagcctcggctgggcatggtagctcactcctgtaatccascattttgggaggccaaggcaggtgcatcataaggtcaggagatcgagaccatcctggctaacacggtgaaaccccatctctactgaaaatacaaaaaaattagctgggcatggtgccaggcgcctgtagtcccagctactcgggaggtgaggcaggagaatggcgtgaacctgggaggcagagctggcagtgagccgagattgtgccactgcactccagcctggccgacagagagagactccatctcaaaacaaaacaaaacaaaacaaaaaaaaggttacaagcctcaacaacttgcacgggatattttcttctcccagcacagagagctccacccaagccagaggatcatctgaaaatggcctaaagtcaagtgcatcttaaaggcaacaacttaaatagtccaaagatggcaaaagcatgacttggcaaacactacgagttcacaaggaaatttgagaatgagatggcctcaataaaggcaaagtcaaatttcaaagtgaccaggcaggatatccattattcatcaaaacgtaaatgtatgttacaagagtggagcgcaagctgtttgagaagtgttattattctcctgaggaggaagacacagttgctggggaaatgatggttgctttcacaggcggcgtaccttatctaatacagtggattgggtgtgatgacttagagatcaatagaggacaagagctggagccagatgatctggtttaaatcccagccccagcatctcacaacaggatcacctccagtatgcggtgcagcctttctgtgcctcaggatcctcatttgtgaaatggaaac

SEQ ID NO: 689173 - DNA, 1516 bp, Homo sapiens
caaaggacggctgccctggctttagaatgacttcctygaagccagtgtttctcaggcttttccatcaaaggtgccaccctatgggaagagccctgcaaagttggccccaggcatgaaatttcttggaatatttccatgttttatttgaaaactatttatgtgaattttgcattttatattcatatctgtttgaatatcaaatcatgtttgaaatgatcagtgggtaaaaaatgtaatcattttatttttaaaaaccaaatctttgaatgaaatggatttctttgaataacactttattaaaattaaaaagtgtagatagcatgatctgtatactctgaggctttttgtgcctccatgttcctcttggaagagttgagttgaggccacaggaaggacaactcgaagtagctcttggctctgatggttcacagatctgggagaatctgtgctgccaggacttggccatgctgctcactaactgactgcaccagaacaactcccagatagagaaggcttgtttcctagtagttgagagccgtgaaatggcgagacatgaaagaagcattggactaggttaactctcatcagtgtctttgtttatgagtctagatggggctggcagatgcctcacatcagcattatttagacattaagcgattctaattggagattaacatgtgtcctcatcacagttgaccttatttatggagtggctgacatctgaatgtcaaatttgcatcagtgacttctctcctctaataaccactttaatatgtaaataacaaatttgcagcagggaaaaatatacatgatattctgatgattgctcagaagatggcttccttctgtacatgaagatgggagggcaggtggattcctccttttaattaggagacattggctaaaagatagagccagaaaaaaaaggacacactttaccttagatcagcagacatgtagagttcctaggtttttaatatacttggctaaggacaggggggagaccctacttaaagacaagagaactaagctctggcctcagaaaacttgaagctgttataagatagactaagaaagtgtacaaatcagtatatgtcacagaactatgtgataaaatcatgagggagaggtacaagtaacactattttgtggttgtctcattggaaggacacctggaaaagtggtgtattaaataggaatgtgattgtctccaaagcccagtgagccctatgactgtgacttcaatgaaaacctctgagttgtctccttctatgagaagtcttgggtatgtggtccaggcaggcacaatgactctctagggccccagaaacctaggctcttcctagcattcccactttaccacttttaatgtgaagggcttggtgctgtgtttgtcgccttgtggttgcaagagggctgcttcatctctagacctcaagtccacattccaggttagaagaaggaaatgggaagggcgaaggaacaaaaaggcctctcttcaagaactttattatta

SEQ ID NO: 689174 - DNA, 643 bp, Homo sapiens
aaaatttacactgggcttgggcaaacacaggaagtaatatttttctgtgcatgatgtgactatggacatcattagaagcatgggctggtgtacctacttccactttcccatcttcagtatcagagtctttgtccacttcatcatcgccatcatcttcaaaatcctctggatggggaaaaagaggtgaaataagtgaagtttcccctttgcccgggatttaggatttagattttcaccatacagtggttctttcttcttcctctctcaaataaggggcccaatattaattgcacaatatcccaccacacacaaatgcttattggtcggtataaatggtgttcatgtaggcatgtcggggcactaagtcataaagtttaaacagttatcccacattgaatgcaaaataagtgcagaaaaaatgacacatgaataccactctggattctcccatgaaagttagaggtatttatgcaactagtgtagccaaagtttagagatcacacacaaacgaaatgtgttatamcctaaatatcaccttgattgagcccctaattttttgattgaggaagttatttaaaacaaaagtccatagaaggcatcttgtaccattgtggcaaaattatgcctatagaaaatctgttcg

SEQ ID NO: 689175 - DNA, 2123 bp, Homo sapiens
tatccatacacaatgccaccaagacaatggaccctaaagggggtatattgactactgtggagctgatggaccctccacccctgtctaacagagccagcagtccctaaagattgttgaaataaattccaggttccagtgggattgcctccaggtcccagtggaagaaaagattttggctggctggagagaagtattcctgtatttggttctcaactcagctcagctcatgagtctatattcttgggcaggtggagtgctgggaattgcttggacaatgatgatgctgataacaaatttatatttaaaagttgactcttttctcagttacttgagtgattgcaaaagaatagctctggggttctgaataatttgaggaattttttgcctggtagccctggcctaattacgttgggagtcaatttcatgtgtgcaatataatagcaggcacaatgcacttgggagggaagaagtcttagcttaatgtttttactcattttttcctccttacctcttcatctattttaatttggcaccttggaagccagctgcttcaattgtgatatttgtttctctatagggagcctgaggcctgtgggtaataggtgaactttaataaaacttttaaataaataaataaaaataaaaacactcttctccccccatccatacatttctgtcaactataagcagagagaaagagccaaatcacatgctgtttccctttataggcttagaaaaattgaagcttgaattcatttggtttatttgaatttgatatgagatgcaagtccacatctgtggacttgacatgagataagcttgataagctgtgatatgagataacttgaggtaacttgataagctgtgatatgagatccacagcttaaagacctgcaggtagagtggaggtggtaagagcaggataggggagtgaagaggaagggcttatgaagccctggagataggaagggatggaaaagtgttactgtgggttctggggagaggaccattcattcttcagactgaacttgcttcaggtttggcatctcggttctcattatttatctgctccctcggttgctcccaaatgcctggtgtttgaagcaccaaggtgagggggtgttgaattgcaggaggaaaagatgctgagagcagcctggtaggccagcctgtgaatgtcatgccttgggaaagaagctatctctcaaatccccccagcccagccttggcatggaggacttgatgtttcatgggaagggagcccagagagctgagtaaggctggcttactttctacatacacactttccttagctcttgagcttacrgttgagcatcctgatataaattgtacctacctagatgtgtaaaactctgaaagtagtcttatgtcagttgtttactctattgatcaggaacacaatgcctcagcccaggaaaaaccaatagccagtgcaaacacggcttgattcaggctcagaccgtgtagctaggttttcaacacaccagccatgcctagtaggctgagtgtgcagtgatgggcctcagcttttagaatttctaacttcttctttccctttagagcttagctcagatattgcctcctctgaaaatcctttctctgactaccacaacttggatgcccctcaccaatgcttttataggctctcccaactcagacttgattacattgtgatgaaattgctattgtctgtctcttccagcagactgcaagcttttgagggagagagtcatctgtattggttgttgtattacttgcctcagcacaatgaaaatcctgaaataagtatttgttgactaaattttttttgttgttgttttctttttaaaataattttgagtactgggataccaaatttttaaatgaatacatgatttgtgatttttcccatgtgtaaaaatggcagtactgcccccttctaccagaatctaacatccatgcatagaaccaatgatctaaacatttgtgattctcatctctatttacctgttctaacagattggtggagaactgcaatagcttgctgtcctccacatataaaacgggttttagtgtcccactaggaggatgtatagcctatttgctaattttgctgagctgtc

SEQ ID NO: 689176 - DNA, 696 bp, Homo sapiens
tagcaattaggaatacagtcttcacgatcttgcaagtccatacatgaattccagcttaaaatcatggtaatttatttgataactttttaaaaaaagcttaaaatgaagcaaaaatattttttgttagcttgcaatccccccattttctattttactttttgacatggacaatttcattttgtttgcgtagtttttgtttttaaatcagggatgatttttctttcacacacttaaatatatacttaccagtttcaaattttcatctgtttatctcaaagcactaaatgtgatcaaactccaattagagctgtatttaacccctgggtcattaggatcaaaacagtaaagggagtggagatgttgctttcctagtacaactgaacaagtttggtggatcattcatcttatttgaaattggagatatatattgtagttataagtgggcttaatcaacatcatttcaccttcttgtaaagtcttatctagaaatgggaatttgggccttgatgtgactcagtgtcagagaaggggccagggaaagaaggaaagagtattgattgctgagtaagtggcctcactacagaagacccatggtccatcctcacaatgatgataatccaccagccgttacacgccaatttgaaaacaaattgttatagaccttggaagctttctcagctcaaagcagrcctgaca

SEQ ID NO: 689177 - DNA, 627 bp, Homo sapiens
atttgacccagcaatcccattactgggtatagacccaaaggattataaatcattctaccataaagacacatgcatacgtgtgtttactgcagcactattcacaacagcaaggacttagaaccaaccaaatgcccatcaatggtagactggataaagaaaatgtggcacatatacaccatggaatactatgcagccagaaaaaagatgagttcatgtccttttcagggacatggatgaagctggaaaccatcattgtcagcaaacacaggaacagaaaaccaaacaccgcatgttctcactcataagtaggagttgaacaatgagaacacatggactcagggaggggaacatcacacacttgggcctgttggggtgtagggggcaaggggagggatagcattaggagaaatacctaatataratgacgggttgatgggtgcagcaaaccaccatggcacatgtatacctacataacaaacctgaacgttctgcacatgtatcccagaacttaaagtataatttttaaaaaggaaagaagagcaaattaaatgcaaagcaagaaagaagaattagtaaagattatacagaagaaaaaaacataataaatcaataaaatcaaaagttgta

SEQ ID NO: 689178 - DNA, 627 bp, Homo sapiens
atttgacccagcaatcccattactgggtatagacccaaaggattataaatcattctaccataaagacacatgcatacgtgtgtttactgcagcactattcacaacagcaaggacttagaaccaaccaaatgcccatcaatggtagactggataaagaaaatgtggcacatatacaccatggaatactatgcagccagaaaaaagatgagttcatgtccttttcagggacatggatgaagctggaaaccatcattgtcagcaaacacaggaacagaaaaccaaacaccgcatgttctcactcataagtaggagttgaacaatgagaacacatggactcagggaggggaacatcacacacttgggcctgttggggtgtagggggcaaggggagggatagcattaggagaaatacctaatataaatgacgggttgatgggtgcagcaaaccaccatggcacatgtatacctacataacaaacctgaacgttctgcacatgtatcccagaacttaaagtataatttttaaaaaggaaagaagagcaaattaaatgcaaagcaagaaagaagaattagtaaagaktatacagaagaaaaaaacataataaatcaataaaatcaaaagttgta

SEQ ID NO: 689179 - DNA, 1096 bp, Homo sapiens
caaaccatttccctctatgtaaaagccaactttagtgatattaacacttttacacccaaaaggctaatatccatgtttctaatactttaatactctaacacttgtttaatatcagttaggattggagtggtctatatataacagaaaatccaaatattggcttaaacacaccaagttatcctctcatgtaaaagaattcaggcggattacagctcaaaggtgacacagaggtttcatgaatttgaatgaaacaagacccttcattcttatttttcccctcaaccctcagcatgtgactctcattcacaagattgtgccatggcccaagacagctgctggaaacactgctatcattctgctttccaggcagcgaaaaggaaggacaggaaaagcacagaacggctcccctcttcctgagtcagcactgacgcggccctcagagatggtccacacagtgcttctgcgcgtcgatcatttgccagaactcagacacaggggtcacccctacccacaagactttagaatatgattatgaaacgtattctgtttatatcagatgcataaaaaagaaaaagacaatgatattgggttgacaaataactatctatctaacatgtaatttggagaataaggccacgtgaaaccttaatttgcagtcttaaaaaataaatccatcacactaggaaatatagtttttaaaaaagcttaaaattatacttcagaaactgtggtataattttagaacaccctctaaaaaagtcaatcagaagtaaatccttgaaaatctatgtgccttgattggcttayttgtaaaataaagaaattaaatctgcctttgagatcatataagataatgctgatgatagacataccagatgtgaaagggctttgcaaaattatatttttaattgtgcatggaggagttttaaaagaaatccttgatgtttagttattattattttctcaagcatgttttaagaactgaataagcatcagtacaattttccgtgaattaacatctgtggaaagtcagtcagtctaaggggtgggacgctatggaggtgggcccctcatgcccacgttccctattcatcca

SEQ ID NO: 689180 - DNA, 605 bp, Homo sapiens
cctgggaccayctcctggttgtcctctaggagcccagtttgaagcctctcagaacaaacctcctccttccctgtactgcccctctgccctgggcactctggggctggacccgcctgctacgatggccgctcacgtttctttcttgttcatgaacagggattctcttttccaagccaaaggtcatctcccagttagagcaaggagaagacccctggatggtggagagtggagttccccaaggcgcacatctcggtgagtgacagagtaattgggagatgggcataacattttcccactgccagggcacagcgaggaggctgcgctcaagggtctccttgatgtgccaggccagggggaaatgctgggaaggtagatcctttctcttttgattacttgatccatcatgttcagaggagggttgaattctcccaatatgggttgcactgttttcagatatcttgtaatttgcagaatatgtaatacagtatatcatgtgtaaaggtttataattcttttatcttcctttatccttgcttttactggattgattcttttcctaaattattttccttagtggcttgaacattacattgtttttttttaat

SEQ ID NO: 689181 - DNA, 605 bp, Homo sapiens
cctgggaccatctcctggttgtcctctaggagcccagtttgaagcctctcagaacaaacctcctccttccctgtactgcccctctgccctgggcactctggggctggacccgcctgctacgatggccgctcacgtttctttcttgttcatgaacagggattctcttttccaagccaaaggtcatctcccagttagagcaaggagaagacccctggatggtggagagtggagttccccaaggcgcacatctcggtgagtgacagagtaattgggagatgggcataacattttcccactgccagggcacagcgaggaggctgcgctcaagggtctccttgatgtgccaggccagggggaaatgctgggaaggyagatcctttctcttttgattacttgatccatcatgttcagaggagggttgaattctcccaatatgggttgcactgttttcagatatcttgtaatttgcagaatatgtaatacagtatatcatgtgtaaaggtttataattcttttatcttcctttatccttgcttttactggattgattcttttcctaaattattttccttagtggcttgaacattacattgtttttttttaat

SEQ ID NO: 689182 - DNA, 1436 bp, Homo sapiens
gatactaagaatgcctacaacttactgaataacttcaacattccaggagccatgccaggcattttttacttttattattttatttgaactttcaacagacctatgaagtagctattactattaaatgaaatcagccaggtgacgttcttcatgtcacctatatggcagacaggtaatgctgtaattcctattatgaccatgagaaaataaygtttcaggaaagccaagcctcttgccaagacaatgtagctattaaatggtagagctgggatttaaactctggacacactgactcccttataacaaatcctctccagttatcccttcccaacccctgagatgggcaaacactacctacttctcctggccaccaccctgatcctccccttcactccagcttggaatacggataaactgggtccctaaccacacttgttcttattaccatattcaggtgcaattatgactgtataccatgcagatgtgccctcttttatgatccctgagagcccataagccctataagcaccagcaccagcttgcatataacttttttccctttctgacccttgaacagcaccaagaacacagcaggccagggtatccagctgagtaagtggcagctaggaacagaggtcaggaacacagagggggctttgtgaaaaatatccagcattctgctatttcaataaccctgtcctgagcagtgaggcccacatgcagtacaggaggaagggggaggtttgagagggaaaaatgagctcacccgagctcccaatggcagaggccaagcagccattgccttctccttccttcctgtggggttcttccttggggagggacagaagccaaaggaggcagagctgagggaagggaaagaagccatgagaaacaagactcctgcaacagcaacaatgaaaatacctataaataaactaaataagacctggatagtagctacataaagaaaatgattttcatgtattaagttcacttcattatgcctatttagctatacaaagacgaaagacagagagacatgacatattcttgcacaatatgtctcaatataccaggatgtcatttctttaattcataaacttaacacattcccagccaagttatgcctaagtaacaatattttacagttaatatgggccatgcgcggtggctcacgcctgtaatcccagcactttgggaggccaaggtgggtggaccacttgaggccaggagttcgagaccagcctggccaaaatggcaaaatcctgtctctaccaaaaatacaaaaattagagagtggtggtgggcgcctgtaatcccagccactcaggagtctgaggcaggagaatcacttgaaccggggaggtagaggttgcagtgtcgagatcacaccactgcactctagcctcggtgacagagcaagactccgtctcaat

SEQ ID NO: 689183 - DNA, 1436 bp, Homo sapiens
gatactaagaatgcctacaacttactgaataacttcaacattccaggagccatgccaggcattttttacttttattattttatttgaactttcaacagacctatgaagtagctattactattaaatgaaatcagccaggtgacgttcttcatgtcacctatatggcagacaggtaatgctgtaattcctattatgaccatgagaaaataacgtttcaggaaagccaagcctcttgccaagacaatgtagctattaaatggtagagctgggatttaaactctggacacactgactcccttataacaaatcctctccagttatcccttcccaacccctgagatgggcaaacactacctacttctcctggccaccaccctgatcctccccttcactccagcttggaatacggataaactgggtccctaaccacacttgttcttattaccatattcaggtgcaattatgactgtataccatgcagatgtgccctcttttatgatccctgagagcccataagccctataagcaccagcaccagcttgcatataacttttttccctttctgacccttgaacagcaccaagaacacagcaggccagggtatccagctgagtaagtggcagctaggaacagaggtcaggaacacagagggggctttgtgaaaaatatccagcattctgctatttcaataaccctgtcctgagcagtgaggcccacatgcagtacaggaggaagggggaggtttgagagggaaaaatgagctcacccgagctcccaatggcagaggccaagcagccattgccttctccttccttcctgtggggttcttccttggggagggacagaagccaaaggaggcagagctgagggaagggaaagaagccatgagaaacaagactcctgcaacagcaacaatgaaaatacctataaataaactaaataagacctggatagtagctacataaagaaaatgattttcatgtattaagttcacttcattatgcctatttagctatacaaagacgaaagacagagagacatgacatattcttgcacaatatgtctcaatataccaggatgtcatttctttaattcataaacttaacacattcccagccaagttatgcctaagtaacaatattttacagttaatatgggccatgcgcggtggctcacgcctgtaatcccagcactttgggaggccaaggtgggtggaccacttgaggccaggagttcgagaccagcctggccaaaatggcaaaatcctgtctctaccaaaaatacaaaaattagagagtggtggtgggcgcctgtaatcccagccactcaggagtctgaggcaggagaatcacttgaaccggggaggtagaggttgcagtgtygagatcacaccactgcactctagcctcggtgacagagcaagactccgtctcaat

SEQ ID NO: 689184 - DNA, 661 bp, Homo sapiens
tgctgwtccatacacgtatttctgagagaaagcaatttctaatggtgaaatagttacaataatatttttgaaatttgaaagcaccgtgatactgaagcattaatctgaaggatcggaaagtagggagtttttgttgccaacatttaacttcattgtttatggataacttggttttctgggcagccagatggcacagttagtatacagacattcttggaaacttgtatcaaaatttaaaatgaatgaatttatgagaaataattctgcttattatttgtaatgtagctttcttgaaaagcaagaaatcggaatgtagtttctaaagctgcaagtgaatatgtatacatagccagctctttcagccttgataataaggtgcaaccattaagatgaagggatttttttttcccacttgtgtttttgggcccgagtatcctgatctgtgttgcttgtctggttcaggtgtgagccaccagctttctttgactttcattatctatgtgtatcttgcctcctgttcccaggcttgctctagctcttctgatcctgtcttcctccctcttgatcactagtgtagtattcatgaagccagctaagttagtttttccctttgaaaaccacagcccttatcttctgtgccatattttgggcaacttcgttt

SEQ ID NO: 689185 - DNA, 1190 bp, Homo sapiens
  misc_feature 1090, 1091, 1092, 1093, 1094, 1095, 1096, 1097, 1098, 1099,1100, 1101, 1102, 1103, 1104, 1105, 1106, 1107, 1108, 1109,1110, 1111, 1112, 1113, 1114, 1115, 1116, 1117, 1118, 1119,1120, 1121, 1122, 1123, 1124, 1125, 1126, 1127, 1128: n = A,T,C or G
  misc_feature 1129, 1130, 1131, 1132, 1133, 1134, 1135, 1136, 1137, 1138,1139, 1140, 1141, 1142, 1143, 1144, 1145, 1146, 1147, 1148,1149, 1150, 1151, 1152, 1153, 1154, 1155, 1156, 1157, 1158,1159, 1160, 1161, 1162, 1163, 1164, 1165, 1166, 1167: n = A,T,C or G
  misc_feature 1168, 1169, 1170, 1171, 1172, 1173, 1174, 1175, 1176, 1177,1178, 1179, 1180, 1181, 1182, 1183, 1184, 1185, 1186, 1187,1188, 1189: n = A,T,C or G
aagtgttcattctgaaatttgatgtaatatttaaaattatttcatttcaactcatagtaaaggcagcccacaggagttagctacataattgctcttttaacagtccttgctacccttagsacatttaattattacataattactcatacttatggcctagtgtggaaattatatgtggattatcaatcttgatgatgaatataaaagaaaagcagtcattactctctgtccccagaaggtctcccctgtctccccaagagaggacaaacagctctctctgggcagtggggaaagataagaccagaagcaccacagctgtgagcttggagacctcacaaaggatgaaggtacaaaaggtttacacatttccagaaatatttcacctttggtttatcttactcagactcacaaatcacaaatgctcactgggatatccaactgttcagttagaaaaggtcttgcccaacacaaatttcatgagcgtcaaaaacattccagcagacttctttgttcctttcaatcccacctcagagctcactctcacattgaaaaaataaacccatggatttaacggtgatccacccatgactagactcgaaatcagagtacttgacccttacatcttcagtcagacttttagcttctcctgaatcacagctctgcgattgacaggaaggacaatcaatggcaatgagtgggaaaatcacacaaataacacaacatatgactctgttcctgcaagagcgcaaactctctgcaactctaacattttattacgtgttttaggaaataatttgaggaatttgtgtaagacctttcataagtgagggagctgtctgcttatattcagtattaaatctcagatcttacctatttcaagagacaccaggagtatcccaagtgcccaggaggagcaccccttagctcttttgtgacttttttttttaaagagtcaaaaagtgtaaaataaagctctcagccttttatccttcagagtctcttgactgagggaccattatattcatacaaagcctcttccctcctggagcttataatctagttagggagcaggcagagaaatgagtcatgnnnnnnnnnnnnnnnnnnnnnnnnnnnnnnnnnnnnnnnnnnnnnnnnnnnnnnnnnnnnnnnnnnnnnnnnnnnnnnnnnnnnnnnnnnnnnnnnnnnng

SEQ ID NO: 689186 - DNA, 602 bp, Homo sapiens
tttccatgacaaccatgtcaatgatctgtgcagaagggtccacatttcaaatatattgttaattctgctcagggccagtacatcatgatattaagcacattttgttctctcttcatctaattgctttgtggtttacattaatcataggtctttcagtaaacataattacttttcatkacgactataacttaattagaatttaagaaggattaaaatgcaacaataggttcacaaaccagtgattgaggactcccaaatgttggcattggatcaaaccccggaggtgagtatagaaagagctaatataaccctcaaggtcttatctgtgaaccgtgactagccaagggggagtcaatcatgaaaacttcatatttttctccaggctgtatgttattaatattgataacatggtagctttcttaagagttagggctggaatttgaatttaactaaaagtataaatctatatgaggttgctctctattcagtttgggggcaaattctgttacaagtagaaaagggaataaactagagcatcactcattcagtctggtatttggcatgtttttcctttatacccttgtagaaagagggcattggaa

SEQ ID NO: 689187 - DNA, 1137 bp, Homo sapiens
  misc_feature 108: n = A,T,C or G
ccccctcaggtctctcctgtttttataaaaccaccagtcttatcaagggggccccataatacctttcctaattatctaatcctaattacctcccaacggttccacctntaatccacatataaatttggaattaagttgctaatatacggaatttgaggggcatattaaaaccacagcaattaattagaaaaatttttattgctagaggaaaatttagaaatgactcctgggcctcttaactctgatgggtgaagagagcacacaatcaacctatctagctctcctggaggagtttctcttttcatactattcaaaggttctcccttattttcttggtctcaatttctcagagaaacaaagacaaacaaaatcttcattttctctctggggaaaacagcattcatgatttttaaagtatattttgtgggttgggtgtggtggctcatgcttgtaatcccagcagttgggaaggctgaggcaggcagatcacttgagcacaggaattcgagtccagcctgggcaacatagcaaaaccccttctctacaaaaaaaatagaaaaattagccgggtgtggtggcacacacctgtagtccyagctactcaggagactgaggtgggaggatcacttgagcccagggggcagaggttgcagtgagccgggttcacgccactgcactccagcctgggcaacagagcaaaaccctgtctcaaaaagaaaaaaaaaaagtgtattttgtgcattaatacacttaggttttctcttcaaattaaagtccatttaaaaaaaaaaactcctagatctggcaaaggtgaagaaggaagctctgttctttatctacagccaatactggcaactacagaacagatcctggcaggggtgataaaggtaaaaaggagacaatgaattctggaaaactgaacctcctttcccctgtctacacctcttcaggatatattctgcctctttgaaagctgctgactgcaagcaggtgatgattggtgtgaggtatataaggcagttcctaatgaatccaccacaccagagggccaggctgctttcctctctattgacaatcctaaatcccctttccaaattgtaaaatgtcattaaaatctgggaacattgaactccctct

SEQ ID NO: 689188 - DNA, 642 bp, Homo sapiens
gctctgtgcttggaggcttctgctgtccagaccctctttccagagaggcagaatctggcatggtccaagaatagtgagggcgcttttggacagggcaggaaagaacacccacaggaaggtgaggttgcaaggtcgcaggatacttgcattctagtgccacggtgggccactctggggcgggggctggtggcagcccagggaagacatctgccaccttggacgtaggacaaggcctgggggggacacatctgggccggcctgggacagggccatggagatatggagaaggctgcactcctctgtgtatggaaggtaccgggacaccatggcggagcacaccccccccctcagggccttcccctgggtgtggcagccacttcttctcaggcaacgtctgaggcagagcactggactctgactgctctttcctggagttgggggggggtctccagcctggggagggggagccagccctttcctctgtctccgtggggcagtctcactgggaggaaaaactcaaacaaggcacggcctggtggaaatgaaggaactgagggctgagkcgcaaggaatggggcatctttgacttgggtctggactgtgcccaatggagggtactgccctcaggcagggagggacttt

SEQ ID NO: 689189 - DNA, 609 bp, Homo sapiens
gccacccttgcagctatctgaggaattattggaggacatactccaacagaagatgaaaatgcaccaagaacaagaaagtgaattcaggaaactggagtccagtttaggagagcaacacaagaaaacccagcccaaagcccatgcaggtggctctgagaatgaatccagaggacacagggctggaaacaaaacgtaccgacagatgacctgctatgatcagaaacaaatagtcaggggtcttcataaatcagttagtggacttgagaacaatgggtgagagtaatctggaaaatgaagtaaacaaaggaacttcagaaacaacaaagcagacttcatcagcttcaacaacagcaaaatatagagcaaggaagtgaaatcagacaccatccctgcagataccacattctgcarcaagcattgctaatatggtcattatagagcaaatacctattaagtgactaaatcatgaaataattaagcttgaaggttgaaggacaggaagaggccagtaaagatattcaatctccatctaccattaaattaagacggtaggttatgtcaaaaaaaaaaaaaaatggcaaatcaagaaagaactgagtaagcagattt

SEQ ID NO: 689190 - DNA, 604 bp, Homo sapiens
ggttgcatgggtacctgaaatatagtttctactaaatacttatcacttcatactattgtaaacttaaaaaaaaaaacacttaagttgaagcattgtaagttgggaactgtctaattactgtttgcatcttttccattagaaggatttcttttaatgactatctttttgagttatccctgacttggattgtactgtgccaatagtatgtttttgctatcaccaacccatctgcatgagttctattttcctccagtagtttatcacaaggaactcccattagactaaaggtataagttaagggtactgcttcagcacagcagagataggcaacatggygttctgagccacatgttcatgtaacttacttctactccctataattggctgggctccatctagaatatgtaatttctccatcaaacaactttccattgttatgtctgctcatctttatgactcgaggaatctgataataaccaggtcatgatgggcattccctctctcccagagtcatgtggtgctgcatggtcaggcactcagtctctacaaaatttgctattgcgatgattgactgctgctttctgtctgccagtattacacatat

SEQ ID NO: 689191 - DNA, 612 bp, Homo sapiens
tggtctggaccagcctggctgatttctgtaacttttttgggccaacaggacagtagcaaatgtgactcaggccgaggcttgataggtgcctgaacatcggagtctttctttcagtgtccatgtgcttcagtaaacacactagaaaataaatttctggtttttgtccccagtagactacaccctcatttggtgttatttttcacgtgctatctttaatacaggtacatccttcagtctatttgtagaacattcagttttcttcatcttttctttgccggtgctacattatttgaattattttgctacagaataacttctattatttgatatggcagatgtcactttttatatttagatatagcattcatttatttaacaaatatttgacgaccagttgtatatcagatagtgttctaggtgctggaggtacaacagtgaacaagctaggtgaagaccttgattttataaaacttactttttagtggaagagagacaatttaaraaagcgaatgtacagtttttcacgtggagaaaagcactgcagaggaagatactagcagggcaagggatctgagtgcagtcagacctcatttgggtccagacttcattcct

SEQ ID NO: 689192 - DNA, 604 bp, Homo sapiens
caatgtaatactattcacctatgaaaaggaacaaagttctgatacatgctacaataaggatgatccttgtaaatattatgctaactcaaataaaccagacaaaaaggacaaatattgtatgattccacttacataaagtatctagaataggcaaattcataaatcagaaaacagactacaagtcaccaaaggctaggtaaaggggaaatggggagatattgtttaatgtgtacagagtttctgtttggggcaatgaaaaagttccagaaatggagagtggtgatgattgcacaacattgtaaatatactgaatgacactgaattgtacgctcaagaatggtaaaatcacaaatgttatgtgattatatgtatatatatatatatatatgcgcacgcrcacacacacacacacacacacacacacatatattttaacacgataaaaaatttttcagaaaagaaagccaaaatggagaactgactagtaacaaaagcttaccaaacctcatcgcacctcaacacctattctgcctccctcggagcacattatgtggtaaaatatgcacatctgcatatgtttataaaactatgaagcatatgaata

SEQ ID NO: 689193 - DNA, 1650 bp, Homo sapiens
aaaaaaaaaaaaaaaaggttgtttaccactgaagcgtaaagtcggcctctactcactttctctgtataatagtatatgactaccttgcaaatattcatatagtttacagcagttgtaaaatatagggtaatttgttagagtataaggctatatttatactaatatatcttaaagtttctcattgcaagattctgccaatactttaaatatatagatatataaatcctgaaagaataaagtaataattaaaaatacattttaaaaactatcaacaaatgttatattgataacaaatttggggttttaactgatggtgatatataaatagaaaataagtaaattgtcagatatatatgatctgcagaaagatctaataagcctaataaactttaaaatgaaataatatgatatgagccaacatttggtttgcttttgcaaaaataagagcaattcttttatctagtttatgtttgtaaatatatctaaaaccacatcacagtcaacatttaagttatattgctcaatttggagtttttattttaattattgaatcccgacttgtatttttataaagtaaacactttgaactgttcacaagaaaaatggtttactattatatatttatttgaaatctgaaataattttagttatttttattgaaatataaacagatcatagctatgtgggtcaaatcatagtagtatgtgtcacaatatagagttaagttgcatcagttattaatataatattataaaattttggttacttgtgagaatttcagatagaggaaaacactatattcaaaagattgtctgtgttgacaaacttctttgatgttatgccattgtaaacatcacattattagcaaacaatgttcacaaaaagtgaaattagtactgtgctctcttgcaattctgtcctgtcaggtaaagaataaacattcaaaagtaggataggtttttgtcctgtcactaattacaggtaccctgctaagttgcatgttaagtaaaaacttagaatgggctggacacagtggctcaagcctgtaatcccaacactttgggaggccgaggacggtggattacctgaggtcagcagttcgagttcagcctgaccaatatggtgaaaccttgtctctgctaaaaatacaaaaattagctgggtgtggtgccatgcacctgtagtcccagctgctcgggaagctgagacaggagaattgcttgaacctgggaagyggaggttgcagtgagctgagatcacaccactgcactccagcctgggtgacagagtgagactccttctcaaaataaataaataaataaatataaataaaaacttagaatggttatatccataagcattttctcccatgaactgggcaggcagcagaatgtgggcatttgaagcagcctgcccagatggcactgttacttctccagaagcacatggatcctccatggcttattgctaagtcagtgcaatcaatctgtcagttgatatctgccagatcagtctaatagagtttccaagcattccatcaacacaaggctgagagtggggtggtgatgtgggatacgaagcaggggcaaactgactctggaggttcctgaaattagaaggaaaaggattattgatcactggtctgttcaa

SEQ ID NO: 689194 - DNA, 1092 bp, Homo sapiens
gatttctgttttggatagatggttctgcaagatacttctgggtcctgctaaacacttagatttaagaactctgtgtactccatggtatacattaagtaaggtcagtcaagttcacagcctttcctttcttggaagtgctcttggtacctggggaccggtctcaaaaatgttcattctatgagggtacgctagaaaaggaagaaggtgagcagcagaggtggctaaatagcttcttaaaatagcttctgcaatcatggtagcttaggaactatatatacacagttgtcaacctcttccattggcacactaactttttttttttttttactccattgattttttttttttagttcttatttttttagagatagtgcctcactctgtggcccaggctggagcacagtggcatgatcacagctcattgcagcctcagacttctggctccagcgatccttctgtctcagcctctggagtagctgggactatagggtgcatgccaccatrcctggctaattttttttgtagagacaggttggtctttttgcccaggctggtcttgaacacctggctacaagggatcctctcatctcagcctcccaaagtgctgggattgtaggcgtgagtcaccacacctagctgtgaattttaatgtatataaattatatcttgataaaactgactttaaaaaataatatctgtaagataaactcctggtcatcaagtcaacttttcaaacaagctcctttcacccaaataaacagccattctgtaaaaagggcccttttcttggttctcctccccacaacccagggtatttctctatcagcatgggcaatagctgtctatgcccttggtgagcaagtaaaaggaaaggttgcttgtccctttatctttaatgtcttacattttccctctactccttattgtcaaagggatattggcatagcaatttattttaagtacctagagaagtcattttaaaaacagtattgattgaaagactaaaaagtggctctgtgctatacattatcagagatgtataatagccttaaaagatggaaaataaagtttgacacttgaataatgaggaaa

SEQ ID NO: 689195 - DNA, 2805 bp, Homo sapiens
  misc_feature 2, 3, 4, 5, 6, 7, 8, 9, 10, 11, 12, 13, 14, 15, 16, 17, 18,19, 20, 21, 22, 23, 24, 25, 26, 27, 28, 29, 30, 31, 32,33, 34, 35, 36, 37, 38, 39, 40, 41, 42, 43, 44, 45, 46,47, 48, 49, 50, 51, 52, 53, 54, 55, 56, 57, 58, 59, 60,61: n = A,T,C or G
  misc_feature 62, 63, 64, 65, 66, 67, 68, 69, 70, 71, 72, 73, 74, 75, 76,77, 78, 79, 80, 81, 82, 83, 84, 85, 86, 87, 88, 89, 90,91, 92, 93, 94, 95, 96, 97, 98, 99, 100, 101: n = A,T,C or G
gnnnnnnnnnnnnnnnnnnnnnnnnnnnnnnnnnnnnnnnnnnnnnnnnnnnnnnnnnnnnnnnnnnnnnnnnnnnnnnnnnnnnnnnnnnnnnnnnnnnnaagaaaaaaatgtaaacaaacaaaaaaatgaatatggcaaaatgtttacaatgtataaatctaggtgatgggyatttgggtgttcatctagttattctctccacttttctgtatatttttgaaattttaaataatgaaaagtgaaatagaagattatattgaaggacatttctataaatttgatgtacagaagttcttcctaagaataacaacaagatccaaaatcagaaaggaaaagaccagtaactttgacaatctgaaatgtacaacttttaaatcatacaccctttctcagcaattccacttttaagaatttgttttagggagaaacgagaatgtgagcaatgtttattatgctgtttactgcaatgatatttataacaagaaaaatcagaaatacatgaaatgttcattaataagctgtctttatacatatatgacataacgttttgtagccttaaaatggtagtatagacagacatctgactaaaagacccctataagaagtgattaatgtgaaaacaccacttacatagcaaaagaaccattttggttttaaaagttttgtatatacctaaattctagaaggaccattaacacttgttatcacttgaagtagtgatcatggataacttttacttttatttcacattattctgcattgcttgtactttattatttgtattaagcatggattacaataaagaaaaatacgtgagtcatttggccccatatcttactctgctttcgccaagcaattcagagatttctgggaagtatcaaagataaaaatgagggaaggcatgaaagggggtaagtggaaatgctgtctgtgtgtttgtgtgtcacacgtgattgtggatgttagttccaagagacctttatggctctgctcagggaacacaactgctttttcccacaggtcttttggccccactgtctcctgtctcctgtgtagatgccagcacttacccagggctctgtaattgttgatctatttgtctatcaaccctaatagggtacaagctgctgatgtgcaggaccagtgtcttagaaatctttgtattccatgtgcttggccattgtgacctctctataataataaatctatggaataataaatctatgagctcccaagtagaagagagggtggaaccagaggagggagagtaaggaactgagtttgctccagagtccagactaagcggcagcctagatggagccctaaagatgcccaatgtggatcataaggatgggaaaggaaacaaggactcagcataagataaaataagtagttcagcactccagacttgagcttggattttggctttgccacttaactttgagatcataggcaatttacttaacttccctaagctcctctgtaaaactgggaaaatagtagtactaacctacaattcttgtgagttttaattaagataacatctggaaagtgtttagcatgatgcttggcaagtagtaagttttcaataaatgtcagctctgagtaagcaaacctggctatagtggtctctttctggtagccgagcagagtggatggcatgctaaaagtgtaaggtgtttctatacctacccaggattgatttaatgaagtcaagaagcagttaaaggaggccaggaagtaaccaatgtattctatctggcttctatattcaggaaacgaataaaagcgagggcacccctacctcccctcacacaccccccaaaaaaccctgaagtcaataaatatcctactggcactatctgtactggcaaaatgcagaagagcttattattgcactagctaagtaagccctctggatcattcattcattcacccatctatttattaaatgcccattatgggcagacactgatgagtctaaggaatgggttcaattcattttaggtaatgaagccagagagacatcctcagacttctggaaacctataaatcttagttatttttcctgcaaattacattgctcaatttaatgtttaacagtatctgtccaaaagactaaatcacaatgtttcctcctgtgaaatgattaatctggaaaacctcaaactgggcagtttatgactggatatttttatgtggttccaagagcaatgtttttcatagcaagcctcagtggctctacaaatacacacacatactgttctgtttccagtatctatacccaatagagcaggaaaaataaaggaccttttatgttttggtgaacttgatccttccagggttgaatctagttccttggttttgacttgatgccttacttagaagccaccaatatattatgtaatggtcttatggtcacttgtgttcaggtacttcctaaaagtccttatattcaaataggaaagggcttcagctcaatgttacttactgatagagatttttcacagactgttcagtgctagtcaagctgaaatatggtccttctgacttcagatcatcagcctcccctcggcagaagcccacccgagctggaagctgaagctggacattgtaagactctttggggcgggttccaaggaactgcaggccgttggcaggataaagaaagagggcgtagctatcagacccatcagatgccaaaactgcctggaaagtgttcagctgtgaggaaaaaaaaaaaaaaagagagagagagagagagaaacatcctgtaaaaaacaaataaaagaagaaagaaac

SEQ ID NO: 689196 - DNA, 652 bp, Homo sapiens
tgtaacaaacctgcacgttatgcacatgtaccctacaacttaaagtataataataaagaaagaaaaaaaaaagaaacttctaccagtggacataacagttccactgaattagaaattgagacttactccaggccatttgggctcctcatctctcccaatcaacaagcaaaaatgagggtcattatattatattgactgggctgatttattttgacagccaaggggaaattggcttgcaattatacaaggtgggtaatgagaggtagttckaaaatacaggcaatcctgtaggcatctcttattactcccatcttctatgattaaagtcaaagaaaaaccataagaatgcaactcaattaaggaaagactgttaatggattgtacattaacaatgtaatcattgttatgtccactgaaataaaggtttgggtcaacccacctggaaaagaaccatgaccagctgagatgcttgctgagggtaaaagaaatatgaaatggatggtgaaaaggatagctataaataacatttccaatcatgtgatcagctacagaaatgaagactacaatagttacatggatttctttcttattttgacatgaatatgtttatacatacaataaccaaatatttttgttttcttccttatcttac

SEQ ID NO: 689197 - DNA, 632 bp, Homo sapiens
tatcccctcgggtggggtagggtagagctgctcccaggtgagtttttaccaggtcatcactaatacccttccagttctattatcttacgattaattcaaagcaaaaaataaatatattggctctaaaaacaaaacaatttataaatcagaataagagtaaagttagaaaaattaaaaacaaaacctgtgtaaattccctaaagcataactccagcttagtctgaaggctcaagtgttgcktctcatttcttaatgagctcattgaaacgaacatcagttgaagttatcctaaggcctggggctgcttaaagctaggagcagggcctaggctgagtttgggttggtacttaaaacgcgttacaaattattctgttttttaattctgaaggtagattagctgtatcttaagtactggttaatacaacatttaaaaaacatttcacaagaaaacatctgcaagcatagtacagcatctttggcgaaagtgctaatttaccagtgggtcaatagttgaaatttaattagaattaaactacccattttaaaattacataatttcaaagaacaaagtgcattctgttggcaagtaattagaagggactgcatgttgcaagggatttttatattgcaga

SEQ ID NO: 689198 - DNA, 632 bp, Homo sapiens
tatcccctcgggtggggtagggtagagctgctcccaggtgagtttttaccaggtcatcactaatacccttccagttctattatcttacgattaattcaaagcaaaaaataaatatattggctctaaaaacaaaacaatttataaatcagaataagagtaaagttagaaaaattaaaaacaaaacctgtgtaaattccctaaagcataactccagcttagtctgaaggctcaagtgttgcttctcatttcttaatgagctcattgaaacgaacatcagttgaagttatcctaaggcctggggctgcttaaagctaggagcagggcctaggctgagtttgggttggtacttaaaacgcgttacaaattattctgttttttaattctgaaggtagattagctgtatcttaagtactggttaatacaacatttaaaaaacatttcacaagaaaacatctgcaagcatagtacagcatctttggcgaaagtgctaatttaccagtgggtcaatagttgaaatttaattagaattaaactacccattttaaaattacataatttcaaagaayaaagtgcattctgttggcaagtaattagaagggactgcatgttgcaagggatttttatattgcaga

SEQ ID NO: 689199 - DNA, 621 bp, Homo sapiens
atttaaatacatgtttcttgtgtgtctcccacactacaatgtatgctttgaaaatgaagactcttgtctatcttgttctcccttgtaccctcatgttcttagcactgtgcttgcctcctagtaggtgcttagtaaattttttttttgagtgactagagtatgtttaggaattagtcagggcatatgagcagctacaataaatcactccaaaatatcagtggtttagcaaaatatatttattcctgggtcaaatcagtccaatgcaagtcagtgagggtggcagagactctttcgtcgacatataactactaaatttattttagagactcacatctagttggctgatgggagagagagagaggaaatggtaaaggcacactttctcttaagttttctaggcagaaattttttgcctagtacagccagtcccctcctggctatatataacatgtacaacatcactgtgtgatttctcatgttgcaccctctatccccataagatgtggatctttttgaagtcagggacctcaattccatcctctacttccacttagcacagaaaagtataatgtttgyattataaacttaattatttctgttgatcaattgatcaaaatgagt

SEQ ID NO: 689200 - DNA, 524 bp, Homo sapiens
caacctccgcctcctgggttcaaacgattctcctgcctcagcctcgcaagtagctgggactacaggcacccaccaccatgcccagctaattttttgtatttcagtagagacagggtttcatcacgttggccaggattctctcgatctcctgatctcgtaatctgcccgcctcagcctcccacagtgctgggattacaggcgtgagccaccatgcccagctatcaaattatgtcttaatagaataatattgtttttwaaaaaagaatcgctaatgtaaaagctggcagtaaactgtaaaccatgttcatactggtgtcacatggtaccaccaactactttagccagtaagcagaaatatcagcaatccattattagaattaaaattcattatatgaggtctttaagaacccattcatcacataaaatgcaactaccctgtaactcacatatgtaaattcaatagcaagaaacattctgagattcagcagtgggatttcagaaagcttactaaaatgggagagaag

SEQ ID NO: 689201 - DNA, 524 bp, Homo sapiens
caacctccgcctcctgggttcaaacgattctcctgcctcagcctcgcaagtagctgggactacaggcacccaccaccatgcccagctaattttttgtatttcagtagagacagggtttcatcacgttggccaggattctctcgatctcctgatctcgtaatctgcccgcctcagcctcccacagtgctgggattacaggcgtgagccaccatgcccagctatcaaattatgtcttaatagaataatattgtttttaaaaaaagaatcgctaatgtaaaagctggcagtaaactgtaaaccatgttcatactggtgtcacatggtaccaccaactactttagccagtaagcagaaatatcagcaatccattattagaattaaaattcattatatgaggtctttaagaacccattcatcacataaaatgcaactaccctgtaactcacatatgtaaatycaatagcaagaaacattctgagattcagcagtgggatttcagaaagcttactaaaatgggagagaag

SEQ ID NO: 689202 - DNA, 697 bp, Homo sapiens
gcagtataaaagacattacgcaacagatttatctacaagctggaagtagtttatagatttaaatattttaacttcttcccaactacttgctaaaattggtcatttcattgctaataactaacaatattatatgaaaactagtccatttcctaaaaaatgaaagtttcttaattattggggggagggagggtttcagtgattcatggcacaacttccatttaagaaaatgaaaggctagaccaagatttgaatcatgctttcaaaagctaatgtgaagttagacatrtttggtttcataatcacagaattttaaaaacaccaggtctgcaatattcagaaatcaccattaacgctctcttgacacatacaatcaatttcactttagatcgctgattttcttaacaactgatttagttatttctgaatactgctagaaaatttcaaaatctacaattaatttcaggatctataaaggattgaattatgtatacctgtaccattaaaggctctaaatgaaataacacatccttaaataaaaagactagtccccgaagagagggaaaacggtcccttttaagccctgaaacaattcctacaaattccatgccaatgtaaatttaaaagttattgacaggatgaattttccggccacctctttttttataaatgaaagttccagtttctagaatatagtgat

SEQ ID NO: 689203 - DNA, 627 bp, Homo sapiens
accttctcaacggctctttcttctaagttggattttgtcatttttgtgatgcagagagartattttcaatagcatgtttaaagcagtaataccacattgctagtcctggagatttatgactaagggaaaacaatactccaaggaccttcacctactatccacccctcctccctttatcctccctctcttccattatacttccttttcaagttgataaccctaaagaaccacgttatacaaggccatctgctgttcagatattatttaatttttagatttcttctaaaagttaaatgacaatcctcttatttccagagtaattggatttaatgtacaattagaataaaaatacctattacccgtcaatgaataagaagttatagtttctcttttcttcagcactttctctgccccaaaatgaaaaaaaaaaaaagaagaaaatggcaaggaagatttaattttacctcagcctagtcatttttctgggtggcttttcttttaattactctcatttaatttttttcaattaccaggatagatattaatttgacatagttaaattctcatatctttgataaaatgcactatgcttgaaaatttttggtatggcagaactttctgattcaa

SEQ ID NO: 689204 - DNA, 627 bp, Homo sapiens
accttctcaacggctctttcttctaagttggattttgtcatttttgtgatgcagagagagtattttcaatagcatgtttaaagcagtaataccacattgctagtcctggagatttatgactaagggaaaacaatactccaaggaccttcacctactatccacccctcctccctttatcctccctctcttccattatacttccttttcaagttgataaccctaaagaaccaygttatacaaggccatctgctgttcagatattatttaatttttagatttcttctaaaagttaaatgacaatcctcttatttccagagtaattggatttaatgtacaattagaataaaaatacctattacccgtcaatgaataagaagttatagtttctcttttcttcagcactttctctgccccaaaatgaaaaaaaaaaaaagaagaaaatggcaaggaagatttaattttacctcagcctagtcatttttctgggtggcttttcttttaattactctcatttaatttttttcaattaccaggatagatattaatttgacatagttaaattctcatatctttgataaaatgcactatgcttgaaaatttttggtatggcagaactttctgattcaa

SEQ ID NO: 689205 - DNA, 639 bp, Homo sapiens
cagaagaatcamccagctgagcctagcccaaattgttgacctgcagaattactgttttaagctactaagttttggtatagtttcatatgcagctaactgatagaaaggaaatagctagctatttgctacaatagctaactgataaagaataggaagtcttttctagtgaattcatttataatgctgtatctgagacaaagcagggcattatttaaggatggatctgtctgtagtccaaagctcagttataattttagttggaaaattacagacttgcttgttctgagtgttggttccattttggcttcaaaggttagctctagtagtcttttttggaaccatggaaacataagagaatttttgttttatttgtactatgtaaataagaacatattttaagtctgtgatggaaataaaagtagatgaggaattagaaaacttaagagttttcttgatcttggcactgataccctgaggctgtgtctacctcaccagtgcagacgactctgcccatgagggtagctttcaggctctctccttgtcagtagtttgaatgaagtaagggcgatgtagaaaatgaccatccagacagatggataaaaagttaataaaaacaacagcaaaaacactttgtcttca

SEQ ID NO: 689206 - DNA, 1105 bp, Homo sapiens
atagtattctctagtgccattagctcaattcttcacgtaggcataagcctatacatttgccatgctaaccaagggaatttgtgttacgtgaattttgactctattcagacatttttttctatgactcctccaaggctgttattcttacctcatattctggtagaagtttaaggacttttttctgggaatattgattaattagctagctagctagagacagagagaggatagagattgattctctggcagagcctatttgaatcatattgaatctttttttttcctgagacttcccacaaggaggatggaggagaaattttttagaaatccaccgaagtaatcagggatatcttcagtaaaagaagctatacttaataaagtctctattttagcagatggcaatcaacaatagaggcaatagacaatagagtctattaaaattgctgggatctgctaataacgtttttcttttccctgaaacaaatgccattaaccctccttgacactctgtcttcatcaacattctaatagaatggaagtaactcataattttgaggatttttttcccacacaaaacctataaaccacaccacgctagtgattacttttagcctagttgctaggttgctgctggtaacagtaaaacttatcctgacaggtaggcaattccagaagcccagccaagcacttggtgtgtgtgagtaaacccccatacacttctcatgtagagtaaccctggccaacccrtaactcttagcaactattcctggtggacggacctggtctactctaagaagaggccaaggttctttaatagtgcagttgcaagaaccagaattgaaagtcaaagttctagcaagattttgcagactccttggcaaaccagtggcttgggactcattcttgacttcaagcccttaattgataatggtaggacagcttgcttgcgctgggttctgctccctgggatatgcactgtttgccaaatgagtagcaggtggacagacatctttacaatttgctgtcccatattctaaatgaacgtgacattctataggtctgagttaacctatgaagtcaccaatttcaatatcaaaatatttat

SEQ ID NO: 689207 - DNA, 642 bp, Homo sapiens
ttgtctctttctgctatattaatgatctgtcttaattttacaagttttctgtaagatagtagacagaataggtgttactgaggtgaaggcttcaatccaaactacaaaactaggtagcctagaggcaacagctaattccatgcttttggttcacaaaggaatgctaatacacacaagtaataacaaaacaaactcacagtacatgtgctactgaagaggtgttgggagcattaaatattcgtacaaagggcagcacaaaatgggaggttaaaaaattaagcaacattaggaacctgagagatgcaactaattaaccagtttggccttaataaatatccatgctgtaatattttaatagtaatatctgcccctaatatctatccatttatgtaatattccccattactatctactcaaatgttcygctacactttctcgtaaaggtcagtgactctccactgccttacaattcaaactcctacagcgtagcaattactacaacaagagtaataactagttattgtgcttttcctatgtgctagatattgcacatgggatggatttgatttgtaattatgtgctagatattgtacataggaaaagcacaatatatattaacttacagacaccatttgaggtagg

SEQ ID NO: 689208 - DNA, 1023 bp, Homo sapiens
tgaaatgacagataatttttttctctaaaagaactattaacgaaatgacaggtaatttttttctctaaaagaactattgggttaaaagatttaaaaaaaaaaagaagaaagaaaattttaacaagctgtttaaactatttttttttttttttgagacagagtctcactctgttgcccatgctggaatgcaatggcgtgatctctgctcactggaacctctgcctcccaggttcaagcrattctcctgtctcagcctcccaagtagctgggaatacaggcatccaccaccacgcctggcaaattttttgtatttttatttatttatttatttatttttggagagacaaggtttcaccatgttggccaggctggttttgaactcctgacctcaagtgatctgcccaccttggcctcccaaagtgctagggttacaggcatgagccaccacgcttggcctaaactgtgttcttaaagagacttcttccactgccagagatggtgaatagcctcctagttggtcatccagaagtaattcttcacataattgatgcacttagctttgggaagagaaccaactttttctatacttgcttgcatttttgcttttaatatcttctacaaaactaggtccttttggtgttttaagaggttttttccccctgtttttgaaggattcttgaccttttggtcttaatcttgatagttctgagtcttttttattttggtttgatctttgtgcattttttggatggagtatcctgtataaatttcatcactagagctttttcttcagttttcccttcatcaaaatcttcttcctcttcatcatcatcatgattttcatcagcaagaagttttatttttttcttgtagaaatgtacccacttccaggggcagatcactttccagatatactgaaaagtctcacatctccctcctcttcatgtcctgctttgtatcttccttcatacctgttaagtgctgtgtactcatatgcccaggccctgaaacacactgagtgta

SEQ ID NO: 689209 - DNA, 697 bp, Homo sapiens
tgccatcttaataagcccttgttcttggcaggacatttaatagtatattaggttgagattatatataacctattaaaattgaggaagttttttgaaatgggctctatttctcttattcttttgtactaagagaaatactgaataggtagaaatagatctggattgctccggtctgaactcagaccacataggactttaattattgaacaaacgaaccattcattaatagtagttacacctttggaatgtcctgatccaacattgaggttgcaaaccctgttgttgataacaaactctaaaatagggttgtgttgttatccctagggtaatttgttccattgattaaattgcttaggttaataagcgattatgttactttgactggtctagtctagattttaatcatttggatgttgtgttgtaytctgaagtcacctcaaccaaaatttttagtctggtagattaggtgttattcctttgaatagttaggttaaagttgtgttatgtagactaattcatttacgttccatagggtcttcttgttttattttaatatccctgcctttccgcaggggcaggaaggtcaatttcactaattggaagtaagagaaacttgaaccctcttgtggtcattcatacaagtccctatttagggaacaaatgattatgctacctttgcactggtcacaatactgca

SEQ ID NO: 689210 - DNA, 1431 bp, Homo sapiens
caaacttgatggaaaaagataaccaattcatgccagtcaagctacagattctgaacagagggtttaagataatgtattacattttacatatttacatttaatttatgacatttattcctgaaggtttaggagaaaattcaatcccaactaaagagctgtaattaaaagagcacggagccagcagccacaggcccccagctctggctgaaacttcagctctgccagagataacatttcctgtgtgaccttgggcaattttacagctttctgagctacgatttcctagttggtaaaataaaaggactggattggctgctctttaactttttctggcttctgaatttctctgaatcaatggtgttacgtaatgccaagaaagagattccatgaaaaaatctaactgctctgtcgatgatgattacttagaaatgggggtaaaaaaatttatttgcaggaaggttgttagcagtaacatcataacggaaggaaaaagaaaggaaagaaaaraaaaaaacctacctatttaccaaacttctgcagtgtgctaagcaaattcacaaacattatctcatgtgaaaagacataataatttcagggatttccctcttaaggaagagagatgacattgttgcttgttgccccaaaagtgttgtgatagcaacattcatggagtgtttctatgtgccaggcactctttgaggccctttacacatactgacacaatttattattccaatttacagacgatgcagttgaggcataaagaggttaagtagcttgcccaagaccatccacttaagtagcagagccaaactttaaactcagagagtcaggctcttgaaattgcactgttaactgtatccccaccttgtcttttgctattcattcattaggcaaacatttgatgagcactgactctatgaaggcattaagttaatcccttttgaagattccaagcatgtcaccatatctttgtctttaagaagcttaaactatacacaatagatgatcagaaatgtgtgtgaaatgagtgaccacactcaaccttagccaggcagtacttgataaccatctcctgtattctggaaatgttcataattccattcaagtaagtagacagggcctggcaagaggggtccctgctctgggctcctgccccagaggtcccactctggttctccagccctggtcctctctatggccaaggaatccagggatcacagaatgcacgtacctggagcctgagtctcagccccttctaacctccctgttgggtagttgagaccttgcaactctcttctccaaacccactgagcctacttccagggcttgtactggaagcaaaccccatgagggcagaccacatcccccaggcacatgctcctcagccagagggatggccaagggcagctatttgtgggaggggagtat

SEQ ID NO: 689211 - DNA, 596 bp, Homo sapiens
aaaacctgcttctctctttgtcatgtgacccatcgctcctgctggcatcgtgccatcagctgaggggtgactgggtttcccacccacaacaagggttcaggtaggggccatgggcctgaattgtaattcagtgttttgaaacagatagcacagttactagaggctgggaaggaaggatgaagaaggattggtgaatgggtgcaaatatgcagttagataggaggaatacgttctaatgtttgatagcacaayaggtgactgtagttaacaacaatgtattatgcatttcaaaatagctagtagagaagacttgaaatgctcccaacacaaagaaatgataaatactcaaggtgatggatttcccaaatgtcctgacttgatcattacacattgtgtatatgtttccaaataccttatgtaccctgtaaatatgtacaaataccatgtatcatttaaaaaatgaaaaatataaaatagacatcacgaagtcagcagatatcagaatgggatctgagagagattttaaaagaggcctttgtacacaaatcagatttctattcaccttaagtatgggcttccttgaagtcttaaggaaa

SEQ ID NO: 689212 - DNA, 539 bp, Homo sapiens
tttctccaactcatgaccctaagtaagcttgagattctgtttactggtaacaactatcactgaatatgtaccacatgttgtgcccagtgataagcacttgcatctactaaagcaattttgtatttaattccctcacaagatgtgttatcaccacccccacttgcaaatgagggaacagctggtgaaattagttgcccaaagacatttagtgactacattttattgggattaaggggactctatttgagttattcatgcagttttacaaaagacaagtgcctcaaagaaatattaggatatagtttcagtaattttacactaaaggagttacattaaaacatcaaacactagattttaaattacttgaattccattatatgcagtttattaaaatattacttttaacctctgtawcctcaacatcttaatatttgtccaacaaataaactgacaccacatgcatgttttgcaccaaatggtgcctctctcctccaggaggagtctggaaatgtatgggagcattttgggttgtcccaatg

SEQ ID NO: 689213 - DNA, 641 bp, Homo sapiens
  misc_feature 274: n = A,T,C or G
cacccttttagaggaacattagagagtaacacatctttctccagttggctaggaagccagatttgggtattagatagaggcaaggggtcatyactggagctgataaggctgagtctttagtacaatttcagtggcccagttttcaatatactcaaaagatgcacaactgtgcacttataagctaacttttttctatcttacaatttcttctgctcattcgaaggaaagcaatgagagcatattactttgcaggcacataaagactgaaacccanatagataaccacaagaaagcctcctgatcgaattctaataactgacccctcggggacgaggatgagggggatcgggagggagcagccagaagtccctctgaggcctttcctgggttatctggctttgaaaggatcatgttcaaaccctgcaaagataaaaagcagcctccacaggctgtgagccggaccgttaaacatttccatatgacaaagtcctctcccggggtctgacctgcccggagcgcccagtctgcagatctgaggcccgggcctttccctgcctgctcctccgggaagagtctggcaaaggagctttgaaaaggactttaaaatgctttctgtagggggaaaagtctcaatgcaaaag

SEQ ID NO: 689214 - DNA, 641 bp, Homo sapiens
  misc_feature 274: n = A,T,C or G
cacccttttagaggaacattagagagtaacacatctttctccagttggctaggaagccagatttgggtattagatagaggcaaggggtcattactggagctgataaggctgagtctttagtacaatttcagtggcccagttttcaatatactcaaaagatgcacaactgtgcacttataagctaacttttttctatcttacaatttcttctgctcattcgaaggaaagcaatgagagcatattactttgcaggcacataaagactgaaacccanatagataaccacaagaaagcctcctgatcgaattctaataactgacccctcggggacgaggatgagggggatcgggagggagcagccagaagtccctctgaggcctttcctgggttatctggctttgaaaggatcatgttcaaaccctgcaaagataaaaagcagcctccacaggctgtgagccggaccgttaaacatttccatatgacaaagtcctctcccggggtctgacctgcccggagcgcccagtctgcagatctgaggcccgggcctttccctgcctgctyctccgggaagagtctggcaaaggagctttgaaaaggactttaaaatgctttctgtagggggaaaagtctcaatgcaaaag

SEQ ID NO: 689215 - DNA, 2516 bp, Homo sapiens
tctgtgcttggttatccctctgaataacctgcttcaggaaggatttctgcttccggaaccctgaaacatcacttttttcctttcacccttggaaattaataaaaccccatttctgttttctctaggagtttctttgatgcccaagctgacctctgatagggtgaagcagtttgcgttacccaacgcacctgcattttcaattttaagcccaggggaactatggatttccaaaataaaatttttaaaaacacacgctgcttgttttagtttaactatgtctcaggcaataaggagttgctaaaatrtgtatgtaggagccaaaatgctaattaagttcattgaaattaacttcattttttaaaaaactgagcatttgatattttttaagaccataaattcggaaggtctagaaatttgttttttaaatttgaatagctctttagagagcagaatttattctctcctaaaatttccctttgaaaattagattttaaaatgtatcaaactaactacatttgaagttaatattaaagattctgggaaaataaattcaatgtattgtactttctaactccttgtagctatacattggaagttcccatattaacattaaggagttaagagtagaaattaaataatttgtagttgtgtcagaagtttatgactgaatatttcagtgatccaaatgcaccctgttcattctctggtatccttcagctcttcatttcagatagtagtagaggaggaaacacacacaaacacattttaagtaacagtctttatagattattaaaatgtttgtttcaacaattttattattaaaggtattaaacgttgctctgccggtaaaactcccaattcaacttttcttttctcggctcttcattacagtgattgctggcaattatttttgggggtgcctcccctgccacgtctgcacctgcagcccctgagtttgggcctctcctcccgcgggcctcctcaggcctcggccatctatccctcctccctcccacccaccgcacacttaggcagtgtatggcaggccggggcagatggtgtctgcactgagtgagggttccatgggccgtggtgggtaagatgcacaatcctgggagcctggtatagggggcacctgttgcagccgtgcagagctgtcctgcgtgtgctcaccaccccatgctcacctgcgtgatgcttgggtgagatggtcagagagagagttctgacagcaaagtaccactgatgtttgctcatcagatcagacgtttcataggacaggcaaaaaatatggttgccagaggcagagaattgttaggctagcacactgatgcctcatgaagaaaactctcgccagtccagttacagttttgaaccttttgcaggtcattattcctctgttgtctgtcactgtttgtgagtttgtctaaggaggttaactgtaagtgttctaaggcatgtgtttggtctccagtggtgcaggcaaatgccacgtcacagatcctgggaagagaagaggtgaagacgacgtcttggacagctgcagccctcagctctgggagcagggaccacctagaagctcacagtcactgtgggcttaccatgtgcgggatctttgcaagcactctagaaaaaatatctcagtcctatggggtggatgctactatcatctccattttacagatgaaaagacggaggtttccgcaggacagcgtgctgtgcatcagtgagcaggcctgatgggaatgagcaggggtacgactccatcacccaccctcggagtcccctctgtaggagtctctgtgcaatcaaggatgctttaggtaggggccgtctccttccatcaggcgccttggggagactctgggccttcttagggagggtcttccacagaagggggctttgtccagtcccaggaagtgagaagtcaccactggaatccctcctaagtgatgcaccttgtttattgagctctctctcagagattcacctaaaggcatctgttatgcgcacaggtttttaaaactagaggaaaatgataaggacacgtgttctgcatcacgaagcttattcattctgcaagtcctgggtaagtggagatgaagcctgtctggtgacaggtgacagccaagaacctcctgggagacaggagaaactttcctctgcctttgccatggaacagagtgaagagctgactgcacactgagcaggaatccactgcctggggaccctggctcacctgcattgttgcatggagggaggtcagttccagaacttcccctgatcccatgtgggggctggagtggtgagggccaggtgctacatgggcctggttgggggtaggggaggccactgctggaggagggggtgcctaggactcaatcaaatgctgagagtccatttctaagatgttttacctgcaaaacccaaaggaatgtcgtagttgcatcaagtcacttaaaatgacccacagaacaaatttcaccttctgaaactcagttttctgaaagctttgt

SEQ ID NO: 689216 - DNA, 888 bp, Homo sapiens
gtgagaagcagaaggggatgtgactgagagaaggaggagaggagaagccgcaggtggaccaccatgccccgctcaggtcctactggcagctccctgtgggtacttatgcgccccatctctccactgtgcagggatgtgagcaagctcatgcctgcttaaccaaacatgctttcagtaaaacttgtaggaaagctctctgtgaggagtacagtccccgttaggtacaaatacaaagggaacccaagtttctagaacaagtttaagtactctttagctgaacctctgggcttttttctgctgtagaataaatgatggccttttagcaatgacgtcagtgaagttcacaactctgcttacaaatacaccagatatattattgtccaaggtcgaaaactgcacagaactgtgtgtgcacacgtgtgtggatgtatgcacacatgtctgaatgtgtgcccttgcaggtgtgagcatgcctctgtttgggacagcacacacatgcttcccctgcagggctgtattatcttccaggccctctcaggacccccagctcaggagaggcagcatgcaaacattttgatagggcaggaaactcaaagatgaaaaagaaattcatgaaattgaaaaaaccgggtttattaacattagctactatttgtttaaataaatggcctcgacgagagaagttaaataggcaaatgcatgtgaaagtgtcctctccgtcaacatgttatttctttaattagtggctgatgacggcatttgcrtgacaactcagtgaatgctccctggtcctagaaaagaaataaattacacatgtgtttactctggttttcagggagatttcgttttcaggggtcgcaggggcatggctatgtttgggaggtgaga

SEQ ID NO: 689217 - DNA, 649 bp, Homo sapiens
agaaaattgcaggggtacatggtgctcaccctctccttttcattaagcagtctctatcgagtgtatctggagctcagtgagaaatctcccggtttcaggagacacaggcttctagtttttgaaaacaaatacatattttacattgagggcgaactgtaaaggcatggcttaaggatcggcaagcaggtggttccaggcagaatgctgagaggtgcgtgtggacttccctatgtatgtcgtgatgtacggcctcagggtccgggtcacagagatgcccctccacacagaggagacaccttgctggcattctctgggctctgcacaggctctgacggcaaccagctgatcacacagtgtaccttcctacagctttgcctttcttactggaccgtcagcacccaggaaaggactgtccttactcggctgtggccccactcctggtayggtgccaggacatggtgcattctgaaggaacaattgttagatccaatatttcaaaaactgcattttaatgtgcatttattaagcactgtgtaacctgagaagatgtgggaagagcacggggcacccagcaaggcctctgacttccctggtcatggtcgcctcccacgtgcaaggagaggccagtgcgtgatcattcctgtagcca

SEQ ID NO: 689218 - DNA, 1216 bp, Homo sapiens
tggggacaggcctcagagaggttgcccacagctatcacggctactaataggtggtataatatcgtcatttccatttgattgcaggacctgtttttattttgttttttgggggctgagcaacaatctgactcattcattttcctttgagtgagaatctgacaatgtaagaaagcatgttttttaaaaacaagttctatcataagtgtatccgtaaaatggtcttaattgatccaaatcataataaggaattttaaaacttgcctataaccagcaccagagtatctctgacttagatcttctctaattctaacattcttctttctgggtctgcgattctcctttagagcctcatttcatgtcaggtctgatctttgttggaacgggatactgttgtgagggtcacactcgggtcggcagcagctccctgtggtcaatgagttccaagcttgtttcgaagtgaaagaagcaggaggagtgtttgggaccagggctctggaagggccaccaagccagccagaaacagaggaagctgcgcagccccatggggaatgtcgccattttcttttccagccaggccaggacagaagtccagtacaagctcatggtcatagctgcgagtttgggggcagcacggaaaggcaygctttctgctgcttctctcggtagcacatccgtcatagccacttgcactcaccagggaccatggaagccgcccctctccctgccagccacgcttctcccatcttccatggacagtcacatcctgcttccctgcccggggtcccagggtgagtgcttgggcaagcggggtccttcctgcccgccccccaccacacccaaggccctcagctctgcaccagccttcgcttgagcatgcagggacattctggcgatgcctctgtcaaaagcacaggctcctgttcctcctgcagtctagcacgcgtcactaacgtaacaggtatttgatgtgtttcatgaagaaatggacaagaacttaatgcgacggactttacaatgttgtttttagaggtcttcaagggatcaatatggcacgagagcagaagatgtggagtgtgctgacagggttactcctctgagggtgcaaaggtagggcaagtgatgagggcagggaacaggctgtgcttctgaaggtgcagagctgggaaccacatcagcacctgcactctggggagcttctgtgcaaacaggggtttca

SEQ ID NO: 689219 - DNA, 1216 bp, Homo sapiens
tggggacaggcctcagagaggttgcccacagctatcacggctactaataggtggtataatatcgtcatttccatttgattgcaggacctgtttttattttgttttttgggggctgagcaacaatctgactcattcattttcctttgagtgagaatctgacaatgtaagaaagcatgttttttaaaaacaagttctatcataagtgtatccgtaaaatggtcttaattgatccaaatcataataaggaattttaaaacttgcctataaccagcaccagagtatctctgacttagatcttctctaattctaacattcttctttctgggtctgcgattctcctttagagcctcatttcatgtcaggtctgatctttgttggaacgggatactgttgtgagggtcacactcgggtcggcagcagctccctgtggtcaatgagttccaagcttgtttcgaagtgaaagaagcaggaggagtgtttgggaccagggctctggaagggccaccaagccagccagaaacagaggaagctgcgcagccccatggggaatgtcgccattttcttttccagccaggccaggacagaagtccagtacaagctcatggtcatagctgcgagtttgggggcagcacggaaaggcacgctttctgctgcttctctcggtagcacatccgtcatagccacttgcactcaccagggaccatggaagccgcccctctccctgccagccacgcttctcccatcttccatggacagtcacatcctgcttccctgcccggggtcccagggtgagtgcttgggcaagcggggtccttcctgcccgccccccaccacacccaaggccctcagctctgcaccagccttcgcttgagcatgcagggacattctggcgatgcctctgtcaaaagcacaggctcctgttcctcctgcagtctagcacgcgtcactaacgtaacaggtatttgatgtgtttcatgaagaaatggacaagaacttaatgcgacggactttacaatgttgtttttagaggtcttcaagggatcratatggcacgagagcagaagatgtggagtgtgctgacagggttactcctctgagggtgcaaaggtagggcaagtgatgagggcagggaacaggctgtgcttctgaaggtgcagagctgggaaccacatcagcacctgcactctggggagcttctgtgcaaacaggggtttca

SEQ ID NO: 689220 - DNA, 598 bp, Homo sapiens
cttatctaacacaagtattttttctataaaacacttcacagttttcttgggcggaggaatgctaraaagcacttcagcattactcttagggaccattttaaacagcaagatcaccagcaaaaagcacaaaatgtgaaaaacatggtattagactataaaaagaatactggtttacagtatgagagaaaactaaaaccagaaggcagggtcttgccttgtttgacttcagctgggaatgtaagtgttgcataacaaatttttttgctgttctgtgcatgtcagcaaatgattgcaaaagtgctgtgaatcacaaatttctgtggatatgcaaatttacaaatatggaaccactcataataaggattgaccatatgtcatttctgaatatacatgtgtatgtatctatatctatatgtaacccataactatgtatagagatttggactgtctccagttagatgtcattatactcctatgaacattcctgtactttcctctcttggggcatttgtgcaaataattcttcagagatactggacaggaattatagaagatttattgtagaaatttacactgaaaccagcagtgcataagagtt

SEQ ID NO: 689221 - DNA, 1545 bp, Homo sapiens
ctaactctgggccattagcataagaattgagttaaattgtaagacactcatttagtatagacaaaattggagaatggttggcaagggaaaaattatcatatatttggtgtcggaagggttgtgtgcatgtgtagataaacagtagttggccaggtatgctggctcatgcctataatcctggcactttgggaggccaagatgggagaatctcttgagcccaggagttgagactaacttgggcaatatcgggagacccctgtccctacaaaagatacaaaaaaattagccaggcatggtggcttgcatctctcgtcccagctacttgggaagctgaggcaggaggatagcttgagcccggagtcaggggctgcagtgagctttgattgtaccactctactctaacctgggcaaccgagtgagatctggtctcaaaaaccagaatgacaaaaaagaagcagtagttttcttttttccttttaatcactttggttatacagcatgacttcaaccccctcattgttacaaagagtttgatatcrtagttttaggttgcttttgtgtttgttttattgcttataaacagtaatatctgtaaaaacattgtaaggagagaaataagaaaggagccaaacaatgcgctgttttgtctcaaacaaaattgatggagtaaactaaaaaatgattttcagaatacagaaggataaagccaaagaatgatggtaacaattacaagagtgttatgaaaaattagctctcaactcctgaaacaggtgttgaaaattgctgaaaaaactttgaaaaaatataaccaatgcacttttaaagaattattcaagtctaaagcccatcacccaaaagtattatacagtttgctcatgtatgtattactcagtttatatttcccaatgaaagattaaaactgaataggattgtaagctattaaattaaaacttaatgtttaagaattaactattctggctcaaatcagtttcaactaccaacatacaatgcaactcacatgttaatagtaaagatgtaataacccatcaggatacataaaaatacataaactcttctcgtaatttgatattcatataagtacttagtatcatgtttcctgtgttaattgtaggccaaaacagctaacagagattctagtctcctctgatagaaacttacacaaaccttttcctagaaaattatcatgaaagacattttaaaaattacaccaaatagactggagaaagtattttgaaaatgtttaaattttcagagatataagaattacttgtagaatatttaagatgttaaaagtcaggtctgtcttcttgggtcaaccactaatgaactgagtgaattgggaaaatttagttaagctctaaaaatcaaattttcttcatttctaaaataggattatctcctaggtcagtgaaagaatgaaaatgatatactactttcccaaagtgaatcacagaatctagaacccctcttctctaaagcaagccataaaatctagaaagtcactccctcccctgtcccttcttt

SEQ ID NO: 689222 - DNA, 593 bp, Homo sapiens
tttacatgtcttcttcacatactcatacatcaaaaaattagcttttttatatatttgcttgtatctattatatatttatggggtacaatgtgatgttttatgtttattttttaaaaagcagtctcaaattactcttttataggaagtagaggtataaatgataaatgcacctaccattctattagacaaygtaggtaaaacaaattttaaaaattgttaaatggtatgaaaaaggcaaacccttttgatttttccaagaaattacaataaagtaaaatttaaagttattcctgactaaatacacacatataaaatatggctttggatacagtggcattaatttgatggaatagtttcaagagttcaaattacttatcttattgaattaatgcatgatactcaaagtaacctataatgtaatcttataggtatacaaaaatggataaggggatctcactcaataaatactgtgtacttattatgctaaataaatgctttttattttcagtaagtatttattcagtttagtttcaataaaagccttttaaggtattttttctattttttaaatgtgacaaatttcagagatatta

SEQ ID NO: 689223 - DNA, 966 bp, Homo sapiens
gttaattctggctctgatctgtgacatcctctgaatttaggaagaagccatcttttatcccacttatggcacctcaggttcacattgctggtccagatgcaaaacacagtcaatctttgatttatccccaaacataactcacataaagcattattatataaaatagaatttactgaagatttttttgtaatgctgaatgtgtgcttttcatgttaaacatttatgttgaagacacattgtttattagtagttgggtgttttttagagtctctgaaatttctgtggacatagtctctagcctctgctctacctttccctctcttctctgctctccatccctttccaagtttctatttcttatctagarcaatttagctttcttctctttcttattttcctctcatctctgtttatacaaaaatattcttttaattatggatgattcttagctattttttgataccaggtattaaatattggtatgtttttgtattattttgttttgtcttgctgtatgtgtctaacaatatgcattttcctagatcagaaccattcagtataaatataatgtgagtcatatgtttacttttgcattttctaatagtcacattaatgaattaaaaaaactcaggtataacaaacattaattgtatattttatttaaccaagtaagtttaaaatattatctcaagatgcaaccaatataaaaattattgagatatttaatctttttcattgtactaagtctttataatctggtgtgtattttatacctccagcccatctgaattcagatgctaaattttcattggatatgcttgatctctctttagatttcataaaatttgtagtggaattattagacttacatactcaagtcattccaaacataaataaaagtttttcaataattgaactgaatatcagaaataattttcctttaatactcatatctatgatgacaaa

SEQ ID NO: 689224 - DNA, 966 bp, Homo sapiens
gttaattctggctctgatctgtgacatcctctgaatttaggaagaagccatcttttatcccacttatggcacctcaggttcacattgctggtccagatgcaaaacacagtcaatctttgatttatccccaaacataactcacataaagcattattatataaaatagaatttactgaagatttttttgtaatgctgaatgtgtgcttttcatgttaaacatttatgttgaagacacattgtttattagtagttgggtgttttttagagtctctgaaatttctgtggacatagtctctagcctctgctctacctttccctctcttctctgctctccatccctttccaagtttctatttcttatctagagcaatttagctttcttctctttcttattttcctctcatctctgtttatacaaaaatattcttttaattatggatgattcttagctattttttgataccaggtattaaatattggtatgtttttgtattattttgttttgtcttgctgtatgtgtctaacaatatgcattttcctagatcagaaccattcagtataaatataatgtgagtcatatgtttacttttgcrttttctaatagtcacattaatgaattaaaaaaactcaggtataacaaacattaattgtatattttatttaaccaagtaagtttaaaatattatctcaagatgcaaccaatataaaaattattgagatatttaatctttttcattgtactaagtctttataatctggtgtgtattttatacctccagcccatctgaattcagatgctaaattttcattggatatgcttgatctctctttagatttcataaaatttgtagtggaattattagacttacatactcaagtcattccaaacataaataaaagtttttcaataattgaactgaatatcagaaataattttcctttaatactcatatctatgatgacaaa

SEQ ID NO: 689225 - DNA, 1560 bp, Homo sapiens
atggtgctatcttggctcactgcaacctctggctcccaggttcaaaagattctcctgcctcagcctcccgagtagctgggattatcaggcgcacaccaccacacccggctaattttgtatttttagtagagatggggtttcaccatgttgaccaggctggtcttgaactcctgacctctggtgatctacccgccttggcctcccaaagtgctgggattagaggcgtgagccactgcacctggccagagagcctaatagttttaaaggatctccacaatttctttcaaaatatgggtaaggaagaaataatttctataattttcattatgcttcatagaaatgttaaaagtgttatttatttcattataattttacattgggtacacaatctgtctaaataaccaggttgaaattagacaacaaatattgggttatctttatattttagtttcatgactataatatggatagggtaaatagttataagactaaattgttattttgatgatattttagtattttgttaacgttataatgattttataagataacttctggtgaactagtacgttaaataattagaactgggtttaaggattcagatcataatgattcttagaattatttctaaattttctgatacaaatacccattcttttacttaattacatcctctgattaaagcttttaaggtgagtcacttacatattaacccttgtaaacttatacccattttaacaataatttgacagctcacactgtaaatgtttttactgtggatgaaagatgcgttaggtggagtcctagtatttctgccttggctgactttgcaaagaaaatctgcctttgttcctaaactattttctccctctttctccatattccaaatgtagcatgagtgtgtttcattggccatcctagatcatgtctcttcactctagaagcaagaagaatgggaaaatgagtttctagttctttggcttttagaacagtaggtaacctctgacagccgccaagacttgggtggcaaaaaagaggatcagmttttggccatcttctaaaggatgcatatccactttgttacctcttttaatataatttccttaagtttattttcttgtcattcttttttttacttgtctaatctccaatggatacatcatttttaactatgtctttgactaccacaatgattccaagtaattatttctatgaagctatagtaggttcacattactgattggatgtcacctaattggtcacatgatgctcactccaaaacttgccagcgcaactgagttcccatcctcaatatttaatgaccacttacccagtcaccaagtgactcttccctccttcattaaccacttttttttctcaccaaatatgtcacagaatactagggactctacattctgaattcttttgaatctatttctttgacttaccatctcctccaatgacatcacatggactagacccttaatatgcttttgaatcgctttgagggtattttcaaaatgcagatccctagactctgtttctgaaataatttccaca

SEQ ID NO: 689226 - DNA, 1560 bp, Homo sapiens
atggtgctatcttggctcactgcaacctctggctcccaggttcaaaagattctcctgcctcagcctcccgagtagctgggattatcaggcgcacaccaccacacccggctaattttgtatttttagtagagatggggtttcaccatgttgaccaggctggtcttgaactcctgacctctggtgatctacccgccttggcctcccaaagtgctgggattagaggcgtgagccactgcacctggccagagagcctaatagttttaaaggatctccacaatttctttcaaaatatgggtaaggaagaaataatttctataattttcattatgcttcatagaaatgttaaaagtgttatttatttcattataattttacattgggtacacaatctgtctaaataaccaggttgaaattagacaacaaatattgggttatctttatattttagtttcatgactataatatggatagggtaaatagttataagactaaattgttattttgatgatattttagtattttgttaacgttataatgattttataagataacttctggtgaactagtacgttaaataattagaactgggtttaaggattcagatcataatgattcttagaattatttctaaattttctgatacaaatacccattcttttacttaattacatcctctgattaaagcttttaaggtgagtcacttacatattaacccttgtaaacttatacccattttaacaataatttgacagctcacactgtaaatgtttttactgtggatgaaagatgcgttaggtggagtcctagtatttctgccttggctgactttgcaaagaaaatctgcctttgttcctaaactattttctccctctttctccatattccaaatgtagcatgagtgtgtttcattggccatcctagatcatgtctcttcactctagaagcaagaagaatgggaaaatgagtttctagttctttggcttttagaacagtaggtaacctctgacagccgccaagacttgggtggcaaaaaagaggatcagcttttggccatcttctaaaggatgcatatccactttgttacctcttttaatataatttccttaagtttattttcttgtcattcttttttttacttgtctaatctccaatggatacatcatttttaactatgtctttgactaccacaatgattccaagtaattatttctatgaagctatagtaggttcacattactgattggatgtcacctaattggtcacatgatgctcactccaaaacttgccagcgcaactgagttcccatcctcaatatttaatgaccacytacccagtcaccaagtgactcttccctccttcattaaccacttttttttctcaccaaatatgtcacagaatactagggactctacattctgaattcttttgaatctatttctttgacttaccatctcctccaatgacatcacatggactagacccttaatatgcttttgaatcgctttgagggtattttcaaaatgcagatccctagactctgtttctgaaataatttccaca

SEQ ID NO: 689227 - DNA, 648 bp, Homo sapiens
tgttaatcaatgtgtctyataagtgcattaaatgcaaaatagtctagtttatccgataagcacttaagtatgatgtttttgatactaacacaactctatcacccaagacgtctatcacatttatcttcatagtgaagatagacttgtgtttaggggaagacaggtagatcccagaattctactagccatcaagaggtctttcagtccacttactgcaaaaaagtgaatttcactttttgtaggaagtcaactcatatatcaaataaagtaacagaaatggaaatgcaatgaggacaacatgagaagggtttaacagtgaaggcactgccaatgtgcaagagggcaggagagtgctgttaactctgtgggcttgtatgagtaagaagaagcacgcagcctctaacttcctaagatggcttctaaggcactttccagctgtgattgtgttttcggacaatctgaaaagtgtccctaaatcagataattaaacgaataaatagaacttagattgaagtaggcatagaaaagaaaagacaaatggcatagcagaaagaaaatcctcttaatcttccgagaaaaaaaatattaagctactatgattttaaaaaccaatggttacaaggttattggaatgtgttcttgacaacc

SEQ ID NO: 689228 - DNA, 648 bp, Homo sapiens
tgttaatcaatgtgtcttataagtgcattaaatgcaaaatagtctagtttatccgataagcacttaagtatgatgtttttgatactaacacaactctatcacccaagacgtctatcacatttatcttcatagtgaagatagacttgtgtttaggggaagacaggtagatcccagaattctactagccatcaagaggtctttcagtccacttactgcaaaaaagtgaatttcactttttgtaggaagtcaactcatatatcaaataaagtaacagaaatggaaatgcaatgaggacaacatgagaagggtttaacagtgaaggcactgccaatgtgcaagagggcaggagagtgctgttaactctgtgggcttgtatgagtaagaagaagcacgcagcctctaacttcctaagatggcttctaaggcactttccagctgtgattgtgttttcggacaatctgaaaagygtccctaaatcagataattaaacgaataaatagaacttagattgaagtaggcatagaaaagaaaagacaaatggcatagcagaaagaaaatcctcttaatcttccgagaaaaaaaatattaagctactatgattttaaaaaccaatggttacaaggttattggaatgtgttcttgacaacc

SEQ ID NO: 689229 - DNA, 648 bp, Homo sapiens
tgttaatcaatgtgtcttataagtgcattaaatgcaaaatagtctagtttatccgataagcacttaagtatgatgtttttgatactaacacaactctatcacccaagacgtctatcacatttatcttcatagtgaagatagacttgtgtttaggggaagacaggtagatcccagaattctactagccatcaagaggtctttcagtccacttactgcaaaaaagtgaatttcactttttgtaggaagtcaactcatatatcaaataaagtaacagaaatggaaatgcaatgaggacaacatgagaagggtttaacagtgaaggcactgccaatgtgcaagagggcaggagagtgctgttaactctgtgggcttgtatgagtaagaagaagcacgcagcctctaacttcctaagatggcttctaaggcactttccagctgtgattgtgttttcggacaatctgaaaagtgtccctaaatcagataattaaacgaataaatagaacttagattgaagtaggcatagaaaagaaaagacaaatggcatagyagaaagaaaatcctcttaatcttccgagaaaaaaaatattaagctactatgattttaaaaaccaatggttacaaggttattggaatgtgttcttgacaacc
